United States Patent Application Publication US 2015/0376612 A1 - sequence listing, part 41

SEQ ID NO: 97969 - DNA, 1041 bp, Homo sapiens
cgcacacacacacacacacacgtttcacttttctatttagagaaaatgtgtagccaactagacttgtaagagaatgaagaagtcgtgagacacaaagggacaagcttaatataaagcctaccaaacaaaattagatttagaaggtatttgggtatatatgtattaacatctccaatgtccctttctttgtaattatatttccactaggaagtaacctaagaatctagaatatatactcctgtaatatagactgttttgtaacaaaaaaacagacactttaatcctagtacgagaggaaataggaatgaggatgggaaagaaggcaaggaaggtaatagtcaaagaacaaagacaaaagcaggagaatatgcctcatggaagctgacaggtgtctaggttgagtggaaggtccctctagagaaaaaggttaaatattaagatgacagaaagtgactggtggagaagagggtgccgcaggcaccactgtaagggggagtagaaccctgggcaagaaggcaagaagtaggcacagatacagaggagatagtagtagggagatggagaaatcaagggagatcaggcctaatgtcctcttggatgccacagaatgcatgagtttagggacacagagttcacacagagttccagtgagggtggaaattaggtaggggatgtgaggacagagacagatttggaattgttaagagaaacgagaaagggaagtggccaagtataacttggttttaaagaccagtggcattctatgatttgtcggaacctttactcagttaaaggaagaaataaagttataattacttctatattacacatgtgggggatttagaattgtttctttgatatacctttttatattcagttattgttcttttttttgagttagggtcttgctctgtcatctgggctacagtgcagtggtgcaatcgtggctcactgcagcctcaaactcctgggctcaagggacacccctgtctcagccttctgagtaactagggctacaggtgcatgccaccatgcccagct

SEQ ID NO: 97970 - DNA, 1063 bp, Homo sapiens
ccaccacgcctggctaattttttgtatttttagtagagacagggtttcaccatgttagccaggatgcatttttacagagtaataagtgtggttattttaaagcttaggatgaaaatattcacaaaagagactctgaaaggaaagaatgaagttttcttcagggatggggacaatggaggaggaatgaaagaaaggaatgggggtgctcatcccctgctaagatgcctttaggggatgaagtgatggaggaaaaagagagagtggaggaaggttggggagccccaatgggagtgatttgcatacttcacagatattagtgggaggctgggatgaaggaattaaatccgctaaagaaccaaaatactgttctttcttattatacccccacctactcatcctacacacaactctctgcacacactgaagctttttataatccgtgaactttgaaagtcaaacatttcctgctcatcagcttcagcgagcatccagtagctttctttgaccagctcttaaatggtgatcttgaagaaaatgtttaatggttttgttttccaatttgtattttagctgcaccacagggaaagatggaaatactcagcctgtttgtcttgagcatacccagagattgatggattcaggtttctatatttgacacagatggtttattaactgttcttttctcccttctgcagttgtagtaaagaagtcaaaaacagtttagaaaaagtaggtcaagagtgttagctgaagaaaagtagtgtatttatgtctcctaacttttgtttttcagaaagcagtactcttttaaagacagttgcagagggataaaaatacttgtttcaagtaatccaatccccctaccatacataagttgtataaatggcataagaaaacaatatttaaaacacactagcctattataaaaatttccagaacagtttgaaacaatggacccctgcttccagagcatattggggttgaagaggagtgttaatgtcacaggagaaaaaattagctgcacaaatgctttggtggactgctcttaaaccatctgaccatt

SEQ ID NO: 97971 - DNA, 1003 bp, Homo sapiens
gaggtgggcagatcacctgaggtcaggagtttgagaccagcctggctaacatggtgaaaccccgtctctactaaaaatacaaaaattagctgggcatggtgatgggtacctgtaatcccagctacttgggaggctgaggcaggagaatcacttgaacctgggaggtggaggttgcagtgagccgagatcgcgccattgcactccaacctgggcaacaagagtgagacctttgctgttaaagggtggtccctgcagcagcaacatcatcagggtgcttcatagaaatacagactctcaggccctaatccagccctgttgaatcaaaatctgcattttgacaccatctccaggtgattcatatacaaattaggtttgagaagctctggaaatcattttcatgggaccgtccctctctgcaagtgaactggtagagagataaagactcatcttgtgaagtacctgcagatactaaatagcataattaggaaaatccttttagagtgaaaggaattcagatatttattgtacattgttggctcaatacaattgtttaatattgaccttcccacactgtaccttgtgagatttaagatgtatgcaaatacaatgactattattttcaaaaaatgatttttgtagtcattttactagccataagccagagtgctcaaaacctttccccctttttctgctttctgtattctttctaaaggtggctaaattgtcgaagttataattcagcatgaagagaaaactccaagaaaaaaggctttagctggggccatgcctctgttgtttgcatcctaactttgttagagctccttaagcacagtagagcctcgtctgttccatgacactgcaggcttgtcgcataaccctatgagcagtaatcaactggactccagatgttgctgtctcacattagcccaacgttagcttcaataatgttgatggcagcttgatatatatcagggtttcctagctttcttagatgtcttactta

SEQ ID NO: 97972 - DNA, 1054 bp, Homo sapiens
tggaacatatccaccttgtaaatactgattctgagattcaaatatgtccctaataagttctagcctatcattatctcttttccttcttcttacacttgccttgacaaaatccgttatttgcatcattttgaaatatttgatgtatcataactttgttgaagagtcttcagccattttccttcctgtataagtggaaaacatttttattcttagatgattgaaaactggattgactgatgaatccaatggtttatttttatttctacatccatttcctttttttctaataaacctttttccagctttattgaggtataactgacaaatagaaattatatatttataatgtgtataatttggtgttttgatatgtgtatacattgtgaaatgatcaccacaatgcttgttaacatttgttatctcacatggttatcttttttttgtggtgagaacacttaagatctatcatcttagcaaatttgaagtatacaattagtgttgccaactatagatatcatgcggtatgttagatttcttgaacctattcatcttgcataactgaaactttgtatgtttgacgaatatatccccattttccccaccttcccaattcctggcaaccactattctactctgtgcgtctgagttggactgttttcgattccacatataagtgagatcatgcagtacttgtctttctggactatttcacttagcataatgtcttccaggttcattcatgttgtcacaaatggcaggatttccttcttttttaagactaaataatatttcattgtacatacatgtacagtcatgcatcacttaatgatggggataatttctatgaaatgtgtcattaggcaatttagtcattgtgtgaacatcaaagtatgtatgtacacaaacttagatggtatagcctactacacacttaggctatatggtatatatggtatagcttattgctcttggggtacaaacctgtacagcaggtttgtactgaatactgtagacaattataacacaatggtaagtatttgtctatctaaacata

SEQ ID NO: 97973 - DNA, 1101 bp, Homo sapiens
aagaaatcaaaatcattctgaacatttgagataaaccagctggagcttttctgcgcctaccactgttgtggattatctatgtgttgtgtagattgcaaccagatcacaaagctagttttccctctttatgaatgtgaaggaaaatattccagtaaattaacatttgccagccacaggactaaatttaatgaagattatgagcaatgtttgacccctctgaacaggagacaaaaaataaaagtaagcactggttctgtttcacttgggcaatgtgatcttgggagaaaaacctatattttcttactcttttaaaaggcttttgcaacactgatttcagccaaaggcaaagaaaccaaggttgttacctgtagttgaggacagatgctttggcgttttctcctagatgaatgtgttttgcaggagaggtggcttttgggatcttcccagttttaatatgtgcctacacatcaatgaaatgatcttgcattcaaaatgcttgttaagtctatatggttggtatctgtgtaacctctaaccaggtggctttctctgttgtgaagtgttcctttaagagaaaccagaggcttctcgcctggggcttgctgtgggcctggcctggatccacattcttgtgcattgctgactactttcttgggaaaaactggaaccagttttgcttggtgtgttggatagggaatggcagcattgggtgaaaacctttccagctctgttatcaaaagccaggcctggcctgaaagagggaggactatgtttgaagtttgattgatttaacagaggcagaggttgcttcattacacacaggatgccttttgtatcaggatatgaatgagagattagaaaggtgacgagatgccctgctttgcttgtgacagtgccagtttactcctgttggtttatcttaattatcaaaagcaccccctttcacatgtaaaagtgtcctggtttgggtgataattatctggtcaccctagatattaaggaatcctgaatttttttcatcacccctcttccgacaccagattttgagtcttgccttatttcagtcttttatttattaaatgcaaagctagaaaatcagaa

SEQ ID NO: 97974 - DNA, 1063 bp, Homo sapiens
cgccccggcgcggtcattcatttgccatttcggtttccgctgcccaggatgtgttggatggtttggttctccagggaaactgggactttggggtctatttgagcatcagttgagggagaggacgcttcatttcctttttggttgggaatgtgccgtgaacatcctctgctggagcttggggcctggagcaaactggggctgcagatttagacgtagacgtttccgaggacgcgagactgcagaggtctgactctctcatgccttgtcttcactattagcagcgctcgggtgcttttcgtcgtttattattattaatttagagaacatctttacaggcacatttcttttagagttagaagtctttggagtcagtacagagagctcacaattagagttacaagggttcaatcgatattaaacttcaggaaggaaaacatttgtgatcattacagatagaggtggacagcatgcaaacttcgggggcctttagcttttgggttatgatttctgctttcactgtcctagactcacgcaaactgttttcgtatatatatacctttgtgaaagtgtgaaacttgtcttttctggagtagtgttctatagtttgtcatttagaagaagaatattttagtgtaattagtagagctctccatgtgtttgtcttataaatatgattttctttttactatttctcctattccctcgagggttcatttcttctgttgctttgagagagctttttttctttctcttcccaacagatggctgtatgttccaagaggttatctttaaaatgacacacacattatctacaaagaaagaaagatcagttattgactttatctttggagttattaaaataaaaggcctaatctggatggggatattattaatggcgtgaaaatctggagtttgctaatctgtttggtcatcagaagattcctgcggggattgtttatatagcgtgggagacagatggcatccctagcagactagagaagccaggcataaagggtcattgtattcttcagaaattatccacttcactattagaggtggggta

SEQ ID NO: 97975 - DNA, 1050 bp, Homo sapiens
cattaagacagtaacctctcccagtcttgtcaaactggccctcatgtaggagatcttaccaattcgtacagccagaaattataatgtatctctcaaatctctgtgtacaatctgatatctctgtttttggtggccccagaaggttaagatgtgccaagtcttgttagtaccatgagagcagtaagacagtagccacgctctctagatgcagctgaaaatattagggtgttagatgcatgttccagttccttctatcctcagggtgaagctgagagcaggtatttatcccttactgcgctaaagcaggcattatttatctgcactaaggcaggcatttatctctctctactctaagccagggagaagctctgtggcaaatacctatactactgtcattcagactacatcctctgagggtatggccactgggagtgggcccgttttatatctacctctttgttttctgtggtctagagagacttggaaatgcagagccaaatcagctcccagagctgggtggctaaggaggtagtccttatatgagagctgtagaagttatgtcactagataagtggacaaactacttttaggaagcttctgtagacttggagttatcgctggggcaagctaggggagaagtcttggcaagtaccaagctctcatttaggctgccagaggtgtattgtttggctgccccattaactccctgatgcaagttagttagaagccagaccatcgagtattcactggaagaatgtacaaagaaatcctttttagtgaaaaatagaactgtgtgtttcagcactttctctgcactgcttccaagaggtgtagtccctggaactgcttgcactcctgtttaaaaccacctcttaggattgtgatctggggagattcttatatgagactcttgtattcctaatcctttctattcctagagctaggaggtttaagatgcagtccctcaagtagaagttataaaagttggggtgcttgatgcatggaaaaactttttccaggaggaattggtagactggagttattgatgga

SEQ ID NO: 97976 - DNA, 1004 bp, Homo sapiens
tctttatctcacagaaaaagagtttttcttatacaatttcaggtgcacattttgcagcaaaactgcattgctctacgtgattctatacagagcgctcaagaactactggcccaggaacaaaaaaaaaaagaagagttggagattgctacttcacagctcaaatctgatctaagtatgaaaatagatgctagaaatcaccctcttgttagtttttggagatttcatggaaaaactcttaagatcccaaattcttaaagtggccagtgttattggtatttcccacagtgctgtatgtaaaacattgcagatttcccttctacctgcagtactgagatacagaaggattgttgttaataatatatttgaccctgttaattgtaaactattccttatttgtttttttccagcttgtttgtggacctgggaatatttggtttctagacatctggcttgaatattgggcaaaaaaagtaaaacaatagattgaatatttgataatagaatattagtaaggtagtaaggccatgaatccttgatgacttatggattctgtcagttcatcatgtcagattctccattcttcatgttatcaatctattttggttaacctatatttgtagagatggatagttgtaaggtacctttaagagagcttagattaatctcctctttttatagatgagtcctcaaagatgacagagctaggaaaggaaggagcctagacttgatcccaaggtgttcggtcatatttcttctaacccatcagccttttatcatactactgttgctagtacttcattataaagcagtttccaggtagtctcaatgacagaggtcacagagttacagggcagtgcttcatgtgattaatacatcatggtttacactgaactttcacataaactatttcattcagtactcaaagctatccttccagagttacaaaaggaaaaaatggcaaagtaagacctagacctggatcttctaactccaagccgagtgta

SEQ ID NO: 97977 - DNA, 1058 bp, Homo sapiens
tatagttgcagtaaaattagggaagcacctctggaggagtaagtcacattcccataaatggctcattcgcataaatcagttaaactcttttctcctactttgccctagtacttccagcagagccatgttaagaaccaggcatacctgagcaccagcaggtaatagctggctagagcatgatcatttgactctccttctcagctcttccttcatccactatctagctgctgctttactcaaaggttaaatcaaaacttaaagaatattgattagaagggacgttcacatgtttctatgaaggcttttctattaacagcttatatgtcctttaaaggcagatttagacaagaaaaaacatcagcctgggtggaatgactccatctaagcagatgttaagccattaaatgttttcagttttgacctgagattacttagatcagacttatccagttcaggtcaaatgactaaagttttgccttaaattatacctcggtaaatatttagataataatagcatcccatgaaaatttatacttaagggaaatgcagtgtgcacgtacatctttattcctttttatttatttatttatctgagactgggtctcgccctgttgcccaggctggagttcagtggtgtgatcatggctcactgcagcctctacttcctgggctcatgcagttctcccacctgagcctcctgagtagctggaactacaggcatgcatcaccacacctggctaatttttttttttttttaagagatagggtttctccatgttgcccagggtggtctcaaaactcctgggctcaaacaatccacctgcctggcctcccaaagtgctgggattacaggcatgagccactgttctcagcctagatatttattattttcaattagtgagcatgttgatacaggaaagaggtacaagctaaagcagagatggtattttccagatatatgatctctgcaaattttatattcagctgaaatgttactgccttaagactgttccatattgtgtttatgtagtcgttggcagcatcatttaaaactctcc

SEQ ID NO: 97978 - DNA, 1002 bp, Homo sapiens
gcttttccttgttggaggatggtacatttcagtgctggtaggacagcactgaagggtttcatttttagaaatcaggaagatttttacattattttctccctcaccctcttcctgcaattttaggataatggtaatggaaaatgtcaataaaccccagctctggaacattttcaatcaagttaccatgcactcccaagatgtacgacatcatcgcttctgtctccgtttgatgctgaaaaacccagaaaatcatgccctatgtgtcttaaatggacacaatgcatttgtatctggtagttttaagcatgcgcttggtaagtgtcctggcacgtgactttgtcaagcataaatagtgtggtgaagagcctagcctctggattggaactgtctgggttaattatcagcctcactgtgacaaattattctacctcctcctgcctcagtttcttgatctctaaaatggagataataattggacctactttgtagataattgtgaaaattaaatgaatcaatataaagaacttaaaacagtgcctggcacatatagtaagtggatataatagcaaaaatgataattactaatattaatatttgttattcttactaagctttggttgtaaaaggctgacacaggtcttataaaattcattttaacggtcaacaattctccctgcttaggcctatttatttttaaaatgattttcattaattatggatgcttttgccacctgattttaatttgccataatgcaaaacattcaagatttgctgaaagttcattccttcaggagctaaatctatattaagatttatttatgtggtggttactaattctaattaaactcaaggaaacttcattaatcatttataataaggaatttctgtaataaggaatcagaagtaaacaagtattacttgcagagtctccttttaaaaaaaaattaaagaagaagcaaacaagtagaaaaacatctaactaactaaatgtttaaacttaaa

SEQ ID NO: 97979 - DNA, 1077 bp, Homo sapiens
aaaattgccttgcatgaaactggtccttggtgccaaaaaggttggggactgcttccctatgggattacagtcatagaaagtatacttgttctaccctggaggagatatatcttagctagcaaggagaaatgcagatggaactagctggaacttgtagagaccaagtccgaatcaggtgcctgggaatgcagattgttaaactggcagagaagaagcggatagtattgaaggagtgtaagcaagcaactaccccttctcatctttgtccggagagcactggcaacaatttaggctcatggttattaaacttgtcttaaaattgatgatgtgaatttttctaatactgctatttctggaaatacagtgtcctaactggttttcattggtctcattttagcaatatttgctgtgctcacaagcgtcttgacaaaggatgactggtggaatcttctgttgaaggccatatactccttatgtgacctatcccgatttcaagaggctgagttgcttgtagattcctcattggaatattactcattttatgatgacaggcaaaaacgcaaagaactagaatactttggtctgtctgctgcaattctggacaaaaatttcagaaaggcatacaactatatcaggtgatttcccagttatttattttaattagattctttaatagagtaagtacatgtactttgatttagaagctactttacttttggctctcccattaaacaataaactggttaattggtgattcccagaggcagtatataagaagatgcactctaggaccagactttctgggttcaaatcccagccctgacgcctactggctgcgtgaccttaggctagttaggtaatctctagtgccacagtcttcccacttataaaaggatatcataatactgccatctcatagggttatgatgaaggttaaaggagttgttatgcctttttaataatgcctggcaattattattattataattattattattatttgagatggagttttgctcctattgcccaggctggagtgcaatgacacagtctcggctcaccgcaacctccgcctcc

SEQ ID NO: 97980 - DNA, 1047 bp, Homo sapiens
caagtttgtttgatatccagttccaagtctggagagaggcatctttatcttattaaagtatcgagagacaaaatatcagacagcaatgaccaagagtcagcaaattgtgatgcaaaaggtaataacttcatttgcattatgttatataaaatttggctgaattgaaaaagactcatgaagtaacactggacagcaatctaattgaaaatatacttttcaaataaaatgaaattttccaatctaaatctctcaagtgtaataaactcattcgatgttaaaaaggaaaggctaaatgtaaatactttaaattaaaaaaaattaaaaggaaagcatctgcttggatctgtgaaagaagtaaaacaaaactttgactttttaaaaagaaaatatattttaagaaatttgtgaagattagatgacagtatagatgatttgtccagacttcacttatatatattccattctctatgaaataatttttaacaaatgtagcaatagtcatagaaactctttgaaaataagttgctgtgacctagtctcaagtaatataactttaaaagactacagattctacctctgcagcttgtgtttttaaccatgtttccttatgttgtatttttctccctgtgtgatctgcctgttttctttcagtgattcctcactggaggtccatggttagtttttcttaggctcataaggttttgttgttttgttttgtaaattttatcatggtgaggatcacattacactggtgtaccaggataggatgaactaagcctttttatgttacatgcaactttgtactgtgatcttttcactttacattttctcatagacattttatcatgttgctctgttctcttcatagttatatttaaggaatgtgtagtattccattggatagtggttccataatttaatcattttcttattttttggcatatggtcacttttggcagttttataagcagtaatgtagtaagcattttcatacatacagatttgtccatattttgtttaggatagattctcagaaggaaaattatt

SEQ ID NO: 97981 - DNA, 1061 bp, Homo sapiens
atttattagactttgcaaactactttaaatgtggataaaaattcctgtaatttcccagggctttaaaaattattttgttgtaatgaggttttagaaaataacacagtattattttatccttttcttagcctgtttctagtgaacactaaaaagagacttttcaattcaagaaaaaaaagagagagggttcatatatcctcattatttttgtctttttagttctccgtagtttagtagaaggtgtgaaagtaagttttggataagtacataaggtattagaaatcgaataggaagcatacttgctaccaaaggacagactgagagagatataagaacttattaatagagttggccacactaagaattgactgtggaatcatttgctttgaatgaaataaatgagatcttacatagaagatacacatctcaagcttgcatatagtaactgcttcttgtctgtgtattctccagctcctgagaatgttacctgcactatacctgatggcgtgccaatagatatcacagtgaagttgatggtctgccttgtacatctcaacattcttgaaccacttaatgtatgtaacaagatctgcacttgagatacttcagatcaaatgcaccatctcttttctttagatgtcaagaaattataacttgaccctagagtttcacatttcttaataaccaaggaggtaacaataagcatcaaataattttgtatgaatatcttataaaaactaaaattgttttgcaattgggcttacagtaatttatttttcttttaaaataacaatctaaagatcataatttgagattgtctttagaccatttgagattgtcattagataattggtaataattctgacagctattcttttttgcggactttggaccaagtatattattgaaaaaaaaaaagtacttagcatctactttgtaaaccttaggataagatattgagtaaaatatacaaatccataccctcatgggttgggatgcttttttgttttaatgggattagataataaaataaatacataacatatacgggacattggctg

SEQ ID NO: 97982 - DNA, 1067 bp, Homo sapiens
gcatttggagagtgagatgcttgaaattatgacactgttttactgactttgcacattttttctggatcagttctgattacgattttaaggaaatacacattcctctcaaattctaagaaaatgaaaatcactgttcattgttagatagcctaagcaaggaaatgagttttataattggaattaagtaaatattcatccattttgccacttttttttaggagttactatgaagccaatgatgttacttctgctattaacataattgatgaagctttctcaaaacaccagggcctagtctccatggaagatgttaacatagcagctgaactatatatttctaacaaacagtatgacaaagctttggaggtaggaatgcttatgtgtttctctgttaagttttgcatgtgtttctgtgttctggaaattcttaaaaattggcagttcttcgttttagttaaattatgtatatatttaaagtctatatggaaacaagtgatttctagattctgtagcaattcagtatgaaatatgaagtgtagttacataataaaaaatattgccattgtcacaggtgctaagtatgtacttcagggtagtaggactcaacagtcagatgaattgctgtgatttagttcttaagctggttgggggaaagtaggttggtttgatataaagaagttatatacattgagtttgcattagttaataggatattaaaatgttaatgtgtcacagggtttctcatttttaaaagactctttctttttatagcccaactttatattagggattatttgaaataactgtacaaatctttgcattatgaaatggtttttcacacatattttatttcctttcttctttcccattcttttagataattacagatttttctggaattgtgctggaaaaaaaaacttcagaagaaggcacctcagaagagaataaaggttgtagtttcctctgcttaggaaagtgtatataatcctctcttggtcataaggtggcgttttatggtgaaaatttatttcatactgtggtgagttgatagttaatgttctcataat

SEQ ID NO: 97983 - DNA, 3115 bp, Homo sapiens
ttgtataattctgctagagtgatttgaagagtttaggtatttaaaaaaaagacatacagtttgaaccatgggatggacatcaactcaagcctcttctctcagccaatggaatttatttttttaatttgttatagctcctctggcttatgagccattctctactctagccatgatatatgaggaccaaggtgacatggaaaaatcattgcagtttgagttgattgctgcgcatttaaatcccagtgacacagaagaatgggttagactggcagaaatgtctctggaacaagacaatattaagcaggctattttttgctatacaaaaggtaattaaaattttttttttttttcacttttacaagctgttacataataggttttttgatcattgtatttgctattctggggtgtgatattggctgagataaatttgtttctattgtgtgttgctctagaggtaagtatttggggttcctctgttctcatgtttatcagggactttttgaatgttgtgagataatacaacacgaaagttggtagatgaacagtaccttcagtttctcactaagatcagtgttggttctaagctgttccttgaggattaacatcagactagattgaccacattaagaagattactgttgagattcagattctatctgctcttacatcaaacctagtcaagagttcctgtgaatatagatttattcagaataactcccttggttccatttgatggattagtttgcttattaaattttctgagatgatggatcacacccaggtaccatgcacccctttttgtggtaaataatttgtatttctttctttttagctcttaaatatgaacctactaatgtccgttatctgtgggagcgatcaagcctttatgaacagatgggtgatcataaaatggccatggatggttataggcgtattttaaaccttttgtctccatctgatggcgaacgttttatgcagctggctagagatatggcaaagtaagtttggagtgaaacagatctacttgctcctgttaatcttgttttgcaaatcaaagcatatatttggaatagaatgtacttttcattgaagttcaagaagtgttttgccttatgtgttttattgttttgtttattgagacagggtcttgctctgtcacccaggctggagtataatggcatgtttatagttcactgcagccgtgaacttctgagctcaagtgatcctctcacccagcctcccaaatagctgggattgtaggtgcacgccaccacacccggctaatttttaatttttttttgtagagacagggtcttgctgtgttgttcaggctggtctcgaactcctgacctcaagcatttcttttgctttggcctcccaaaatgctaggattacacatatgagccaccgtgcccagccctgtattttagattgtaccgaattttcagtacttttctgtttccaagtcaactgtgtcattgcttagaaaattgtgtatataaggttacatttcaagtgctcagaggcttaaaaatgggacatgtcctaaaaggaagagtaggttctcaggtttccaaacttagtcaaaagtgtgtatatttgcaataattaaaaaattattttttattgcagatgtgccagtgaaatgttaatgatttgggatcttctattattttatcttgagccagtatataatattttaagactataaaaattctcttttacagttggcacattattgactgtggtatatattttattctaaaatatgccctactgcatttacttctctggtatgctgcgcagcaaaacaaagtaggaaacatttttgctgagtaatgccttgtgatatgctttccattctagagataccatatgatattttgttctaggagtaaccatctccatcagggtacattaggggtgaccctattaattccatggcctttatcacaatgatgcttagctgtgaaactgtcccttaccctcccaggggtgggttacataggactactagaaaacatttctaggaaatttgttgaggcaaggcaaccctaagttgatctctgatggaatacaatgagcactgagggtcttcccaggttatttgctgttagttaaatctatagctgtcacagtggttagtccagtagcctttgactttgtgaaatgttaggtggcctatgatagtaaattggttttccacttctattagatataatacttttttgggaaagagtgatgattgtcagttctgccactgccattgaggtctttcctatgtggaattctatcactgtaacttctgtttaggctttccctttggtccctgctttccctccagaaatattattgaatatatctttggcactaggtactatacaggagaccagggtatccactattgaacaagttttaaaaatcccctactcttgtaaagcttacatttcagtgggagacataggcaataaataaacagctaaatatatagtacatcagatgttgataagtgatatgaagaaaaacaaagcaggaaaaagggataggaatttgaggtatgtggtgggggtgtgttattttaagatagactggttagagaaggacataattctctgtattatggtcatactgactaaaggtgaactgaagtaggtacgagaacagatattcagggaagagtatcacaggtaaaggaaacaggaagtgcaaagtatggttagggaagctgaagaattaaggggagcagtgcagagaggtatcaggaatagatcatttagcccttttgggctattgtaagggctttggcttttattctgaatgagtatggaagtcactggaagattttgagtagaaaagtgacatggtctgacttaaattttaagtgcatcaattctggctgctcttttgagaatagattgaacagtggaagggcagaagcatggagaccagttaggaaattactgtagtgatacatagaagggaaaatggtaacgtggaccaggatggaagcagcaggaactggtacgaagtaatcagattatgtatgtattttgaaggctgagctctcaagattttctgatgtattgaatatgaggggtgggttggggaggtg

SEQ ID NO: 97984 - DNA, 1763 bp, Homo sapiens
gctattaaaaggtccatactggtgaggcacagtggctcatgtctgtaatggcagcagttcgggaggctgaggcaggaggattgcttgtgctcaggagttggagaccagcctgagcaacatagtgaggctctgtctctacaaaaaactttttaaaaaactagcgaggtgtggtagtgcactcctgttgtcctagctactctggaggctgaggtgggaggatgcttgagcacgggaagtcgaggctgcagtgagctgagatcactccactgcactgcagcctgggcaacagagtgagaccctgtcttaaaaaatatgtctgtgtccatactataaccctttgatacttttttaaacaagttcattttgagtggataaatttgaaagaagggggatcttcagtaaattacatcataattctggaatataaatgcattttgcagcatccagctctacatttgttattattctaattagtaatttagtaacttctgaccactttttttttttcctgcaattgagttttagactttttttttttttttaaatgagacagtcttgatctgtcacccaggctagagtgcagtggcgtgatcttggctcactgtaacctccgcctcccaggttcaagtgattctcatgcctcagcctaccaagtagctgagattgtgggtgtgcaccatcatgcctggctaatttttttgtattttcagtatagacgggtttcactctgttggccaggctggtctccaactcctggcctcaggtgatccgcctgcttcagcctcccaaagtgctgggattacaagaatgagtcaccatgtatggccaattttagactcgataaactttaatgttaaagagtcaattagaattgcaactatttagttctgggttgcaaaaactgaaaatttttaaaggaaaatttcagtttcattatatgctatatttattaatatggctggaattgaaatctaagacttcactatattttaatctaaatgtcatttttcttccatacaggagaaaaggcctcggagtaaacttcccagagctctgagaggtctcatgggtgaagccaacattcgttttgctcgaggagaacgtgaagaggcgatattgatgtgcatggaaatcataagacaaggtgttttctgtggggactttgttaataatagcagtttaatagtctgacttaaaacaaatgggggagcacttcacagtactatttggaaaatatgttcagaagcttaagggtgattgtggtaatggtaattgccacttttcacaagaaaatgaaaatctcagagtatgagtcaatgagatgtcattaatatttgttgaatttcactgttactttttttttctaatgtttcagttgagagatttagacttttgaattgtcagtatggcaaatatattatgttaaagccacttgaagagctttcttttttccttttcttttctagatcatgcagtactagattatgttactctatttttttggtaaaagacagtttaaacttgtcatcttatctctcagttaaatggtgtatcttggacatattaaatgatatcttcagtgtgatttttttttaactaattacttatatttattgttttgtttccttgatgttttgccaaattatgctctgcagagtggtttggatagctgtaatacagtgaacttttatcttttcaatagtttggcatttctttttggttagactagggtccttttagaagtcttattataatttcctgga

SEQ ID NO: 97985 - DNA, 1053 bp, Homo sapiens
aatttcccctaggttgcacagctagtgatagatggagatgaagtttggaaccaggcagcttggctctagagccctcacttttaaccactatcgtataccaccagggctccgtactgctaggcttgtttagttcttaggtctatgtcttataattcttctattttttttcttctgtattattgtgtgtgcttctgatttttcagttaattttgcctgtaaatctggatgaggcctaaaggatgagtcagctgttcctatataataaaatacatggctttgtgataactttcttctttggtttggtttttgagggtgttcatttgctattttttactttcaaatttggtgttactggggtaaaaatttatacttagaaaatacttgtttttcactgagaattctgcagcttccccacccctcccccatcaatgtctcttttctcaggagaaacatcagatggagtgaggaagtcagttcacaaggtctttgcttccatgcttggagagaatgaagatgatgaggaggaagaggaagaagaggaggaggaggaggaggaggaagaaacacctgagcaacccactgcgggcgatgtatttgtattggagatggttctcaatcgtgaaaccaagaaaatgatgaaagtaaatttttacttattttggtatttataaacaatgaagaaagtgacatagtaattgaagtctgtaagttatacctgggaaacaattcaaactgtacgaaaggaaatactatgacacaactattgttatttgtttattatgtttcctattagataatgtttatgtaaaaccttaattatagccgggcatggtggtgtgcctgtagcccagctgctccggaggctgaggtaggatcagctgagcctggggaagtcaaggctgcagcacttcagcctaggtgtcagaacaagaccctgtctcaaaaaattaaatacagtacaacacaataaataaataaagtcaaagcaaagtggctcatttaaaccaattgggccatttattttttaaaaaatgctagaaaggtagaatctaa

SEQ ID NO: 97986 - DNA, 1966 bp, Homo sapiens
atagaggacaacctatgtgttatgctgagatagactcagtaatcatttgtttgcaaattgattatttttttctcatccatccagaaagtacagtgcataacaacaacacttaacaagtgcagaggaacctgtcctgtagtatataataaaaaatgattgtcaccttgctgatctttccatttaaacatgcatgatctccagtactttgtacaatgtatagtatattaaatacatttatgtgtaattttgtgtgtatttttatatggtataattaaaattattacatttatgtgattgtaattcacaaaaagtactacttactatattctgtagagtgtgttgtgaatgtttttacctgtgtttgagcattatggtgtaggtttaatagatgaatatttgccttcagtctctgctcaggtattaatgtgtagtaatttttggtgctttctttttaatctgtgataatctggtgttctgaatgttcaaaaataaatttggttgaatacgcacatggtaaaaagattgcttaccaattgacatactctctataataccatcttggtaaaaactctttaaaaaggatttattggccgggcgtggtggtttatgcctgtaatcccagcactttgggaggccaaggcgggcagatcacgaggtcaggagattgagaccatcccggctaacacggtgaaaccccgtctctactaaaaaaaaaaaaaaaaaaaaaaaaaaaaaaattagccaggcatggtagcgggtgcctgtagtcccagctacacaggaggctgaggcggggtaatggcgtgaacctgggaggcagagcttgcagtgagccaagatcatgccactgcactccagcctgggcaacagagcgagactcctcaaaaaaaaaaaaaaaaaaggatttatttacatatctaccatttcagaaattagaatgcataagcctgggacatgacacatcacaggtaaacattgaagcaagacaaattcttgtattttcccactttgtattttgtagttttccacacacatgcatttgtatgaacatttcatggttcacattctgttttaaagaattgtagatatttttctcccagagactatgcttttcacatttcttttttctttttttttttttttggagacggagtctggctctgtctcccaggctggagtgctggagtgtagtggcgcgatctcagctcactgcaagctccgcctcccgggttcacgccattctcctgcctcagcctcccaagtagctgggactacaggtgcccgccaccaggcccagctaattttttgtattttttttttttagtagagacggggtttcactgtgttagccaggatggtctcgatctcctgaccttgtgatccgcctgcctcggcctcccagagtgctgggattacaggcatgagccactgcgcctggcgcttttcacatttcttatgctaacttgatatatttctgacgtgagaaaaaattttaaatggtccattttcaaggcatgataaatctaagtactggcagccagcctgcaaatgtaacaaaccacatggctcatgcaccaaaaggccacgataagtgaacagaatgtagaggaggggtcagcccataaaagggaagaaagttttgttattgggaaatcaaaagttaagtggggaaggggacgggttataaccttataagggggataatgaaactcaggcgatgtctgggaagattgtaaccccatagtactccgccagtgaggaactggggaagggacttgtgtgctaggagataaattatctcttgtgactgccccaggtgtgcctgcccaccggacgcccaatcttgcaagaccattattaaaagtctcactttcgctgttctttgtccctctaagtccattctttgggtttggacaggtgagcatgtctctcacaacctggggacccatccggggtctctatgcct

SEQ ID NO: 97987 - DNA, 1770 bp, Homo sapiens
ttgccaccaaaggtaaatgaaactgtaaaatacctctggatatttgtgccaatgaacttttcttagcatattaggattaaagcaaaaataatcttttcagtatgtttcatctaggacttacaataaatgtttaaaccatgaaaacttatatttcataccctaatttttctttgaaaatattcaagatttgtagcctagtgtgttctattttgtgtgattgcttgaatgttttctgattttattgggtaaaagtttgcctagtaatgatctttcagcaattcattgaaataattatttgaagtaatcttgcttcagatttaatttgtgatgtacattgttgtacaagccattttagtacaggtgtctcatttatgtagttgaaaggtgactgtggaatttcttttgttttttatgtatttccattcagtctctttatatagtcacatgtttcacaggggaacttgtccactggaacctaacatagtacaaccttttaatatgcgtatcttaaaggaaaatattataaaacaagatattaatactaaagtgttaacattaatatgttgttctcatggaagaaaagtagaaaatgtgataggcttagaaattattttttatcagcattaagtgcttcaatttctccccataaagattctaaggaaatttcagttcctcatattatagttttccccataatttaatattactaagtatttctctgcccagtaatgttgatgcagtttgcataaatagccttggaagtaaggaggcaggacagaaagccaaatatcgaaatctctggccttgatttagtgacagtttattctaatggggaccataggtgttattagtaaaaagatagtgtacaaggcctaagttcagtttacattgttctttgaaatgagttcatcttttgtgttgaataattgtattctaagtaggagatgcctgtatttaacataatcatgctttctatataatcaaatatgtatttgttggaatactggtagaaataaccttcccttcctccactgtgcagtggaaaaaaaactcccgatttatactgtatataaattaggaaattatgttacatatttacatttttaaaaatataaaaatgacatattattttgaagtgattgtattatagtttctgaagcttatgactggctataaatataacaacatacccatgagaaaccagaccaaaattgaatatatatcatcactgtgaccttgaacttatagtcatttgggataaaacagagtgtgccttgaaatgataaagagtgccctgcaattttataactgtacattttattatgggtggtcctctcaaattggccccaaatccttgtcttcgaggttggtgaaataaaagtttaaaataaaagttgactggtatttcctttagtatttccagaactattgctgtagaggcctcccttaattttcagagttctcattttgaattaaagtagacttacgctacatagatgtagaaaattaggtttggcttaggtttctgaaaaaatattctaggagaaggtggtagcattgttctgaacttaccacacttggaaaaactaatcttcaaatgtaattttttgtcttattaatgagtaatctgtcaaagacatgaattctttgacttgtgctcattctttctgaacttattgaggcttatatatatcaaataaggttaatttacacaataattatttttaataattaataaactcattcatgtagtatattttaaaacattat

SEQ ID NO: 97988 - DNA, 1086 bp, Homo sapiens
aataaaaggtggtaaaattcagttttcagtttagttcttgaaagctctgggaaatggaggaaacacaaaactatgaattaaactagggctgttgatttctgaacccccagataaatcagttgacccacattttcattttaggtgttaggtccaaattagcataatgtcttgcattattattaggttcagtgtgaaactttacagtgctgcatttgaagtttagtaactggttattattaatcatttgggaaaaatgaaaatgtgttgggactttctatgactaggcatttgttgattatttttcatgattgctttttgttttctcattgtgtaggatttgtgaacttgtatattacaggaaacaagatactttgtaaaatttactggggaaaatccatttggagtgcatgacatttgccaggataagaaagcagtaatatgtttgtattataaaattacaccctgccagaaaactttctttcctagtaaggtaaatgtagaagggacttttacagcatagtaagttgattaggagccaaaattttattccagtttttttttgaactaagaatgttttaaattctgtaatgaacttttatgtttacccattactcatgcattctttcacaatatgtttaatagcctgaggaaataggaaagctgtgaagctactaccattctttacttttaataagaataataggaaagaaaagtcaggtcagtaatccaaatccaaatatgtatactgcaaatgctcaagaagtcacattttttgataaattgtattgagtacagaagaacttatatgaatttattatctgttaataacttagttttgacaacagaataacatttggaaattgtgagaataatcaagctgtttttccattaacagtgtaaattcataacatgtccttcaaaaggtgatattctaagctgtcttaattgtctacggttgataacttttaaataaagtacaggactttctgaaagtgtttggcatgttatgctgccaaaaacaatctgtgttttgaaataccaattaatcagttaatttctgaagactttgtataggacttgatatat

SEQ ID NO: 97989 - DNA, 2819 bp, Homo sapiens
gagactccatctcaaaaataaaaaaagaaattatgaataggtaaattcatatcattaaaaattcatttaaattcacttagaatatttatctttccaaaactgtataaaagattgatataattttggctcacaatgtagttcacataagtaatgtatatttctctgtctctttacagtaaattgttgaagactacttcacaatttccacttcctctggctgttggtgtgattgcttttgggtcagcacatttatataggcttccatgctttgtcttcattcctcttttactccatgcattatgcaactttatgtaagattggacttaaggaatgatgaagataatttatgtgtttagggccagtgataagagggaacacacagatccatcagtatggacagcaagatcctttggagaagacaagtctatttttacaatattgaaaataggaaattagttttgtaatgtttgagggaagtagttgaagcatggttttgttttgtggtgtggaatccatgtagtaatcatttttgaaaaattcatgaagggatatatggtgatcactatcattgaggactcctgtgcatataaaatagtctgttttatcaactgtacgagaagtctgatatgagagatttagtagatgcagcattatttgcagtctcactgcaagcattctgctcatttcatcaaactttttttcacaaaagtaggttattttgaatttgctatagtttacctattaagaaataagtctttaaataactgatgaaatttatagctgtttggtttctcaaaggttaaatagccacagaaagcctttggttagtttttggcagccaccatgaacaaagtggatcttgtcttcttacatctatgaaaatagagctttgaatggtaaggagatatgttttcttggtaaccaatgcaagattgatgggtggaaacatgattcaaacttacacaatttttcttgctatttttcaaatatgaatcttactatatattctcggtgaacatcaggagactattaaagaggtctgctgttaaatgtaaagaaaaaatgctcgtagctatttgcttcctggtattggagcagttcagttgtttagtttataccattggattcaattcattgcaccatggttgccaaaagtgcctgaggtcataatggattgttaaaataactaaattccagtggttggaaactctaggtttgtaccattttttctgctgtgggaaaaaacaacaacaacaacatgatcaaggtaacatcacatttgatgtataatattatactattaatggaatatcagtagacaactgttaacccattagtagcatgagtataaacagtacacctgaataaattggagacattagccactaggtttaacagtggaatcttgatttgcctaggtgacttctgggattactgtttgacaaataagagtaacattttatttcatttcagaatttacgtcacttttagctacaagagtaggaagaaggtaatcggcaaggcagaagagtatactctttgccttaggatagcgtaaactcaggctgagacatacccggcttatagagttcttctagatgtgtagactgtaaatgcccaaatcctctcaactaaagttttagtgattccacaaagcctctcatgtaaatttccagtgattccaccattgcacttgtgaatatgtatccttgttagtacccagggatgtcctcgagcaccagttttattttatctgccattgcatctggattccattacagcctctcagctgttactgcctgtggacagttacttctgcttactgcctgtagagagttacctaacttctcttctcagttcttcctcaggtcctggctattttggcctcagttgaagggagtcttgctctcatctctgagggttttaagtttgtttgatcccattgttgtcttttctagctttgagcatgtttttcagtattcatattttaacttactgagaacattaaagggaaatgataaactcgtggtggggatatggcagacaggtgcttgtttgtttgagagaagtagcagaagagataaaatacaaagtgctatatgtttcagctggagaggaaagagagagaatttattagattatatacttgtcccatggcataccacgtatatgtttaaatagggacacatctccctatgtttaactatacttataaacaactttgatacacattgcgtcttttattctgtcacctgatattttagtgtatctcaagttacagattacatgtgtccttaaactatttctgaatttggacttagttccatatacagaaagaactttagaaaattcattaatttggatcttctattgatagccataaatattatgtttatgtattctaaaacctctttgtttagttagtactgttcatgaatgtaacaagcttcaatttctcatttgtgagtagtacatttgctttttgtttgtttgtttgtttgtttttgagatggagtctcacgctgtcaccaggctggagtgcagtggcgcgatttcagctcactgcaacctccacctcccaggtgcaagtgatgcccctgcctcagcctcccgagtagctgggactacagacacccgccaccacacctggctaatttttgtatttttagtagagacggggtttcaccatgttggctaggctggtctcaaactcttgacctcgtgatttgcccgcctctgcctccccaaagtgctgggattacaggcgtgagccaccacgcccagccgtacatttactttttaaagcagcagactaggta

SEQ ID NO: 97990 - DNA, 1027 bp, Homo sapiens
tttttgttcatttgtttgttgcttttgtttgttttttaatccatgatagccagcatgtgtagttgttgttttgtataagaatgtttttaaatgtttaaatgactttttggtttacattttaaacatttcagattacagtgcttctcatttttaataccaaaaggcttatatgttttgtttcaaaataaaagtaaaattaaagagcaatttatttttcttaggttgttcatctgcaagccagcttaacaacttttaagaatagccagcctgtggtaagttttattttcaaaactctacataaatttaaaatgaaagaacatggggaaatataagagtttttttttttaaggttagtatttcatagtgcttaaaagatacagtattatgaatttaagtaaagtgaacctaatgaatattttaaaagacttataagttcatcttttgtcagtacccatgtcatttttttacaagtttattgtctattaaattttattttgaataattacttagatatattcttagcagtagaactagcaagtcaaaagaataaaggttttataacaattttaaagtatttttaagcaaagtaatttcaggattttatgtcagtttggtaatggaaagatgtacttatttagttgataagtaatgagtatgattctaaataaagtaatatacttttgtttagtgtcttgatatttctactttattgttttatagaatcccaaacactctagaagaagtgaaaagaaatccaatcatcataaagactcctcaatacaccatcttcgtttatctgccaacgatgctgaagatagccttcgcatgcacagtactgtgattaacttactaacatggattgtattactcagcatgccttctctaatttattggctaaagaatcttaggtgcgttttattgatataattattgtttatgtggttcaaacaataaatatccctaagtagagacttgctagattcctaatggttaatgaaaattcctcaggaacaggaagctatacatt

SEQ ID NO: 97991 - DNA, 1006 bp, Homo sapiens
ttttttccatcattacaactaacttggctttctaaaaaaaaaaaaaaaaagaacatattactttctactagtatcaatatagattagtaaagctatactgaaatgcagatcttcaaagatcagtaggctcacttggaaaataaatgacttgttccatacaaagaattaaaaatttgtttttcagtataattataaattaagtatcatggaactttagagactctcttgaatagtcagacacctcaaatattaagtccttaaatttcagttgttgggttttttgcttttatattttcttttctccacaggtataaatggtttaaagaattgtgggatgtattattgttaccagaattagatgccgtcattttaacttgtcagagtatgtgtttccccctgatatccttgattctctttctgtttggaacgtgtactgcctactggagtggcctactgtcttctgcatctgtgagacttctttcttcattgtggctagctttgaaaaggtaaagaatgaatgattaacagctttcttattgctttaagaagaaatatatattctgataaggaacctgaaattaattatttttactaaactattttctaaggaaaaatatataactagcgaaagtatgggttagtgttcaaagttatgtctgtgaaagctaatcatttattaagagttaaatgttacatttgattttgaccttagcgctcaagagttaataagaaaagtttgacaaattacgcagatagttttacatttcgtggttgtgaatctttcccaggagggattgtttctcccataatattgcttttatatgctgacttctatattgaaaccagggggcaagagactgtaaaccagatattaggatcagattagatgagatatataaaagctccaaaaacattgcctagagttttattatgggcccaatgacacagtttgaatctgaagttactggtaggctttcctggtaaatcatcaatctagtgcccattg

SEQ ID NO: 97992 - DNA, 1050 bp, Homo sapiens
cctagctaacacggtgaaaccccgtctctactaaaaaaaaaaaaaaatacaaaaaaattagccaggcgtggtggcacgtgcctgtagtcccagctactcggaaggctgaggcaggagaatggcatgaacccgggaggcagaggttgccgtgagccaagatcgtgccactgcactccagcctggtgacagaatgagactctttataaaaaaaaaaaaaaaaaaaaaattattctgacactatgacatcaaccagaaccagacttaagtataaatgtctatcttgttttgaaagtctgaaaaaggtctcgtttttcttggtttcaactgacttgataattgattctcagacatatagaatgtacatctaggggatatttgatgctggttaatctagaggctttaagtactggattatgtatccagccaattaaatatgtagttctgaaccaaggatgcttatcaaaaatcacctgtggattatacccactagaacgactataattttaaaaagacaaataataagttttaatgaggatgtggaaaacctggaaccctcatacactgctggtaggagtgtaaaatagtgtcgctactgtgaaaaacagtctgacaattcctcaaatggctaaatacagagttattgcataactcagcatctgcattcctaggaatataaccaagaaaaatgaaagcatatattcatacaaaaacttatatgcaaatgttcataggagtattattcataacagccaaaaagcagaaacaacccaaatgtctgtcaattgatgaatggaaaaataaaatgtagtataatcatacaatggaataaaaggaatttgattaaaaagaaattaaatgaaatactggtatatgttacaacatggatgaatcttgaaaaaagtggaaggagaccatcacaaaagaccacatattatgattccatgtatgtgaagtgttcagaataggcctatctttagagaaggaaagtagattactggttgccaaaggatgggaatttggggggtaatagttaaaagaaaactttctttt

SEQ ID NO: 97993 - DNA, 1021 bp, Homo sapiens
gtaacatttagggtaacatgttgttaataatacattttttaaatgttttaacagaagaaataaccagtatctatagacttcatattccttggtcttatgaagattcactaaccattgcacagtaagtatttgaaagaatttactttaaactttggtgtttttgaataatagatattctgcttagtttatttatttaaatcatgaattattaaaatgcatcagtaaaatgtatgtatcctttatgtagcattgttcctataatttaatatatagtattcttatgaaatgatagagaacttaaactttacttccttggaacctgaacccccttccaccctctcgcaactcctgtgtcctagagggagcattcaaacaattgtgatatcattgaaaaagtgcccatccacaattatgtgtctggcacctagcttcctctacattattcagttgtattgtgctgaggattaacttagccatggctctttaccagcattttgtatttgagaattgatatttaagttatctcttcagggctccatcttccacagaaatttctctgaaactccatattgctcaaccagaaaacaatacccatgtggcattatttaaaatgtacacgtcatcagactgtcggtacgaggtaagttgtatgtttgattaatttttaagatttagttgtagaataagctagaaatgttctttttatataagcttcagatatatggtggcatggaagccaatgcatataaaaaataggcatttaaaatattttaaatattcttcatttttcctattaacaccaccttagcatctccatagctgggccatttgcaaatgtatacatcttaataagtaatagaagataaagcaaaaaaatgagactgtagattaaccttctaaatttggaagccccaagtccagaatcttttttataaattgaagaacatcatgaggtcagctgacatgggcttactgcagtaactgacatgatacttaatggtgtatagctctactggttgtt

SEQ ID NO: 97994 - DNA, 1048 bp, Homo sapiens
atacattttataaattttattcatattaatatctcaataaaagtaatgtcagatgagaattatatcattgttaggcatttctgtggactgaacttttaataaatagatggagccctccatcaaagcacgtataaattcaacacttggccattgttgagaataaatacttaaaagccattagagtggatagctgcacagattatccaagttcttcctaattaatgtttcatattagctaccatttgtctggtgggtcttagctgcctgtagctgtggcttatgtggcccttttaaggctctttaatttacattagaacatatgagtctgtcacagggactttgctaagtcggggtgaagcccaggagtttatgtttgataaacatcccacatgaatctggtcagattgttagaaggctactcattaatggttctttagcttgagcatctctgtcctccttgcccacattggtgcttctcaagaagattggggaaagctaagtgtctttagaaatgtttagtgcaaacatattgttagaacatataactactcccaccccacacatacttccagaacaaaactcgattaaaaactgtatttgggtgattcatcacataaatagaactaaagacaaaagccacatcattatctcaatagatgcagaaaaggcttttgataaaattcaacacccattcatgttaaaaactctcagtagactaggtattgaaggaacatatctcaaagtaataagagccatctaatgacaaacccacagccaacatcatactgaatgggcaaaagctggaagcattccccttgaaaaccagcacaagacaaggatgccctctctcaccgctcctattcagcatagtactggaagacctggccagggcaatcaggcaagagaaagaaataaggggcatccaaataggaagagaggaagtcaaattatctttgtttgcaaatgacatgatcctatatctagaacactccatcgtctcagcccaaaagctccttaagctgataagcaacttcagcaaattatcatg

SEQ ID NO: 97995 - DNA, 1081 bp, Homo sapiens
tgttttctttgacgttcagtttgtttacatcaggatccaaacaaggcctatacgttgttattgattaatgtcttattcctttttaatctggaagactttctcttaccaccactctccccttttttttcttgaaacttatttgttgaaaaaaataccaagtcatttgtcctctagagtttcacagtcttgattttactgattgcattcctgtagtcattcaacatgttcctttgcctgttgtggtcctgtgatttagtagctggatctagctgctttttcatattcagatttttgttttgtttttgtttttgctagactttctctctttttgtgatgttagccactgttgatgaggaatgcctggagttattaattgattaaggaggatgcaaaaattatgatgtttaattttattatttattaactagaatagtattctagttaattctatatacttacagaaaaactgcttatctactaaatttatcaaaagtagaataaatcatatgggaaaagagtgataattgtgtggatctttggatcttaccttatatttactcattatcagaatggtgagttggctcacaagcttcctcttattagtgaccattagtgggtttattcctccagtattattatgcactcatgcatttaaatatgttttctttcagtctgttgatactaaaatcgttccatatttggtcagtgcaaaccatttcaagttaagttcctgagctttgttgatacagctctttagttgtctttaacagtttcctcactcttgagtaggacaagatattttagcttattttgtacatttcctgccccaaaccgtgaatcagctatttctttaaggaactattccttttctttgggaagtggtatctcaaaaccataatctggtactagaaatgcttgtgactattgggttggcatttctaggccttttcaatggccagagctaagaactgcataaaatcttaactagaagagcaaaaaacccacaataaaacaacaacaaaaaagtacattcacactgatacttccaggacaaactggggactacagagtttatacctaa

SEQ ID NO: 97996 - DNA, 1033 bp, Homo sapiens
ccatgaaactaacaccacaaatgtctacaactctagcatggtaaattcttatctttcgaagaatattagaattttctcttttagctatactgtgtgactcataaataagcatcatccttgtggaatgtagaaatgtgtttgcttatggatccaaagctagtaaaatttgtttttttttaattgatacctttagtaactcttagtatttatacttttatttaatcgggaagtaggaatatgtgtaaagatactgattttactgaaaatagggaaatgtgaataactcaactgtttatagatgaaatgacttaagcaaaaattcagttacatattaatattactgtatagatatcttattgtttcagggaatggctactgttttttaatgtctcttttttattccccaccagatttttatacgactgtaaacaactattggattctaaatgctcgacacataaatttaaccacactttctgtagctggaggattccgggattaccaagttcgttcaggattgacttttctaccaaaattaagccatcataccagtgccttatctgttgtggtaatctttttttaagattctattgaaatagtaatgtaatagacccagtggagcatgaaagaagaaataatatatagctgcatggtaatgactgctgagttagtggtgttggactgctgtgtgggcatgcatgtgtgtaagagagagagggaaagagagaaagagagaaaatgaatgaatgaatgaatatgaatgtgttgggagggcagaattgtggatgcttatgtccatagggagtaaaaaggatggccaggaaccatggcttatgcctataattctagtgctttgtgaggccaaggcaggaggactgcttgaggccaggagttcaagatcagcctaggcaacatagggagacccccaactctacaaaatacaaaaaatctttaaaattagccaggctaatttggcatggtggtaagtgcctatagtccgagctactcaggaggttgaggcaagagaatcact

SEQ ID NO: 97997 - DNA, 1100 bp, Homo sapiens
ctacatggttcaaaatatacacaattcaagactgattctctatatgaataaactacaagtagaacttgttttgtgtatgaagtgtggttttaatatcagtaatatttttatattgcactatttcaaatttgcgtaattcagaattgcatatggtgaggctgaattgtattaataaaactgattaaagtgaaactacttttttttaaatgtagaaaatagaacttccaaagaaactggcaaaacgctatcccgcatatgagttgtatctttatggagagggatcctatgctgaagaacacaaaattctccctttgacgggtattccagttctctttcttcctggtaatgctggaagttataagcaaggtaagtcttactggaagtaaattttgaaagctataaaattcaactcaagaatttgaatcatatccatactcggtgaatcaaataaagtaaatgaaatgcatgctgtgtgtgaagtgctgtgctgggcttacagagagaccaaaatataatattttctctgagagagaataatgtgagaaatacttagaaaagttgaagaccactttgcaaagagaggggtacaaagaataagatagagtaggatgggataagtagatgataaaggggaaccccttggggaatcagcagaggaaacacatttatgttggaaatggagggtaaagagaacagaaccttaagcattgattagggaagtaaatcagtgactaatgttatgcagaacaagagagattcgttttcttcttttggagttatttaagttagagagatttggaagtactggggggaacatagaaaggtgagatagggaagttacgtgtacagattccaaattgatgctggcttggagatacagcagttatttctggcgtaacagccaaataacctggaattaatttcgttttaaactaaaacctgctttcttgttatttgatggactagaattgttatgtaatgagactagaattgtttcaacatgtgcaattatttacgtgtttattcatctagcacgtgtctacaggtatctaccatgagccaggctgtattccaggtattagggatccagagcatatcaa

SEQ ID NO: 97998 - DNA, 1002 bp, Homo sapiens
gaagtaaactatcacatcattttcatttttgattgtattctgtgcacaatcagtattgggactaatttgaattgaagtacatataccaaatataaaacgaatagtggggttagtatttctgtattttgagtatttggggagataactaagattgctagtatcttaataagcttacagtctctgcagatgtttctgtggtgttattggcataaattgtttacaaagggatatttaggaaggtgcacaaatgatcagaattttgttgttttgtgtgtgtgtgttttttttttttttagaacaacgagggttttcattagtcattagcaacatttacaggttttgaaattcactccatagttaaattcttttatcaagcacatgccacatgtacagcactgctagatctatgtatacctaaatagacattaccgtccaatgtaattggtttcactcttaatggtttctctcctttaaaataaaaaaagaaaaggagcaaaagggtgtatgtatactttactaccacagatgtctacctttgaggatgacattaagagataatttatactaagctgaaaaaaatgtaggtgaactactgactcagtagttaggtgagctgctgtattattggtatacaataatatgaagtgcagggtagtttaaagtttgccagcaaatcatgcacctggcccatgaaaactgaaatagatactaattcactggaatgtttatggtaagaagagtgtacatgtcttgaccaagacatggctataaggttaagattaatttgttacacatattgtaggccaaagcatattaagttgagaagtcagaaagctgcattataaaacaacttactttcttttgaagatataacaactgaaatagatagttgggtctgagtaaaaggagagacattacaaaatagttaaaaatggaaaaaaagaattgatttgatgatggaaagcctttatcatttctaagtataattgatacttatccaat

SEQ ID NO: 97999 - DNA, 1033 bp, Homo sapiens
aaaaatacattttaaagcatgtcatgtgtaagttataagaaggtaggtaagggcgggatgaggtggctcacacctgtaatcctagcactttgggaggccaaggcgggcagatcacttgagcccaggagttcaagaccagcctggataacatggcgaaaccctgtctctgctaaaaaaaaaattcaaaaaattagccaagtgtgatggcatgtgctgcctgtagtcccagctactcaggagactgaggtaggaggatcacttgagcccgggaagtcgaagctacagtgagctgagattgtgccactgcactgcagcctgagcaacaagagtgggaccctgtctcaaaaaaaaaaaaaaaaaaaaaaaaagtaggtaagaataattagagccagattttaaaggatgtctctctcttaagctttgttgtgtgtgtgtgtgtgtgtgtgtgtgtgtgtgtgtgtgtctgtgtgtgtgtgtgttagcagtatgaactatggattatagaagggagacgaaggcaaggatagagacaagtctgaaaaattcagttgtccttaaggccttttttttttttttaatggagcccctataactattcttatgggggatggtgagcaaaggccttactgagacctctttgtgagaacttaaaaactatgtgaagttaaaaactatgtgtattcatctagatcaaaatcttttttctttttggttagttatggaaataaaactttatttttcagtttaagtttacaattaagtaatatcataaaatagatattttagtttcttaaatcagcatttttctattacctgggagtttattagaatttttaccttttgagtttatgtagagatgagaagaacctgaactaaggcagagtcaaggaaggaggacagcagaggcaggattgtggagataatatttaaatacaaaggtaattgatcttaatatggtagaggggttgctcatttaaaataaactacatagaataaaaaatttatattggagtcctgctcctgtaagtatttt

SEQ ID NO: 98000 - DNA, 1069 bp, Homo sapiens
ctctactaaatatgatttattgcttctgcaaatgataaagaagctatggaagatcactgtgctccatgacatcattttcagccttggttctgcacatttatttgcataaattacaaagacagggaaatacagttgttttattttctattaaggagtatctgggttgaaagtggttatcatggtgaattcattctgctgtgatagaaggtaacgcccatccactctggctcattgtttaaaggtgacatgaaattattataggtttaagtggttgtttcataaactcttgacggttttggaaaaagaattttaggataaatgatgaaaccatcactggagggtttaatcatgtaataatcattaaatttcttagtcatggaattaaaaatattccaccaagctctttaatctattgatttattagctttgaaaaaggaatcataggaactttagatccttacaatatgtcattactctagtatgttcaggtttttattagcggaatttagaccaggagctatcttttcatctggtcctgtactctgcagaaaatagctcttgctgaagataggccagtaattgatctcttccatcttaatgatgttttccctgtctttctagtaatgtggaatgtataaaactcttgcagagcagcggagcagatttccataaaaaggacaagtgtgggaggtatgtaatcagagagttgtgcttcaagtgcttaaataagaggaactgggagtggtctatgtagtaatcaagttaggttgaaatggtaaaccgggaagttagctggggggattccatcctcctcggaaggaagtcccttctcatagaggttgccaacaaagcaaataacaagtcacaaagaaagcatctccactcacagctgctgtttagatgtgccaattgtctcccttttttttttcagttaaaagacaaaacaaaactcctacatggatatagtttggaaaattctgtttctagcagagtggaacacataaatcctagtcttaagatctagaatattttattatatgtattgaacatttcatcttgggatgaattt

SEQ ID NO: 98001 - DNA, 1034 bp, Homo sapiens
tcaagtgggaatactgccaaaaagattcttccgtgcagtagatagttcccatttatccaggttaaggtggatctataccattatactaaatacaaattaaattttaaataaattaagtgccttttaatgacagaggcaaagaagaaccaattttattttttagcttcatccaaatgaggtctatttcagtggttttaattaaggaaacttgaactttattcgtaacttttctttctaatattcttctgtccttcccaatgcttcatattaaacaggaaaaataaaacctaactgagccaatttagaatgtattcagattgcttgctcagctttaatgatatggttatagagtacaattgagtcaatctgctatgtagggaagggggaacctgacttcattttgaacttcaattccacaaaaatacataaagcatctatgctgggtgctatgggagatttcagaagatgtaagttacctagtttcaaggcgctcataattttgttcagggcccaagacccacttaagtcaaagaaccatgcaagatcatatatcataaagttctaaatgaaacagacttaagtggcaaatgtttggtgtagacaatctgtgtcacagaatatagacagggaggagagagctcaaaggtggccagtgttttctgaaaaggcttcaaggagaagatgaattttagctaggctttaggggctgagaattatctgagtacagcagagggtggcaaccatcccaagcagggaggaaagcgggaacaaaagaggcaaagactccacaccagggaagagcttggcctgacagagtagagaatgtgatgatgctgtgcaccaccgaggggcaggacccagggtggttgggagcccaggctttggtgggtgctcccttgatgccaatccaagctgcttcccttgtgagctatgtgactttgagccccttgcctaattggaaatattgtagtaatactagtaatactagtacttatctgtaggtttgttatgaggattaagtgacttaattacta

SEQ ID NO: 98002 - DNA, 2000 bp, Homo sapiens
ttatggtttcatattaagagaaaacactggagcaaaatttaaagaaatagcaccacctagggacaagttaatgccaactccacaatttctgccttctctcgccttagttattttgaagtgtcatcactttttaattggaagggggtgttttaaatccttattccaaagtagttcccaggtgtttcagtccttggaactgtgtgcagtcccgacaactaaggcctagctctggaatcagataacttttaggagctctccttcccagtatgtctcatggtcagcgatggttttgtatctcattctcttgattgctccagtttttcctctaaaagtattatcaagcttcagctctcctttctcagtctgttctgattcagattatactcatagaagatggagaaaagatcctattatttcttttcttcccacatctacctgagaatattgaattataatgatacatgtttttttttttcaattaagatgaacttaccgttctaattaacttttttttcttggcacagactatgtgtaattccttttttatttctaaggaatagacttatagaatataataaaatgcttgtgttaaaaccttggttttataacctattttagcccacagtccaaagcaggggttaaaaatgggaccctcttaccccaattctgtagttcagggttaaggtacagaattcatatttctttttctttctttctttttttttcttttctttttttctttttttttttttttgagacggagtctcgctctgtcgcccaggctggagtgcagtggcacgatttcggctcactgcaaactccgcctcccgggttcacgccattctcctgcctcagcctcccaagcagctaggactacaggccccgccaccacacctggctaattttttgtatttttagtagagacggggtttcaccgtgctagccaagatgggctctatctcctgacctcttgatcctcccgcctcggcctcccaaagtgctgggattacaggcgtgagccactgcgcctggcccagaattcatatttctaacaagaatcctgggtgattcagacgtgggcagtccttggtccactctaagaaatacttacctaaattattatttgttttccaagatggagtttttaaaacagtcattttaaaatacaggcatttggatttcatcacaaaatgaacatgcatttttaaaacctcgtattttaatctcagacttagagaaatttttcctctgagacttataaaaataagtgttacatagatttttttgataacaatacttggatgaaaatacattctctctattggggatacttttattctaaaataacagtaatattttcttttgggcctattttcagaagaaattctgtaaattactatttcttagttacatatggtatcttggtatttagtataatgatgattggtatatagctgttgtacattttctgtgttttggcttaatctgtgtcaggaaatttcataatttcgatcatgaatagtaacaaatatatgaattcagcacacattcccagctggtcattcaaaaggcagtttcctaaacagttgcatgccttagtcctgtgacttctaatgagttaagtaaagtaagagattctcttttggaacaataaaaaattatggttttgtttttttctgtttttttctttttctttattcttttgtttaaattttttcttttttgttttattttattttaaaagtgattttttttttaaatggaattataatggagggaatagtagagggttccagatcagttttcttttcttttttttttttgagacagagtctcactctgtcacccaggctggagtgcagtggcacgatcttggctcactgcaacctccgcctcctggattcaagcaattctcccaccttagcatccccagtagctgggattacaggcatgcgccaccatgcctggctaatttttgtatttttggtagagatggggtt

SEQ ID NO: 98003 - DNA, 1056 bp, Homo sapiens
tcttggtagattcctgagaatttgcctttgtctaggcaacaatggactgactagataaccattaaatacataggggttcaaatatttagtgcagaagcattttgggttctcgaatagggactgtgtgatacaagtggtttctttgaaaattatccatgatctaagctcacacacttactggctcataaaagccagtttcagaggccagatgactttcgtgtttggtgccagtgtgctcccactggatccctatctgcctggttgcaaactcttggctctagtactgcctgatctctagcatactttgatccaccagaaagtccctccttgttccagttccaaaactctagctctgcaatatctcctctccttcccccaaagtggtgctgtggggtgtgtgtgtgtgtgtgtgtgtgagagagagagagactgagagagagagagaggctcagtgaagggaattcccgtgcatgagcttactgttgattactagcccttcatcaccggagtgttggtcacaaacctgaggagggcaaagtgattggagtcccgaggtgcttgtgttcctttggctctgttggtctggatctgtcgatcacctttcttggggcttctttgtgctgcgtcgtctcctgcttgctgccccccactattcctcttctctgagttatggtttataacctgctgcatctcctaatgaacacctggaacctccaagttgggaaaagaaggagcatctcatggtgcctggggcagcaggatggtgtggccctgacttggcccaagattcttgtgcccctcgaggtggtacccctgagaaatgtactcatgggattagcgtgatttcacagatggttaatttttttaagttagttaactaaagacattatttttccattgaaatgaacatggatatcttaaggcagcactagactgtaaaattcatgtgaatgttaagttaaaaacgtatttttcaggcagacatgtagggaaagacgttcactcttgtcttctgttacaggtactttggtggaagtacctggttgatcctggctc

SEQ ID NO: 98004 - DNA, 1041 bp, Homo sapiens
gataggtcattttgctagaacacggagatacatagctaaacagaaaattagcatcactgcttgagatgtagagtcagctctctttaaaagattgtcaaaccacagcctggcattagttagatttgatagggtagaaggtgaataatcgtaagctgagctgtctttgtaaatgttgtgatttttcccatcttccatttttctatctcccctgcaacagtttcaactggtagatgagttctgacacatgaaacacatggtattttgtaccaattctatcccaacatgtggttggtgaccataaatagacatgatattagcaaataatattaggaacactgtaaatggatgtttgggtgatcattcagaaagacaggaaggtaaacaaaaaatactgcctgctgcttatatactgaccagtctggaggctgatgacacattcttctttgctaaattaataagaaggtgggaagtggctttcttctattgccattgtattctgtgatgcacaaatttaactcaattttcccattacactatacgtagttgcttaatagagtcttgtccaagcatttaaaaaatcactgtaccttttgtgttgctgctgacatgagctattaagaaagttgaaactttagtagcagctgcttcctctgccagttatagctacctaagttgggttgaatttctttgtgctttgagatgggtctcccagttgtgaggagtatttggttttgatacttttgttttggatgacagcgatgagtgttcgctaacttttatccatatgtcatcttatgtttgcattcctgggtggaagaataatagttcaatgtctattcataatactatacgatttcttaactcccctgattggagcccacacatatgtcctatgtccttccttgctatggtttgaatgtttgaatgtttgtgtccccaccaaaattcatatgttgaaacttaatccccagtgtgatcatgttaggaggtggagcctttgggagtgattaggtcatgaaggctcaggcctcatgaatggga

SEQ ID NO: 98005 - DNA, 1049 bp, Homo sapiens
atttataaatgtttgtgaatgattaggaactacacagaactaggatgactatatcatttttatccgtttgagaatcataggtgatactactcaatatgaagccacaaatagacgtgagccaggactgtcctgggtaaacctggatatgtggtcatcatatattcacatagactccatgtttgctcaccacaggcttgacagtgacagtaaactagtttgactagcagactactctgtctcttttgagtcaggtctacagtggtgcaggtattacaaagattgttttatgaccttgtgcagagttgggaaacagcttccatgtcacacatgagttctgatcggtccaggacttgcaggtgtaatgtgatagaaacattctgactcttgcagtcaaggatccgagaaagtgtgattgattaccagtgtttgctatgggtacacgggaagggagaagtgacatatgttgtacattagccaacccttggcaagacatgttaacctctgtaggcttcaggtttctctttgtaaaatgaagaggttggactggatgcctttatggtgcctcagctctgccctctcccttctgtgacttggtgcctgtaatggagaccgatgctcttcacatggtttgtgttatagcatttcttacaaatgtgcctatgaagggtgtatttgcagatgagctctaataaggctttccaggtaacaaagtcaaacagcttcaagttccagagaaggattttaacccatgtcaatgacttaggactaattcctattctccaccctacttcaattcatagataatctaagattacccattttatttattctgtatttttatttttttgggacagagtctcgctctgtttcccaggctggagtatagtggtgcaatcttggctcattgcaacccccgccgaccccctcctggggttcaagtgattcttgagcctcagactcccgggtagctgggattacaggcttgcaccactacgcccagctaatttttgtatttttagtagagatgaggtttcaccatgtcggccagg

SEQ ID NO: 98006 - DNA, 4128 bp, Homo sapiens
acaaggtcaagagatcgagaccatcctggccaacatggtgaaaccctgtctctactaaaaatacaaaaattaggcaggcgtggtggcacacacctgtaattccagctactcaggaggctgaggcaggcgaattgcttgaacctgggaggcagaggttgcagtgagccaagatcacaccactgcactccagtctgggtgacagagtaagactccgtctcaaaaaaaaaaaaaaagttaattagaaaatatggcttaattgttgagccatagtgaatcttgagtaattaaagcaaaagtcctcaagtggaagctattctaaaggatatattagatatatgaaatgttagatgacttcacatctattcagtgcactgaattagtaatttagtttctaatgggccggtgaatatttcctgtaaaactaagactgtatctttaaggatttttccccctttcttataagaccgcatcttaaaggacttttttcccttccgttgtagagaccttgtacacagacagacggctagtgcagtggtacagcacatgtcacttggggtttatggatttggttgtgaagattcgctgaatcacttgttgaactatgtatggcccaatgtatttgagacatctcctcatgtaattcaggcagttatgggagccctagagggcctgagagttgctattggaccatgtagaatgttgcaatattgtttacaggtaagttaaagattttttttttaatcggtgattttttttttttaaataatactttaagttctgggatacttgtgctgaacgtgcaggtttgttacataggtatatatgtgccatggtggtttgctgcacctatcaacctgtcatctaggttttaagccctgcatgcattaggtatttgtcctaatgctctccctcccctttccccccactgcctgtaagttaaagatttttaaaagattacttagcaagaaaagtagtgtattgaattaagttacttttcctgattatcattagggtatattgtgccatatggtagaacaattgtgtggtgacaggggagtgagttttgtctcttccattgcagcttaagagcagtgtaattagtaggttcccccccccccaactccccaagggaaataattttgaatcatatctttatgttttcttaattttgttaaggttatgtatgttcttaaaaattgaaataatgtaaccgttcaattattttagggtctgtttcacccagcccggaaagtcagagatgtatattggaaaatttacaactccatctacattggttcccaggacgctctcatagcacattacccaagaatctacaacgatgataagaacacctatattcgttatgaacttgactatatcttataattttattgtttattttgtgtttaatgcacagctacttcacaccttaaacttgctttgatttggtgatgtaaacttttaaacattgcagatcagtgtagaactggtcatagaggaagagctagaaatccagtagcatgatttttaaataacctgtctttgtttttgatgttaaacagtaaatgccagtagtgaccaagaacacagtgattatatacactatactggagggatttcatttttaattcatctttatgaagatttagaactcattccttgtgtttaaagggaatgtttaattgagaaataaacatttgtgtacaaaatgctaatttgtgtgtgttttttgaacatgacttgtaaaatgcggaactttgataaagtattggtttatgtggaataagtggcttaatttcattttctgtcacatggtttatagaaagtagttagctgaataaaaactatataaagtgatggcatctttgtcaaaattccattgttgtgttaataatgacagcaagaagagtagcctcaggggatgttcccctcaaactagcacaaccattccatcatcgtagaaaagtagcacttttgctaaactgtcttgaatattttgtacttacatagcgcctttcatctcttgatttctcaaaatgctttatgaacacatttaaagaaagtggtttaagtcttgtccaacacttgacaggtctgctgtgtttagcaagtgaggaatttaactttacttcaaaactgctttctgcctattaggagtgaggatacctaagtaatgctgatagaacaggacaatgttgggcttttctccatgttataagccactactcagcaatgcatcagtaaatacctattcacccactgtatgccagccactgtgcttatatgcaggggatgcaaaggtgcatgagacctgccctctacctttaagaacagtataatggagaaggggagacaaaccttgtgacagattccttatgtactgtgataatacacagtggcagcagctaaaatgtctaggtttgcttagctttgtattcagtaataataagttgatctaagagttcagcataaactgaatgaaatgccatttaatggtagaggaaccaagcattaaggcagtactacacttaattttttaagcaaatatgtaaagtatattttcaaacttttctaatgttatggccccaaatttcttagttttggcctttttactacctatactatttttactgttttgttttgtctccatgtggtagtacttctgtgaactctaaagggaaaaaaaattctgcaagcagcattagtatataactactactgtaagtaaaactgcctattgacactttaggagttcctgcttcagaagcttagttaagaaacagcttgtggccgggtgtggtggctcatgcctgtaatcccagcactttgggaggctgaggcgggcggatcacgaggtcaggagatcgagaccatcctggctaacgcggtgaagtcccgtctactaaaaatacaaaaattagccaggcgtggtggcgggcgcctgtagtcccagctactagggaggctgaggcaggagaatggcttgaacccgggaggcggagcttgcagtgagccgagatagcgctgctacactccagcctgggcgacagagactccgtctcaaaaaaaaaaaaaaaattgactttcaacaaattgatagtgagcattaagggtttccaagttggatttgtaactcctcatcattccttgtatgacaactttctgaatatatgtcactatgtagtaaaattaaacactccaaactcatctttctgttgttagaagttttcagcggtacttccatgcaactttaaatctcactgctctctatggttgatgtcaaatgaccttcagtaatgactgagaattgaatacaaatagattacaaagccaaaatttgatgttaaatgactcaggaaattttagttgtattttcaattcaagtacttagtagcctacgtttgcttggcctctggttctttatggaaaataggctttgtagtggcattgtggagcaaaggagactgttacaccttaattaactttttttactgatgcaaataatttgaggatagagaggagggaagtagtgaaagctatgacctaaaacattgggaccaaatagaggctcacagatatttggattattttatgtgcttattattaaataaggaaagcattttgtgatatgtggaagacgctatgtgaagttttacctatcttctcaaagaccttttcttttgtattttcttttggtgtttcttaaagccaaacaaagaaatgttcttaaggagacagggtgggtttttctgtgggcctttgttggtttttctgtgggccatcgccctctaatggaattgatctctggctgtttgatttttttcatattgtatttttaaaatttgttgtacagtgccctgtgagcaccaagtaccactagatgaataaaacgtattatatctaaagtcttagtagaccaatttttaatcttagttgactctgtattgttatcacactgcactctgttgtggttgtgccatttttgcaaaattgagctctttcggttgttttcgaaataagggaacttagtgttgaaaaaccagagaactttttctttaataagaaactaaaaaagttgcagccacataggttcagtttggctctttggtttccagtggctctcaaatc

SEQ ID NO: 98007 - DNA, 2864 bp, Homo sapiens
gatagtttattgacttctattaaataggtatgcataagatgactccaccaattaaagatctgctgcctagactcacccccatcttaaagaacagacatgaaaaagtacaagagaattgtattgatcttgttggtcgtattgctgacaggtaagcagattacccacacatttttataagcagtatcaattttcaaatttggccactttgtattcaattagcaaaatttccttaatgtcactaatataagtgtaaaagattaggctatccagtattaatattttcagtcaaatttcaatttggatggtaatgggggtggcaatgtaattttaggactaaacctgtaagactaactcttcagcctttctgaagagtagtaagttttatttaatgcttaaaatgagttaatcatgtttttagaactgaatttgcaaatttatccttaaaacttttcttaatgtcacaataattaatatgtgtattttttaaattaggggagctgaatatgtatctgcaagagagtggatgaggatttgctttgagcttttagagctcttaaaagcccacaaaaaggctattcgtagagccacagtcaacacatttggttatattgcaaaggccattgggtgagtgttatttacttccattaaaaaaaaattactttataataaatgcattgtggtattggaaaatacttccatgtagaaatctcttttgaggcatggtctgaataatgcagttgagaaagctcttcatttaaccactgaccttctgattattggaatgtattgttaaattctttttttttttttttgagacggagtctcgctctgtcaccctggctggaatgcagtgattcaatctcggctcactgcaaccaccgcctcccaggtgcaggcgattctcctgcctcagcctccccagtagctgggactacaggcatgcaccatcacgcctaggtaatttttgtattttttagtagagatgaggtttcaccatgtgggccaggctgttctcgaactcctggcctcaagtgagccacctatcttggcctccaaaagtgctgagattacaggcgtgagccactgcgcacagcctgtagtcttaaattcttaattaaaatagatggaagggtttaagacttactttaattacactttaggtgttttcagggagggaaacagtaccattttcagaaaaatttaaaatgtgtgctggtcttctaggatattgcttaaactattaaggcaagtttttagtctcacaacatcatttaagtctcatattaatgctttatatgttttaaaaatcttattatggattgtttgagcccaggagttcaaggttacagtgagctgtgattgtgccactgcactccaacctgggcatctgggcacctgggcgacagggcgagaccctgtctctaaaaaaaacaacaaaaatgctattctaacattactccacggatttaactgaattatagctgctttgtgagataatctgtggtggtttgcttccactccatcacaactaaaataggaaaaaacagtcattgtagaaaacgagacaccacatgtccatgtggcttaagaaaatgttttcaaggaatatgacatgtgaatgtctgattaattaggtagaattataccagacaacaccccctcccctaacacatactcattcctctcctattttggtagcataatatttatttcagtggtgatggagtcaagacatttgcaagaatagcttttgtgcaagcttttagccccaatgtccctctaagtttatgtcaaagaagaggcaaatagatgcagcaaattgtgtggaggaaagataaaaggaaaagagattttatatggtttataatgggagactacaattcggatattcccctcaccactcctacctagttctagtgcccattttgacaactcagagaattactcactttaaacatttagttaaatttctttatatttcagaaagtttaagaactgaaaattacatttgaaaattgagttaacttaaaatgtttagaatttgtacagctatgacctctgatcttctcagagtcaacttttttaaactgaccttttaatttatatgaaatttttatatagaaacaacaatgccagtgacttgaaagtattgcattttataaaattactgagttccctgtaattattaatacttaaaagttttcatctttatgcatttttttcttccataaatttttgacttataatgtaacagcttgttgacccatttgtttttttcagccctcatgatgtattggctacacttctgaacaacctcaaagttcaagaaaggcagaacagagtttgtaccactgtagcaatagctattgttgcagaaacatgttcaccctttacagtactccctgccttaatgaatgaatacagagttcctgaactgaatgttcaaaatggagtgttaaaatcgctttccttcttgtttgaatatattggtgaaatgggaaaagactacatttatgccgtaacaccgttacttgaagatgctttaatggataggtaagtgacttgaactaaatacaagaaaataattataactcttccttcattttagaacatcgtgaaatagttattagatgactttttactgtaacatagttaaagaaaaaattgctagcctggagtcttaggacattgtaaatatgacttattattttaaaataatgtgcacgctgtagtgattccccagactttctttcaagttctcccatcccctttaaatctcttttcttatctattgaattaaataaattttgaaaagggttgattgataatcttttgttttcaaaattggtcaaatatagttagag

SEQ ID NO: 98008 - DNA, 1874 bp, Homo sapiens
caggatggctttggatagaagaaattaccgacaggtaagcttttattgtaaaagaatattctcaaaagtcctttcaactcattctttagtcaacttgaatgcatgttgtatattattttttgccttgattatctcacagtttatatgtgcttgattatgaaaggagatggattttagtcagccagttaacttccattttgattttggattcgaggattaatacttaactgtgaattgatgtttttgtctggtacattcagtgctttatctggctagatgaaacatggacacagttttaccttgaatcatgttaacttatactcatttttcgatgtttggtcacttttctcttcaactttaataagtagcaatgaatcattcttaccatgtttattagctaaataagtagtatatttagagtatttggttttcatgatgttgctttatttccttggaaaagcagtctaaaaggttttttgtttttctgttctttttagttagttgatactactgtggagttggcaaacaaagtaggtgcagcagaaattatatccaggattgtggatgatctgaaagatgaagccgaacagtacagaaaaatggtgatggagacaattgagaaaattatgggtaatttgggagcagcagatattgatcataaacttgaagaacaactgattgatggtattctttatgctttccaagaacagactacagaggtaatgaaaactattatggcacattgctactaactttaatatttgtagaaaagcatattagttgtcaagcaaatttttctagaatgcaattgaatttgaagtaatttttaaaatgctcagggggttaccaaacgatattattctacctcaagttttaagatttgatgtaaaaaaacagcaacagatgtttgggtggttagaaaaggttgactcttagtgtatttcaactgtgcagtcataaaccaaatgaatatgtcttttttttaaatttattttttaggactcagtaatgttgaacggctttggcacagtggttaatgctcttggcaaacgagtcaaaccatacttgcctcagatctgtggtacagttttgtggcgtttaaataacaaatctgctaaagttaggcaacaggcagctgacttgatttctcgaactgctgttgtcatgaagacttgtcaagaggtaaacttttgcatcaaattcttacttcttccccaaatagtttaatgtaaatagtaacattttaacattatttgttttattataggaaaaattgatgggacacttgggtgttgtattgtatgagtatttgggtgaagagtaccctgaagtattgggcagcattcttggagcactgaaggccattgtaaatgtcataggtatggaatttgctggttacataagactttttcttgttttaactttctttttcttttttttttcgtaagtaaaatcttatttaggagttgggaggtttttgttagctttttaaaagcacttcaagattgtagttaagtcgggggatgtcacaaaagtcttgtttcccaaaacccatttatattttactttaaagagaaaaaaagggtaagtttaggacctacatgagaggtgggagtagtcacagctcaaaaagctttgaagtcatggaatacaggaccctagtagaaatagtgtgtcaggtgaaatatattctgccatgttctgctgcggggtgaaaaggcaatcctaaagttttaatttagttttagaacaatatatatatatttaaaccttgaattagcgattatgacaggttttttgcttgtgatcagtttcaaggaatataatcagagaaaagtgaactgatcaaattattgtctttatttacataccca

SEQ ID NO: 98009 - DNA, 2722 bp, Homo sapiens
gatcctcctgcctcagtctccgaaagtgttgggattacaggtgtgagccaccgtgcccagctggagttagcacaaaattctttggttaaaaaagctaataaaaatgctgaaaaatgagattctcctttttgttcttaaggcctttaaaatatgcttaaagcttgaagataattagtgaaattatgtgagggattatgttaacactatatgtgccttggaaatggaagatacttcagggaaatgaaggcatttagtacatacctctgtggttcgttctattaaattactcttttgagttaacataaaatttctatcacaggaattgaaattccagagtaatttggatggaaatgaactcatgctgtctatgtaaaatgtgtgtaaaagtaaacactaaaatattaaagtatggaaaatcttctttgagtaatttgctcattcaaaatgtttgattataaagaaaccacacctattactctgctctttttcccaggctgcattgcgtcagattactgataaagctcgtgaatttggagctggtcctttgtttaatcagattcttcctctgctgatgtctcctacacttgaggatcaagagcgtcatttacttgtgaaagttattgataggatactgtacaaacttgatgacttagttcgtccatatgtgcataaggtttgttctccttaatagtgtttctgatagtttaaagttttaactttttcagttaatcaatgttaaatttacatattctcctagaccttttcctttgcacaagtacacaccatacatgtacaaatacagttttatacagatgtacagatgttagtttttgtcatctttgccgtaagaggttcatattatttaattttttcatttgcttttattaaaattagattaggatgagaacatatgagaactaacgccagttagtattaagaaccagttttttcaccgatggtaattatggtgcagtatgttcatagggtgtataagttatttctttaaaaaatattgaatattagtgtgtcactaatagctctcttaaattttcatctctgtctggagtttgaacttgtataattaaaattcttaaacagttcgtcccttgattaacaaaagtcctgataattctaaatttcttatgtatgtttaattctgtacatgagcatttcatcagtaattgatgtgaaagtgtagcttcttctcttttctctttttcagatcctcgtggtcattgaaccgctattgattgatgaagattactatgctagagtggaaggccgagagatcatttctaatttggcaaaggtatttacatttaatttctagagaagaaaatttatatctgtttatggaattgattatggaaagaaatggttgaagattaatattaccaactcatgactgtcctttctttgtttacattttaggctgctggtctggctactatgatctctaccatgagacctgatatagataacatggatgagtatgtccgtaacacaacagctagagcttttgctgttgtagcctctgccctgggcattccttctttattgcccttcttaaaagctgtgtgcaaaagcaagaagtcctggcaagcgagacacactggtattaagattgtacaacagatagctattcttatgggctgtgccatcttgccacatcttagaagtttagttgaaatcattgaacatggtaagttgtaatgtaactttgtctttttttttttttctttaggagacagggtcttactatgttgcccagactggactcaaacctttgggctcaagtgatcctcctgctcagcctccttagtagttgggactagaggtacacacacagcctgtccatgtttaataggacagctgtcctaaaatttgggctactgatttggggagataaatggaaaggcatagctctacaaactatagattttatgatgggtttgttatattatctgctgacaggctatggttcatgttttgcttttacctaattttgtttaatgtgaacatattctgcagtttggctgaatagttgatatattgagagaatctggatgatattgtgtaacttaggtaatgttggggcatagttaaaacctgtgtttggttttgtaggtcttgtggatgagcagcagaaagttcggaccatcagtgctttggccattgctgccttggctgaagcagcaactccttatggtatcgaatcttttgattctgtgttaaagcctttatggaagggtatccgccaacacagaggaaaggtaaatccaccaattaccttttgatttatcttcattaaagttaaggcgacataaatctaaattactaaagtacatatattttttatttaaaaatagggtttggctgctttcttgaaggctattgggtatcttattcctcttatggatgcagaatatgccaactactatactagagaagtgatgttaatccttattcgagaattccagtctcctgatgaggaaatgaaaaaaattgtgctgaaggtaattattccagatttgttaatgtaaactggatatgtttcatggttctaacagaattttaaagtgtttttaaaaatcaacaaaaaaaactgtatgttacacgaatactgtttgatttgtttttaaattttattttttaaaatcacgtaatcagcaatgagtattctcttcatttcaggtcagttgatttattattactatttctt

SEQ ID NO: 98010 - DNA, 1049 bp, Homo sapiens
gttttatgccccatatgagcttatttccattttatataaatcttatgaaacattatttgctcgactacagcattttttggaattgctgactcagattttataattttcaaatttttaataatttgacattttgacccacaacatgtttgaatgtgattagtattttctaagctcttctcttgtgtttcctcagttccctacaccacggatataatcagttagtggatgagaagtatatattttaagtttctaattaagatagaaaagcaagatagatgttgtctccaagcaaataaaaaccttattagctaataaactaaaatattttaagtgcaaatattgttcattatgctgttttttaagttaagaaaatcctaaactgtcttataacttttattaggtacttcctcctccagctggttatgttcctattcgaactccagctcgaaagctgacagctactccaacacctttgggtggtatgactggtttccacatgcaaactgaagatcgaactatgaaaagtgttaatgaccagccatctggaaatcttccatttttaaaacctgatgatattcaatactttgataaactattggtaagtgatactagcagaaataaactattaattgtgttccagaattataaatcataacatttcaacttcccttaacatttttttctttttactataggttgatgttgatgaatcaacacttagtccagaagagcaaaaagagagaaaaataatgaagttgcttttaaaaattaagaatggaacaccaccaatgagaaaggtaagtcccagtttgttaaattgtcatgtttgttgcttatttatttaattaaaaaaaatttgtagtttttgtagagacagggttttgccatgttgcccaggctggtctcaagtgatcctcctgctttggcctacctcccaaagtgctgggattacaggtgtgaggctctgcacctggccatgtttatatttttaaaaatgtttttaattttttcaccaggaaatgtagaccacaaaatagtagtgaactatt

SEQ ID NO: 98011 - DNA, 1041 bp, Homo sapiens
gtgatcctcctgcctcagcctcctgagtagctggggctacaggcatgcactaccatacctggctaatttttttattttttgtagatacgggagtctcactgtgttgccaggctggtctcaaactcctaggctcaaagtacccacattggcctcccacactgctggggattataggcatgagccactgtgtccagccttgttttgtttttgatcccctgttatttgtgttagagtatttgtttcaagtttgcatgaagttttgccttaaagctttttgtagcctccacataatgctgtgggtatagatagaactgtgggtatagatagacagaacttactgttgactgcctgcatgtctttctcagtcgtagtcattgatttccttagtgtcactaggaggaaaagtctcccttagtgaatcctactaataagcaacgtccttactagtgaatataaaaatatagtagacctttaaatccttaatggcaagtgatgcctgtggacttgacattgatttctctaggcctcacatctttagagtatccactttatccaaaatgcttagtggtctgtgctggtgcagacgttaactagcaacaaaaaatatctgtgcaaagtacagatagcatcaatataaatttaacataatttaatctttaatagacaaaacaattttaggctcactggagaagacgtgtataggtttattgacctctccaagaagttgtattttttttcttttactatatattaaattatataaaatagagatggggtcttgccatgttgccaaggctggtctcaaactcctgggctcaagcgttcctcccatctcagcctcccaaagtgctgtaatcctggcctgtccagaagttgttttttttttttgaagtctgttaccagctttaaaaaaaaaaaaaaaaatttctttgtgattttcagcctgcattttttgaaattttactcgttttgcaaaaggtttgatcaggtggtgtgtattttatagggctttggcaaacattttggttttagtttttatgc

SEQ ID NO: 98012 - DNA, 1251 bp, Homo sapiens
ctggctaatttttaaattttttgtagagacaatgtcttgcttcattgcccagcctggtgttgaactcctggtttcaagtgatctgccaaagtgttggaattacaggcatgaaccactgtgcctgacttaccctttgttttttattatggaaaaatgtacataacatcaaatttactttttttgttgttgttgttgagatggagtcttgctctgtcacccaagctagagtgcagtggtgcgctctcggctgactgcaacctctgcctccccagttcaagtgattcttttgcttcagcctcctgagtagctgggattacaagcgcccaccaccacacctggctactttttgtatttttagtagagacagagtttcatcatgttgatcaggctggtctcaaacaactttaaatgggtcaccattttaggaatattctattttagaacttgatagttttgagtataactgtttgagaataaagaatattattttaacagtgattaaaattgtggttttactcactctttctttttaaagatactcctgggcatggaagtggatgggctgagactcctcgaacagatcgaggtggagattctattggtgaaacaccgactcctggagccagtaaaagaaaatcacggtgggatgaaacaccagctagtcagatgggtggaagcactccagttctgacccctggaaagacaccaattggcacaccagccatgaacatggctacccctactccaggtagaactgtctcattggacataattgtttttttctccataaattatttaattttttcctttgtggtattctgtgtactattaatgtcaacttctagtaagaataaggagatatacaaatttaagtcttggtttgcgtttataatataaaagcaaataataggattgatcttaactgtcttttatctcaatgtatgtaataatacagtcttgtactatagattatataaaaatttgcttttcttggtaggtcacataatgagtatgactcctgaacagcttcaggcttggcggtgggaaagagaaattgatgagagaaatcgcccactttctgatgaggaattagatgctatgttcccagaaggatataaggtagtacatcaaatttgaatgaggtggtatttaggatatacatttattttaaatagtgaaaaaaattgattaagcttgcattggctttgcccaaatttactattgtcattccattctcttagctatttccag

SEQ ID NO: 98013 - DNA, 1314 bp, Homo sapiens
aaaaccccattttaacagtacagagtgaattaaatgtgcatccattatcactatgcatatttacataatttgtcagtataaataaaacaattttattatttttatcttttaccatttttctatcttgttccatagtcttaattgctatttatatgagttttgaagaaaaccctatttttcagtggaagcattatggttctccattgttgactgaagattttacttcacctccagtatataaactacagtgtgctatgttacgaattctgaacttgcttatcttttgtttagaaaggcattatgtaaaacgaaataaagacgcacagactatggaaccagcgagcgtagaaaggagatcaccagtacatagaaaagagaatgagcaaagtataaaataggatgttaagtggaagtgattgcgctaatggtagaaaaatacattgaaagcattttaaaggtaaatactcactgtttttttcagcgagaaattaggcaacagctagcagaaaaagctaaagctggagaactaaaagtcgtcaatggagcagcagcgtcccagcctccatcaaaacgaaaacggcgttgggatcaaacagctgatcagactcctggtgccactcccaaaaaactatcaagttgggatcaggcagaggtaatttctttttgttttttgttattactgttaaaaaatttttttctgttatggactgtattagtctgcttgggttgccatagcaagataccacagactgggtgccttaaacaacagacattgatttttttcgcagttctggaggcttgaaatccaagatcagagtgccaacagggttggtgtttgttgagggctttcttgctgtgtcctcacatggcctttctctgtgccagcaagctctgttgtccatgctcttcctatgaggacatcagtcttactagattagggccccaccctcatgaccccatttgaccttaatttacctccctaaaggcccagtctccaaatacagtcacactgggggttaggacttcaacatacagattttgaggggcatgcaatttagtccatattatggaataaggaaagttctttttagaatattaaatacagacctgtaggtatgttacattgtggaggttgagtatgatatagtggtcttccttatcttctggatagataacttaagcccctcactactggcagcaaatagtcaatgctactcctttctcttggccagtctactctcctacctttttttttttttaaacatttgttttggaggctgaatgcattggctcatgcctataatctcagcactt

SEQ ID NO: 98014 - DNA, 2998 bp, Homo sapiens
ttaaaagcatagtttattcagctaaagaaaagtgaatgtctgagttcccatagaaatccataaattttaggatgctttaaggataattataaataataacttattttgtaaaggtgtaatctttttctttttgacacaaggttttgctgtcttgctcaggctgatcccaaactcctgggctcaaggattcctcctgtctcaacctcccaagtagttgagattatacacacaggctgtcatgcctggctgtaatcatttaatgaagcattgaactatggaaatgtggatatgtatattaccttgtttccatgtgccttatttttttatatttaacatttatctgtgaaacggtacagaatattagtaggcatgtattaaacatttgtgctttatggtgttctgatttttgtttatgatattctgttttgttattttaataaagtggatattaagtgagacatacctcttttcagtatgatccatttgctgagcacagacctccaaagattgcagaccgggaagatgaatacaaaaagcataggcggaccatgataatttccccagagcgtcttgatccttttgcagatggtaattctttcccacttttctataagtattcagaaatttatttgtattaagttgtctttagccctttgattttttttggcatgcttctgaatttgcttttctttttaaaaatcccccttactatagatttgtatagatgtggttgaagtcacagatgccatattcttcatctttataatgcaagttttctttccaggtagaaggacaagaaaaaaatgagccaatgccatagaaacgcaaagggttaaaggttttacttttacttttgttttgggtacgctttctatacttggatcaaatgtatttttctgctcaaaatactttcaaattattgaaagttttcattccaaatcctagatttttaggattgttacccttgagaaactgtttctcacactagagctccccccatagtgctctaaatatagcttagtaaaggcacctactttgctctaagcatacttaaagttaaaacaaaagtatgtatacgaagagtttgatatttttaatagttggagtctgttttgctaattttagtgtgcaagtcagcacaaggggcatagtgagcctgatggaagctttcctcaggtgagtgagtttcacaatcaaaattaggtgcctgtttcttaaaattagattctgctgcaggtttacatactagacttttcagcctgcatgaattagtagggatattctttttttacttgcataattgtaattgatttaaacatgtatgccagaattcacaggcccatactaactgtccttaatttctttcctacagcagtactgctatatgccagtcctgtctgcattcttaagggtgcagttcaacacatcctctctagattatggtgaaaaagtattccaaaggaagtcttatcagagctagtgtcagaaagaatgacactaccaattgggcatgatcttcagcataggaaatgtcttagaattttattattttttcctaaattgtgatgctatactacttgtatagctagttaccacatttctaaagcatagtgtgcctctgtgaatcttgttatatactgtttgggcttctgtaagatattttgaagtttgaaaagcaaatactgaaactttaaccaagagactgacacatctctttgtacaccacgttgcttctgtgtgcatcataataactggtagaagtaatatatttaaagtaatatgtttccagttttaatttatgctttctaagaaataaaaatatgttttctgggtcaacaaaacttaaagcatgaagccctttttagtaacgtgacatcagaataagattataggtatatttttaaaatcagattttctaaactacaattgttttagaacactgtatgaagaacttatctagtcatagttatttgtagtcaggattttaacagcttgcaacaggtaatgttttgaatataaatatctttccaaagtgttactaatggtaaagagataattttctaggcttctattctgctgcttgaagtcagaactgctgatggagacaaaggcacgaaagtgtacgtattccggattagcaacccaggaacccatcacttctgaagactctaaactgtgctgtcattttgtttttatatgcattaaaatatttgttttaaactgctgtagatgtttgtgttcaaacaggttaaattgatcagcaaactcaataaaaagtaagatgtataattattaaagttttccatcaaaaaataatttaaatgattatggaataacataatatttagagcagggcagataaatcagttgaacctgcttattttttatttattgtactctttttcctgttgctgttcttttctgcaggagggaaaacccctgatcctaaaatgaatgctaggacttacatggatgtaatgcgagaacaacacttgactaaagaagaagtatgtaaacctgtctcctgttttaatggttgtgaaagaatataaatacagttgtgattgagagactgttaggtttcttttttgctatttgctgcacaaataatagtattaataaaaattaactgagaaagaatcttacccccaaattataccaccttccaagtaaaacttttcatttctatatccttttctagtcctgggccccttggctgtatatgtttgtatgtatgtgtctcacaagggattttttttttttttttttttttttttttttggacacagtctcactctgtcatccaggctagagtgcagtggcgtgatctcatctcactgcaatctctgcttcccaggttcaagttatcctcccacttcagcctcccgagtagctgggaacacaagtgtgtgtcaccatgcctagctaatttttgtatttttagtagagatggggtttcaccatgttggccaggctggtctcaaactcctgacctcag

SEQ ID NO: 98015 - DNA, 1156 bp, Homo sapiens
tgtcacccaggttggagtgcagtggtgtgatctgcaacctccgcctcccgggttaaagtgattctcctgcctcaacttcccaaatacctgggactacaggtgcatgcccccacgcccagctactttttgtattttttagtagagacggggtttcgctatatgttggccaggttggtctcgaactcctgacctcaagtgatcgcccacctcctcctcccaaagtgttgggattataggcgtgagccacagcacccagatctgcccacctcatcctcccaaagtgttgggattgtaggcgtgagccacatgcccagcctatcatggtttaatttctagagcttgcttacgctgttgtgattactagtctcttatatggtgcaattattgtacattttctgtatttaagagagtattttgataattacctagtaaagaaatgcattgtgttgggagttcttttggaaagtgaaattaagaaagtctgtgttatctttttatagatattgaagcacagattcgagaaattcaaggcaagaaggcagctcttgatgaagctcaaggagtgggcctcgattctacaggttattatgaccaggaaatttatggtggaagtgacagcagatttgctggatacgtgacatcaattgctgcaactgaacttgaagatgtaagttacaaattatgtacaagaggcagttatttttttgagagagcaagaaatatgaataacttttgttgcagccatctggtttaatctggagaaacatttttgggatcttttagaggataaaactactggaggtatcctctctaaggttcagaaacttcactggaaatgctttgttctgagaatttatggtaaagactagtttgtttatccagtgaagcacctgccagccattacctttataaagttaagagtaaagtaaatccctaccattacttatcagctctatctagagtagcctgtgtgagaagtgacttaattgtaaatagccatctgtccttgtgatttgattactgacttgtacttgatactgtttttctcctcttggtatcttaatgtgaatggattttcttttcttatctttttttttttttttttgagacagtctcacctgtcatccaggcttgagtgcagtggactgcaacctcc

SEQ ID NO: 98016 - DNA, 2043 bp, Homo sapiens
tcttccagctctgaaaccgcagcgtttcgtacagtgttcatttttttttaatgggaggggtctcggggtcttgctctgtcgcccggtctggaggcttgagtacagtggcgcgacacgattacggctcacggctgcctcgaactcctgggctcaagcgatgctcccgcctcagcctccagagttgctgggactcagtgtctgttcttaactcccttcgtagaatccactttcctccagggcaaagttactcacttaaggaccttacggctcggctcggggatttcctgggtcaccacgcaggcgacttcagggcccaaccgtgtctcctcccccacccacaatgcacctcgcggttccctctaggtggcagttctgtcacgtgtcacccgacggagcgcgctcccgtttggcgcacgcgcagagtgcagcccccagctatttttctccgtggcggcggcgacgagcggaagttcttgggagcgccagttccgtctgtgtgttcgagtggacaaaatggcgaagatcgccaagactcacgaaggtaagcggtctttccctgcttacgtgttttcttcgttgctagcctaataaaagccttttttcctaggattctgcctttttctatggtttctttcgtaggagctgagcccgcgtttcggggccaagggtcgtctcctccgcgccagcggcgcaggccactgccccgcgtaatggcgtcctcctcttacacccccgacaggcgctttgttcagtgtttgggacctgctacttcagagtagcttctcttctctgaccagagggcctcgtttaagcggcttcctcagtaggattcgtgggcaagggatcggggaagcgggcgtggggagaaggtctcactcgcctctcgacactgtcgtccccatagtttgtgcagaagagggtcagaaaagcactgaaatacggcagccgcttttccggcagactgaatcgaatttggttaaaccgagattccgttactcctacccttgtgtgtcttcaagcgtcagttacttgtttatttttcttgcacgaaacgatttggggataaaatctggtagttgttttccctcccttagtcacttttagtataatattgatctttttctttggagactggttattggaggagcagatggaagaggaaaacataaattactttcattaatggccgaagctttcaagctagttgatcgttttatggaatacagagtgtgcaaattaggaaaacgttgggaatagactggagttcattaggaagtatccagagatgacagaaaatgggatcacttttcagaaaagacgaggcatgagaagttggaactgcattctttgatttctgacttggaatccgagattttcactgagaacgagacttctaagtcacttttgtttcatatgttctttctgggtatttggctcggtattagtctgtgagaggtaagagactgaggccatccaaaattttacagtctgataggagaaacagatgtgtatgttctcattctctcatgaggccagatgcatgcttaagtagaagaaaaagcagcatgttctgggaacctgggtaacggaatgattatgtttagggttgtttcactgaggaggttacatgaccgtgttttaaaaggatcagtcagttttaaatcgggaaggacatctgagcctgagaacatcttgtaacaaggtattgaatcgtgaaaggtgtgtttgagtagtagtccactgtagcaggaacagagggtgcaagtagagaagaaataaatgaatctggaaaggttggattaggaccagaatgtgaatggctttgaatagttgggtcacccagaggacctgaagtccagctttctgctatttatcaaacatgctaatgaattgtcaatgactttaatattagtataccattttaggtatttaggatttaaatgctctcttagtattcctaggctttattattttgtctttagactatctcaaatataaccttttgcaaagtaagtagaaaatataaagttgtgctgtttttgt

SEQ ID NO: 98017 - DNA, 3486 bp, Homo sapiens
ccgcctcccaaagtcctgggattacaggcatgagctaccgagctcagttttgaaaggtagaagtgtatgctacaagggatgtaggacttgagagtcaaggcctatggtcttgtcctggctctaccagtaagtgtgaccttcgatgtttttttctcaagtaaggctggtaataattaccacagttgtgagaattgagaatttggaaatgcagtgaaagagactatactcaagtcttgttctggactaacagtgatcttaaaatctctcatttcaaagaaataaagtattttgatgattctcttgcatggtgtattaataaacttggtataatggcagaaactgtaacctacaacaggtttacgtttaactctttttgtaggtgtttggagaagagggattgaccctgaatcttgaagacgttcagcctcatgacttaggaaaagttggagaggtcattgtgaccaaagacgatgccatgctcttaaaaggaaaaggtgacaaggctcaaattgaaaaacgtattcaagaaatcattgagcagttagatgtcacaactagtgaatatgaaaaggaaaaactgaatgaacggcttgcaaaactttcagatggagtggctgtgctgaaggtaacattcattattatgaataagtttcttgggttctgagtccaagaatgattttgcttctgtagtattccccagtagtaccatagaactaaacgaatacttgaggaattaacttcatagtggaattttgtttgttttgttttgagctcttcgtcacccaggctgggatgcagtggtgcgatctcggcgcactgcaacctccgcctcttgggttcaagcgaatctcctgccttggcctcccgagtagctgggattacaggcacttgccaccatgcctggctaattttgtatttttagtggagacagggcttcaccatgttggtcaggctggtctcaaactcctgacctcaagtgatccactcacctcagcctcccaaagtgctaggattacaggtgtgagccaccacgcccacctcaggattgctttttaagtaaactgcttttaaatgacttggcaattagcatcttgaatgaagaggccatactaactggaattcttttcgtctttaggttggtgggacaagtgatgttgaagtgaatgaaaagaaagacagagttacagatgcccttaatgctacaagagctgctgttgaagaaggcattgttttgggagggggttgtgccctccttcgatgcattccagccttggactcattgactccagctaatgaagatcaaaaaattggtaaaaagttaccttttaaatgagtttgtggcctgattttagtttttcttagaataataatgttgcagtcccctaaatggaatagcacattcatttcctgaataacagaagtagaatagtgctaatgtcagagctaaacatgcatcacatctttttcagaggaaatgatttgatctgtagtaggattgggatttccctacatcaatatcctcacaacttataaatgtgttacaatatttacaaatgaaagtattaaaattttgctgaaatttctctgtaggtatagaaattattaaaagaacactcaaaattccagcaatgaccattgctaagaatgcaggtgttgaaggatctttgatagttgagaaaattatgcaaagttcctcagaagttggttatgatgctatggctggagattttgtgaatatggtggaaaaaggaatcattgacccaacaaaggtaaatggttgaacactttctaaaaattcttttgttgttcattttgttaatgtatcctcacatcccaaatctttgattttgtcaccagaaaaatagtctaatagcagtagcaacagcaatagctcttgtgcccatcaacaattctcatgtacatttccagcacctagatatttaatactccactaaaaggaagcaggatcccttgagtagcagttgagtccatgcctggaggcaggaaaaaatcaggatggatctggaacaccctgttcctgcctggcagtaagaatactttccaagatacgcagaacagggttttgttttgttttgaagacagagtcgctgtgtcgcccaggctggagtgcaggcagtgacaacctccacctcctgggttcaagcgattctcctgcctcaggctcctgagtagctgggattacaggcatgcaccaccatgcctggctaatttttgtatttttagtagagacggggtctcatcatgttggccaggctggtcttgaactcctaacctcaagtcatctacctgcctcagcctcccaaagtgctggattacaggtgtgagccaccatgcccagacagaaattttcaataagtcttgctcatattttactaagggaaaactaattaattaaatttttttctaggttgtgagaactgctttattggatgctgctggtgtggcctctctgttaactacagcagaagttgtagtcacagaaattcctaaagaagagaaggaccctggaatgggtgcaatgggtggaatgggaggtggtatgggaggtggcatgttctaactcctagactagtgctttacctttattaatgaactgtgacaggaagcccaaggcagtgttcctcaccaataacttcagagaagtcagttggagaaaatgaagaaaaaggctggctgaaaatcactataaccatcagttactggtttcagttgacaaaatatataatggtttactgctgtcattgtccatgcctacagataatttattttgtatttttgaataaaaaacatttgtacattcctgatactgggtacaagagccatgtaccagtgtactgctttcaacttaaatcactgaggcatttttactactattctgttaaaatcaggattttagtgcttgccaccaccagatgagaagttaagcagcctttctgtggagagtgagaataattgtgtacaaagtagagaagtatccaattatgtgacaacctttgtgtaataaaaatttgtttaaagttaataattgtgttagcatttccatgattagaagatactgaaaattgaaagccagttgaagggcaggctggcatgtgtgtaaaacattatcctatctatgatattttcatgtttctctttgttgcagactgaactacattattccattgataatggggaaagacagtttctattttccccggtgcaaggatgtaatctctcttggagctgtaaaatctgggaggttggagggaactccagctcctcagcatggcctttgggctgctgctgcaagcaaggcattgaggcaaatatttttgctgtccttaccttggacagaagtagaggggagaaataaagtccatcatcacatgaaaagtcagtcacttgaaatcctgtacctagaatacctttggctttggtaatttcgttgtgtttggggtacaaaaaaaaggatctatttgatag

SEQ ID NO: 98018 - DNA, 1006 bp, Homo sapiens
ttatcactgtatcctataacttactgtgatgtgatttttgctgctcggcctcctgagtagtggggattacaggtgcctgctaccacatttggctgatttttgttattttcagtagagacagggtttcaccatcttggccaggctggtctcgaactcctgacctcgtgatccacctgcctgggccttgcaaagtgccgggattacaggcctgagtcaccacgcccggccaggccaacagtttattaagaaggtaaacggatatggacaagtataattaatagaaaatagcctaaactgtctcagatacttcctgtcttaatttgatcaaaaattgctaggaagcaaaaaaaaaacaaaaaaacacaaaaaccaaaccagattacttagggagtcctaagtaatctagtaacagcttgaggggaattaaacagataggcatttttatttcatttaaatcttactatcaactattcttaacaggctaaaggttggtcttcaggttgtggcagtcaaggctccagggtttggtgacaatagaaagaaccagcttaaagatatggctattgctactggtggtgcagtaagtaaaataaatgtgataatggtttgctgaatgtttatacttgtctggaatttatagatagtttaacatttcacaattagatactacaactatctgtttcttttggctctttggaaggtaggggttggattaaattcccgttaatttgccacaagtctggcctaagaatgagcttactgactattctatattgactaaatcttattgactgaataagggggtttccttttttttgttttttttggagacagtgtcttgatctgtcttgactattcttgacttgatctatattgactattcttattgacttaaatctgtggggtttctttttttttttgagacagggtgtcttgatctgtcacccaggctggaatgcagtggcacgatcttggcttactgcaacctccaccttctgggttcaag

SEQ ID NO: 98019 - DNA, 2202 bp, Homo sapiens
gcataagttttgtcagtttgtaatgaagtcagcatttttaaactttttgttacaagaatagttttatgtatcatattcttcaaaacaatgtagtcaaataatgaatcggaaaagagcaaagaaccagtacttcatgaaaactaccataacgtaaattccccttctctcccctggatggaagtatcaatttggaagttactaggaaaaggtaagggaactgactgaggacactaggcttaccttttaatttcgaagagtaactggattatttcaggttgctacgatttctgcaaacggagacaaagaaattggcaatatcatctctgatgcaatgaaaaaagttggaagaaagggtgtcatcacagtaaaggcaagtgtgtttgtatttttaaagataattttgagttatcttatgatcaaaagtttgagttatctgatgatcaaaactgaatttttcaaacagaaaaattctgttttaaaaactgctttttttattccttcatatgtagtctcagcacatgtatagaataaagtacttactgtgttttatgtgaattagcctttgctgcatgaaatgaatccatcctaacttaaatgattattcaaataagcacttttgggattttttgcagaagtgtaattggatgtcctgggctgtttcatactctaccctgcatctcttatggccagaggggtctgtttttattaatctggcctgtaattccatgttttgtgttcaatgaaatccatatacctaattctttgacttttcataggatggaaaaacactgaatgatgaattagaaattattgaaggcatgaagtttgatcgaggctatatttctccatactttattaatacatcaaaaggtaagaacaaatcaataactgaattattattatttttattattttagacagagtctcattctctgttgccccggctggagtgcagtggcatgatgtggtggcgcgttgctcactgcaacctccgccttccgggttcaagtgattctcttgcctcagtctcccaagtagctgggattacagtcacacgccaccatgccaggctgatttttgtatttttagtagagatggggtttcaccatgttggccaggctggtctcttaactcctgacctcaggtgatccacccaccttggcctcccaaagtgctgggattataggtatgaggctctgtgcctggccaatttttgaattttttaatagagacaaggtttagccatgttggccaggctggttttgaattcctggcctcaagtcatctgcctgctttggcctcctgaagtttttaaaatatactttctaatatgtgtcaaactataggtattagttggtgtcatcctctaaaaaataaatgtatatattccaaaagttaatgcatatgagaaatgaaggaggaaaaccaactcactggtgaattttaaagtgtattggaaccttggtttcgcttttcatttaaatgtattgcagtcattttttgtatatttttgaaatcttcattatttttacaggtcagaaatgtgaattccaggatgcctatgttctgttgagtgaaaagaaaatttctagtatccagtccattgtacctgctcttgaaattgccaatgctcaccgtaagcctttggtcataatcgctgaagatgttgatggagaagctctaagtacactcgtcttgaataggtaataagcagtggtatttgttgatttatatttctcggtgaaagacagaattatttgtattgctgtttgcagtttccatcatgtgtacctccacatttgatccagttgggtttgtatctagaattgtaattgtgtaaatcaggtgtgctctaatgtatccttatggttgtgtttttgaaggaaccccaaagtctttactattttgatcagctttctcatagaatagactaatttagcacatgggtacctttctgtattttgcaagtgtttacagttgttttgaaggcacatgactgaatcttgtattttttttttttgagacagagtctcactccctggcccaggctggagtgcagtggcataatcttggctcactgcaatctccatctcctaggttcaaacagttctgcctcagcctcccaagcagctgggactacaggtgcgtgccaccacacctgactaatttttgtatttttagtagagacagggtttcaccata

SEQ ID NO: 98020 - DNA, 3350 bp, Homo sapiens
cgaggcccgggaactagactaagccggccggagagggctgagcgcgctagcacaccctgcgcgggtagggaggggcggggctcgcgcgcagggtgtgcagattgcagggcccgggctgacgggaagtgggtgggagctgcctgcacacgcggtgccgcggggcgggagtagaggcggagggaggggacacgggctcattgcggtgtgcgccctgcactctgtccctcactcgccgccgacgacctgtctcgccgagcgcacgccttgccgccgccccgcaggtacgcggccttcccgcaccacctccccccggctcctgcgacccccgagtgggccttcctcctctgcggtccagctggagggtgcgggcggcgacaacctggagttccgcaccgcgccgcaccgcaggcccaggcctgcgggtccaggcctcgcgggtccatgcgggttccatcacgtgcgacgcggatcctggacctcggctgggcgcgggagggacaactcgtggggtttgaatttgggggattgtaaccacttaggcccgctggtgcaacctgcgcctggccgacttcagggaaccggggagggtggtgtacgtgagggaaccgcttttttcccccgcaggcagctgggataccgcgcctccagtcttgaccttgctgggggcgttcggaaagaaggacacgtgggctcgcgccgagtgggccgggccgccgcccccagcatcgcggccttgctggttgctctgatacagtagccttgggtggatccatggagacactttgctgagcggctttttgcaccgtcaggaatacttttaacttccctggtcacttggatttgtaacttgcctctctccggctgacttggtttctcaggggccacagttggagtgggtctgcccacaaggccgttttcgcggtgaaagattaactcgtttttggcggcagggataggtggccgtggggaaggagccgcatgtgctttgtgctggtgctataggtcaggcgccggccggggcggcctctttagcttgcgctagtggctgatgttccgaagctgcggcgccttccgtcattcaggcgtagtggctggcggaggtcagccaggctcagcatctcacgttgcttgctctgttgcacaggtgggcatgtttgttctgcagcgcaccacgggtggtagttctgatgatctttttgcttccatccccagaaatgcttcggttacccacagtctttcgccagatgagaccggtgtccagggtactggctcctcatctcactcgggcttatgccaaagatgtaaaatttggtgcagatgcccgagccttaatgcttcaaggtgtagaccttttagccgatgctgtggccgttacaatggggccaaaggtaccagtatttttattttattgtaattacggtattattaatagcattttactcacaaatagtcgcactgaactattcaacagtactttcatctccatttttgagagaactcagtttacatgtaagaattctgaagtattggttagcctttttttcttagacatgatcttaaagcttaaactgcttcagccagattttcgaaactattttgttcaatgtgtgatgtaatcaggtagtaacttacagctcaaggtggattcttaaactcgaggtagaatttcgctggcttaagttaaaatttggatcctttcccagtagttcatgccaagtgtagagagaagagtttaacttatcttccataattccttaggtatgtgcttgtagatgctaaatttttttttggtttattgtagtaaaatgtacacaacataaaattaccattaagtgtgcactttggggacatcaattacatttatgttgtgcagtcatcaccaccatccatctccaaaactttttatatggaaaaattgtaactttgtactcattagacagtagcttcccattctctcctccaccccaagatgctagttttacccatcggttttctgctgttctcttgttccaaagcatatttaaaataagtctcatttaataggggtaatgttttgaggaggcctttgaaggtggtgtgcagtcaagtggtgcttcatttcagtttgaagacagttcagatatcaagtgatccaacaactgcctaaaatacaacatttgcacacctcacaaatagaaagtagcagctttagttcaaatccaaaggatggccaataattgtgccatggttgaagttttatgttgcgtgaacctggaagagcacgctacttgccttgatggttaatattttagttaaacggattttaaaacaagtcacattactttaaaagataacaggcactaactaaagtataagtgataggaagattgttttattctttgtcttgtgttcttgttcattttataagatgacaagttttagtccctaggattttaatctcctaaattacctagttcaaaattatgctcttggcagagaatcaggtcattttgtctgtagacaaagaatgtcgataaacttgcccttgaggttcatgctgcaagactgataaaaatgacacaacttacgttgagactttgaagtagttgctttattatgaagactgctcatttttaaaaatgtaaatcatccttagggtatgtctgatcctgttacatttttttcttctagggaagaacagtgattattgagcagagttggggaagtcccaaagtaacaaaagatggtgtgactgttgcaaagtcaattgacttaaaagataaatacaaaaacattggagctaaacttgttcaagatgttgccaataacacaaatgaagaagctggggatggcactaccactgctactgtactggcacgctctatagccaaggaaggcttcgagaagattagcaaaggtgctaatccagtggaaatcaggagaggtaggaatgtctgttgtcaccacagtgttctaaacttcagtgtgctttaaggcattgattccttggacctaaggaaagtgttaacttgaggaaattaatccttctctcattcctcctcttggcctggagaaatcttaaactgggttttcctttagcaagcttggctgtatggtgggtaggtactgttaggtaattttgatattttacttagttggtttcttttgtttttagagacagggtcttgctctgtagcccaggctggactgcactggaactcctgggctcaagcaatcctcctgcctcagcctccaagtagctgggactactacaggcactcaccaccattcctggctaatttttagtttagttttgtagaaagtaagactaaatacactggatcattcagaatgtcagaaagtaatgtttt

SEQ ID NO: 98021 - DNA, 1752 bp, Homo sapiens
tcccgccccgcggcaccgcgtgtgcaggcagctcccacccacttcccgtcagcccgggccctgcaatctgcacaccctgcgcgcgagccccgcccctccctacccgcgcagggtgtgctagcgcgctcagccctctccggccggcttagtctagttcccgggcctcgctcggttccagaactttccagaaaatgccgcgctccctacggctcaagggtcaaatcgcgtcatttccgggaggggacgaaggggtagttctttcacctcggctgggcgcctagaaaagcctagaaacagctccttttttcttccgcctccgagtcttcgcgtcagcgtcctgcgcagggcccttggggcgaatcgcggtgcgcgtcggggcgaccgccctccctccctgggaggggcgagggggctagcggcgaccgctggggcgagcgcgcctgcgcgctgggtgattttttcacgtgtcgccagggccggactgcgagtctctttgcggcgctacactagagcagagtacgagtctgaggcggagggagtaatggtgagtcccgcgtggccccgaggcctgcaggcccgggcctgtctgaggcgtacggggatccctgacgcccctcttttgttgggctgggcgggagggattggtggccactcagtgaccagcgcccgatggcaccttggagcggcaaggcccgcccgacccttttctcccccagggctctttgcacgcgcgtgtgctgccggtgtgtaaggcaggggggcgagaacccgggcgcacgcgcagcgtctcacctgcttctgcagggcctttgtggatgtgtaatatcttgggtaaaaatcatggtgccaggcagggagcttgacccagcgtttcctgaaaatttctggaaaaacctgaagaaggaaaacatttgaccttggaataaactaaggttgaccttaaagctggtctggttgctcaccggaggagcgacaacgacccctaacagacgtaaggaatcgggaattaaacttggaatattggttagtacattcaaatgcgcttccttaacgaataagctgaggtttggtgttaactttcaaagccaaaacgtgttgagatgtatagcacggtggcgttgcctgttgataatgtgattacatttagtttttgtttcaaaacatttctcttcctacaggcaggacaagcgtttagaaagtttcttccactctttgaccgagtattggttgaaaggagtgctgctgaaactgtaaccaaaggaggcattatgcttccagaaaaatctcaaggaaaagtattgcaagcaacagtagtcgctgttggatcgggttctaaaggaaaggtaaatgggagctgcagtggaactattttttatagtgtgcagtggagggaaaagaagtaattctggagtattaaaagtcgcttattaagtagagtttatgtcgttttcaagatcattaactgctttggttctaatctgtttcttaaagggaaatgactaatataaagttgcttattttatatgaccaatgctatgatgcttattttatgtgatagtttcagagtattaaaaattgtcctcaataggccgggtgcggtggctctcgcctgtaatctcagcactttgggaggccgaggtgtgcggatcacaaggtcaggagttcaagaccagcctgaccaacatggtgaaaccccgtctctactaaagatacaaaaattagccgggtgtggtggcatgcgcctgtaatccc

SEQ ID NO: 98022 - DNA, 1271 bp, Homo sapiens
taactaaagttagcttttccagaatattttcttgaacttttacgttggagtcaggttttagtttaagccactgtgtattatttcaaagtgtaactacagtggtatttttgagtgaagatctgtaattctagtatgagtcgtatcacttagccacgaaatatatttttaatataattggatttgagtgaccatgtttcattagttgtagtgatttaaaagttaactgtttatgttgggtgaactagatatctttgctaataaacatccttccttttttaagggtggagagattcaaccagttagcgtgaaagttggagataaagttcttctcccagaatatggaggcaccaaagtagttctagatgacaaggtgtgtaaacttaataattctaaaaagaagtcagatatttgcaattagttgtcttaactaatggtttttttcacttgcaggattatttcctatttagagatggtgacattcttggaaagtacgtagactgaaataagtcactattgaaatggcatcaacatgatgctgcccattccactgaagttctgaaatctttcgtcatgtaaataatttccatatttctcttttataataaactaatgataactaatgacatccagtgtctccaaaattgtttccttgtactgatataaacacttccaaataaaaatatgtaaatgagtggttaatctttagttattttaagatgattttagggttttctagtttatgctttttttctgtttttcaagtaacctgcagagaattttgggaaacaggattttctacgtaggtgcattttcacactgaatttagctttattaatacatgattgatactgataccaagccatggatttactttttttttttttttttctgagacggattctcactctgtcacccaggctggagtgcagtggttcaatcttggcttactgcaacctccgccttctgggttcaagtgattctcctccctcagcctccagagtacctgggattacaggcgtgcaccaccatgcccagctaatttttgtgtttttagtagagacaggttttgccatgttgcccaggctagtctcagactcccaaagtgctgggattacaagcgtgagccaccacagcaacattcagatttcaaatataacaagctaacgagttacaggtcttaaggtgttcaatactttgtggatacaggtcttcattcctaactccaatttatataaatacagagcattttttgcatggtttaatgtatactg

SEQ ID NO: 98023 - DNA, 1076 bp, Homo sapiens
aaatcctgtatctacaaaatatggaaaagttagcccggcgtgatggcgtgtgcctgtagtcccagctcctcaggaggctgaggtgggaggattgcttgagcccaggaggtggatattgcagtgatctgagattgtgccactgtactccagcctgggtgatgcagtgagaccctgtttcaaaaaaaaaaaaaaaaaaaagaaattatggtttgcaattttgatccaagttccagtcctgacaaatacaatatctgcatttatgtagtagattctatccaaatgaagttgaattgaaggataaataagtaagggtaacctactttttttcttagttactgattatgattctatacttggtttcctatttagtgtataacccaagttgaaccacaagagcagttatgtattaacaaattatatgtacttaacataagatttaccaggtgatataatttaattaaccataagaacttctttgtttttagtatattcaacagaacataagagcagattgctccaatattgacaaaattcttgaaccacctgaaggccaagatgaaggtgtgtggaagtatgaacatttaaggtaggaccttacatcaaaatactaatagtacctctcacaaaactagctttcatattaatgataattatgaattgtaaaatttactatgtaactgcagactaagaagccaaattttaaagctttggcattttcagtgtcacaaggttctcagctttcttcactggttgtttccaggtcaaattatgctgcagagtcactcattttgaaaggtggtttatttcagagttgataatttggacctgcctctgcacctctcttcttttcttttcttttttttttttttttttgagatggggtctcactctcttgcccacgttggagtgcagtggtgtaatcactgcttactgtgcctctacctcttaggctcaagtgatcctcccacttcagcttccagagtagctgggactacaggtgtgtgccagcatgcctcactaattttttaattttttgtagagacaggatctgattgtgttgcccaggctagtctcaa

SEQ ID NO: 98024 - DNA, 1053 bp, Homo sapiens
tagttgttttttccttctggttgactccctggtttgtttctagactgctttccccttgatgttgctccctgtctgccctcaggaggactggatgaggacaattactttgcagttttatttttcctttaataaatttactgagttgccatgagacagtgtttcattgtttctttttttcattgtttctgataaatggaacagaataagtcagatttattaaaatataaggaaactttgatatttcatgttaaaattcaaaggtgatctgggagaaagttctttagagggctgctagattgataatagagtgctagggacataataaggaatattgtttaggatataagaaggcatccctggagataccagagataaatcaggattcttcttgtctgtaattgttgttttcttgtaggtacgatgttgggaataaaaatgggagactggtttatgtatcatctagaattgtgatatggttcaaggggataataaaccttacttattaatataacattatattttacaagcattcggaaattgtaaggaacttttttcttagaacatgctcatgtctttggaataaggtatacccatataatgaatatatctaacttaagagagagctctttgttgatgcatttctatattctttcttttgtagtgtcctgctatagactatactagacacacacttgatggtgctgcatgtcttctgaatagcaataaatattttcccagcaggtaatcgaaacttttaaacatagtgttaaacattttagagttaatttataagattggtattttaggggggaggggggagggatagtattaggagctatacctaatgctaaatgatgagttaatgggtgcagcacaccaacatggcacatgtatacatatgttacaaacctgcacgttgtgcacatgtaccctaaaacttaaagtataaataataataaaataaaagattagtattttaaaagtaaaattaggttgctcgttaatgcatttttgtatttttttttttagctgttgtattttggcttgtttatt

SEQ ID NO: 98025 - DNA, 1398 bp, Homo sapiens
gatgatccacctgccttggcctcccaaagtgctgggattacaggcgtgagccaccacacctggccttaatttctaaaaaaaaaaaaaaaaaaaagaaaagaaaaggaaagaataacctagttctgtaaaataaaacaataattcctttcaggagttttcaatcgcctctagtggacaatgtattaatgttggaaatagatgttatagtaaattttgaaatgtcagggatttattctaactgcattaaacttttacaaagtttcaaaactataatgctgaatttaagttaggccctgtgattaggtagaaagaacactggcctagaactgaggagcaggggctccaggcatttactcgcagtgtgaccttggagtagtcgcttattttccctaggtgtcagtttctacacttgtaagcgagaaattggactatattgttcctaagattctatccagttctaagaatctatggtttcttttctacttctagggttagcataaaggaatcatctgtagcgaaactaggatcagtatgccgtaggatttacagaatattttcacatgcttattttcatcatcggcagatatttgatgaatatgaagtaagtatatttcactgattatcttgatgcattcttatcagtgtaacagtaatatatattgatgttatttctagtcttttagtttgggatagtgaattaaaataacatttttgtcttcctctctacagaatgaaacatttttgtgtcatcggtttactaagtttgtgatgaaatacaatttgatgtccaaggataacctgattgtaccaattttagaagaggaagtacagaattcagtttctggggaaagtgaagcatgaagggaatcataggaaaaatgtactgatcatataattaacattatgtactgtatatatcattttagacacatcaatcatgtatccatattatagcttctttgtttagtataggtttttgtatgctgggtttgccttttaaaatgggaaatactttttaagttattcataagctgtatattcaccagtgtggcactcatggtttttaaataagattagtattatctgtttataatgcctgttaataaaagaatttacagtttggtaaaattgctgctaaacaatcattggatcacaatcctcatcagacaaacccatctgtaaaaaaaatgagggagagcttgaggtttcacacaagccatttactaaagaggtagaaatgttttctattggttttaccttgagtttagatatcctaaaaaattctgtagtacgtagttttgtcttacctgttaactttccccaattgagataaaagtgttttaaaattctgtttatagtttttgatatgcatatataattatgtgtatatctaaatac

SEQ ID NO: 98026 - DNA, 1058 bp, Homo sapiens
taccatagtatttattttacaccccctctcccacgaagtttatgtttggattacatgcacgtgtgagattatttgcaataattcataggttccaagggtgttgatgaatagtcatacatttttttggactttgttataattcattgtggtaagaatgattgaaatgcagatttaacaatcttataatctattgaatgccatttttgataaagcactggaggtcttattgccaaactgattgtaatgaggcagtaagggtgaaaacattgtacatgttgtgaagaaagtatttaaatccaacttttgaacagatttaacaaacatgaggaacttttttatttagaaggataattttgaagatgaaaatgtattcatcttaattgttttttcaaatttaagggaataatttataccatcttttcagacaagaatgtacagcaaaaataaggggaacagtagtatactgagagtgtgtgtatgtatagtgtatgcctttccaagcttgccagtctttttggctttgaacactgcccatcagctacagtcattactgttccccaacccacaactatcttttaagaagtcttagttcacagtgaaaggaatgatgactttgaaattatggatttatattaatggcactataaaccaatggtaatggtaatttttaaacttgctaaatattgagaaactaaactactaagttaataaattatatatagcagtgtagctgttctctctagatggtgtctcacaatggatttctgttgcttgactattttcttagtgaatatttatactaaggtagtgactgagatttggtgatctggctgagtattttgaaacacattttgaataatatggcttagtgttaacggggacttaaatatgatttttttttcttactcatttcaccttccctgtactgtatgtttggaattgatcataaaacatctccaaaagaaaataatcagtttgtagtcttgcttttgtattcatgttgataatcttactaattgtgaagttgattcactactatactaggtaagacctaagtg

SEQ ID NO: 98027 - DNA, 1050 bp, Homo sapiens
cctacccagccttctgcactacctgcttccctagtgagccagggttggtggggccgtcagttcgtgctcaggcagaggattatgctctggtgagcgcagtggccactttgccaaagcaggtagcagaccactatgataactttcggatatataaggctctggaggccgtgtccagctgtgtccggcaaactaatggttttgtccaaaggcatgcaccatggaagctgaactgggagagcccagtggatgctccctggctgggtactgtgcttcatgtggccttggaatgtttgcgagtctttgggactttgctgcagcctgtcaccccaagcctagctgacaagctgctgtctaggctgggggtctctgcctcagagaggagtcttggagagctctatttcttgcctcgattctatggacatccatgcccttttgaagggaggaggctgggacctgaaactgggcttttgtttccaagactagaccagtccaggacttggctggtgaaagcccaccggacctagaaactcagttcttaccggcttgtggtaaaaaagcaaatgtgttatctttttattttttattttcaggaaagttatactagtattttcttaagtgtggaatcaaatgagcacataagctgtgtccctgtgaaaagaggtttgtagcctttcaggtgcctgctcctattcatttctctgtgaccattgatcactgtcctttgtgcattgtgtgtctaagatgtcttcaggggaaagatgggtaagagacagtgttgctaatgctgttccttctttgtgcctccttccaaaccacagttatttgcccaaactacctctcgtggctggtttttcattggcctggcctctgcttctcaggctaattagtgactcctttctttgagggtcagggttggaggccccttactggtggttttacagggggatcctactttgttacacatgttgggtttcctgataaaaagagagtattttattaaacccttgaaccagtgtcctagaccagatgatttttgcccatgtgtatccc

SEQ ID NO: 98028 - DNA, 1064 bp, Homo sapiens
atgatggcttagctttggtgcagaggcctgactttccaaagacagggtattttaaatggaggaatgtgtggtaagttggatctgacttctgcggtgatcctgaagatgaaccagttggattctctataggaggcacaatagatacagcaaatattctttgaataattagtgatgtgtttgagttggtccagaagtttaagaatagcaaatggagaatacgtgaaaactgaaggggatgtacttccaagagggggcatcctaaccacttctggtagaaaatgatacacttgtagaattccctactctagcactgttaatacttttatctggcattttctggattccttcgccagaaagtaactgtcttccaaatactatccttgaagtcctcaaatattcattttggtgtgttcctggaagcagcgttgcaggaggtgaaagaccactgcctagatcaggtattcatggatgtcacattaggagagtaataaaaagacgtcaactcactcagcagactataatcctctctgtgaagtcatgtgagaagtgggcaatgcacattttaagttgccccattatatactggagggctgtttcacaagtgaactcatagattagacagaagacctatggctataagaaggagcataagaaatagatataatctctgattttattgaaacctcagtttattctgcatgtagacctcattatttctcttaagaatctgtggactttgtagggtctatgaagagcccaataaattgaatatgaagttgatgtcagagtacttaagaagggcctaggctggaacatgggccctgggacactggtcttcccccttccccccaccccccaaggtggttgtacctgtgattgggacttaggttagctctttagctctgggaaatgtcaaaactgaagtgaaaccagtagttggtcaggttgtgagccctcaatgaggatgacatcatcatgaagtgagacctggagtgctggtgggtccttgccttgtcttttgtcagaaagtgaatatcaatggacctaaaagggtgtagacatat

SEQ ID NO: 98029 - DNA, 1048 bp, Homo sapiens
tagaaataatatatcctctaccatgcctcttctgatgagtaccacttgggaggttcagccatacttggatgttcaccaaggtaagcaaggcatagtacatatgtttcatccttggccttgagctgaattgtacccccttagctaatggcacagtttactcaccatggattttaaagtccactgctcctcacttaagaacaggatggtgtgagatgttcaagatgtttcaggaaaccaagtgtgccatctgcaagaagaaaattatagctccaaggagggatgagccctgcccttgagtcacttctggatgaaacatctgcagagggcctgactcactgggtaagctgaagggacagacccaggaataactatggaaatggaggatgcctttcttagattatgatgtgggagaaatggtactaacacctctgtgctactgctattaaggccatgccttgtacatgtaccctcattagttgagaatcaattgtttatgggatttaacatgatgatgaagcttcaaaaactagataatgattgttataggttggtatcatcatattattcttttaatacattccataaaaatatgaccaattacacattttttcctgattgtatatttttggaacacattaaataaaatagcttcagtagtttggcttcctttgaaaccagtctagaagcttctattggttaaaaagctatagatattaaaaatataaagttaataaacatggtatacatcttagattaatcacaaaataatacaaatggaatgtatttctttcaagccagatgaaaagagaagtgaaagaaaacaatccaacagaagccaggaaggaacaatgcaatagaagacaggtaggagaaaaaagaggcaaagaaaaaggaaaaatattgtaaatagaaagcccaaaataaaatggcagaaataaatacaaatatgtcagtaattgtaataaaataaaacttcatgagtcttctgtcaaaagacaaaactattcaaaattaaatttaaaaagcaatatatgtagttaaaagggat

SEQ ID NO: 98030 - DNA, 1042 bp, Homo sapiens
ttgctgcatttatgttcatttttccttagacataaggaaatagacaacattaggatattaaatatgttactttaattgaaagctattctcacagacagttggaaatagcctgaataaaataatgctaacaggttaactgaagtcagtatgtgggtacctatatagggcaggaaaaatttacacgtattagtatcttttaaaatactatgcgtaatagttcagatactaataaggattttaggaaatttcttttatgtgttgctacaaatatataaatgaatattgtgtagctttattttggtatcaaaattagacatgttaaaagcaaagatcctgagtgtgattagcaattaatacacattgtattaaaatcatctcaaattgttaatgaatactttaaaattatcatcctttagatgttttctccaaaacatcaaaggaaaaaaaggtatgctttttaggcaatactttttatagtaatgaaacgtttatatactatcattgtgttgtttcacagctgtatgaggttaaagatgaaagtttagtctcggtatcttcattcatttttataccatgatttataaaaatgatgttgataattaaaagttaaagcattgatcttttgtagttattaaaggtatttttgctatcatggatatgttatattacaaaataagagccaaatatcacaatttaagcagagtaagttttttggggggaatacattaataaattttcctaccatctctgttcttctgtactttatagtttggagtgagaaataaagtaatatataatatttgtagaactgaacgaaagtaatgtggaagcacatcaatacattttggtaaagagccaattgcctaaaatagctaagaaaaacacttcgatatcaatctttcttgaactaatatacaatgactctcagactcttaaaatttacagatggtgtggaacaaaaatgccttgttgtacacttgaataagcctgaataataaatataggattaacatgtatgctgaaaacatcagacaagctgaat

SEQ ID NO: 98031 - DNA, 1003 bp, Homo sapiens
gtattttaaaatattgaatcttcctatccatgaacatgatacatctctccatttatttgtcttattttacttctatccataaaaaagttttctttctccataaaaaagcgtgacacattttgtcaaatttattcttagtagactatagttttgttgctttaatgaatgctgttttttaaataacatttcctaatagattgtagctggtgtatagtaatgctcttgatttttcaatagtgataatctatcagtaaccctgccaaactctcatttacacaattatttatgattcagtgtacttctatttctttcacttctttttttcctggagtttttgcactgaccatgtctctgctacagtattgatgtagtgaaaacatcatgaccttgttcttgaaaaagggagcaatttcagtgattcaccattaaactttacatgtatgcatgcatgtatacatacatatatagacacacacacgcatactttgtaagtgggaagatactcttaaccagactttctcaatcttagcactgttgacattttgagccagattatttctttgctgtgaaggtctgtcctgtgcactgtaggatgtttagaagtatccctaggctccccatagttatgataatcaaaaatgtctcccaacattgccagatgttccctataggacaaaatcactcatggttgagagttactgccctaaatcaattaaggaagccattttctaccatgtttgttaagagtttttaatcataaaaaggtatggaattttaacaaatgcattttctgtctctgttgaaattaccattttttctcctttaatctattaatatgggaaattacattattattttctaatgttaatcagtgatacagttttattagcataccatagtctgtgaattgtacaaaactgtgatacttttcctcagtttcgggggtgcaaacattaaacaaaacaatataagttagatcccacattagacactgaattttaat

SEQ ID NO: 98032 - DNA, 1034 bp, Homo sapiens
gcaggagcgcaccggtgcctagcggctggactccgctgccgggcgtcccgctttcccccggggagccctaaacgctccaggccatggccgagggcgcggccggcagggaggatccggcgccgcccgacgcggcggggggcgaagacgacccccgagtgggcccggatgccgccggggactgcgtgacggcggcctctgggggccggatgagggaccgtcgcagcggggtcgcactgccaggcgccgcggggaccccagcggacagcgaggcgggcctcctggaggcagcacgggcgaccccccggcgcagcagcatcatcaaggtaagcaaagccgcgccgcaccgggagcgtggctgtgggtgatgggtgggtcagggacccgggcaggatgtgcggtgtccggaggcatccgggctcagcattgttttctcccacctccttcaacgccaaaccttccttccttatccggaggttcccagactcagctgtcagccacgagacgcacaagtgactttttctccccactgacggcagaggaaaagttccgctctgcgtctttgcgttctgatggatgctttccctcattttctctgcaagcttcactaaaccgttgatggagggaggaagggagaactctggataaatgcagacccaccggatggttgtgcattgctttccaatgaagggttagcttttcccatacaatgaagaaaatgcacagcttactctcaagtgtaaaaaaagaatccctctagacttaaatgatcccgaaatcccaagatgtgtgaactttcccggtagggaggcagagttttaagtggaccctgcatcacagtaaagagcaatgcaagagcccagagtttttgcgctgcagaaagcacaaccggaaagcaatcaatcccccaagcattatcactggtccttgtggttaccaccacatccagggaaaacgcttcctgacccgctaatcacctcacagaatttctctccatccatttggcaaggaatttgtaaacctctttcctccccttt

SEQ ID NO: 98033 - DNA, 1029 bp, Homo sapiens
atatatttaatgatgtagtattcaggtctaaaaaatgaacaaaatacttttaaggtgttatgtttcaaatcaaatgtgggttttgtgatataattttctttgtgacttatagtccttttttgcttaatgaaaataaatcaaaagaacttgggcctatcactcagaaagcaaatgaagtgaagaaactgacactttaatgattaagttgactaaagtgtcacagcttttagtgaggtaatttcttgattaaagaaatgatgtttttcagctttcagaaggaggctagactttcctttccagatgatatcaaaatctgataacaattccttgatttattcaggccaatttctgtgttttgaagtaaagccacttatctggcatttttcattaaggcttgacaacagctggctgcttcccagaatgcagtgctgtgacagagattatgttataaagccatggatcagctgcctttgtaatttgcttaaattgattatgtgtacatttcttcactctctggacttaaaagaagcctgcatttgggtgaggaaacagtattattatttcaatgacaaaagaccatgtctattacgccatattacacatagacacactgccttttccattgtgctctaatagtatttttagtttcaatctttttggaaagttattttaaatactatgatttctatttcggctgaattttgtagctttaatcaaataattaaagaagcaatatttaagatcagaaaagcattatttaaatgatgaaagtatacagtcttaggaaagtagttgatttttatttgtcctttctgtatgttaatatctgatacagatacttgctgatatgctttttaagttaaaaaaaaactaataagtaatcattatctaaagttgcagggagcccatatcttgctgaaagttctacaagaattccaagcactgagattaaactagacatctataccaataagtttagataccttgtttaaaaacaaatgttgccctagaagtacactagcaaagtac

SEQ ID NO: 98034 - DNA, 1042 bp, Homo sapiens
caaacaacatgagttgagacacttgaaaaatgtgaactccattcctggtatactgaaagccatgtaaccacaaattcttgttggttttaatatgaatatcctatttcacaaaccccaaatagtgaggttagagagagaatactcactaccctgaatatggaaaaattaatgcagctgaattattagtaagggcagatctagttgctgaaatgcaaataggtcaacagcaagttaatacaatccaacagagattcaaaattcttggtttgaaaggagtcccatatgctactgaaatagcatcataattttctgatagctaagacaagtggaagcggtagtggtagaattagtgcccatgttgctctaatttctatacaatgggttacgcttttgtcagtcaccaggttgatttagacatctgttggtaatagtggtaaagacacaattttaacagtcaacaaatacttattgaatgccaactatgtgtcaagcactgtggtaggtgctgggaatgtgaggggtggtagataaaaagggaactaaggcacttgcttattcttgtggaattaacaaacctactgagggttatccagatatggaaacagtcatattgtgcttcaggcattacttgagatatacacagaatgcagtgtggcctagagagggcagctactcctgccctactgtgagtgagagaaggtttgcccaaaaagaatgtatttgaattggacctttgcaagtgattaggattttgttgggctaagaaggaggaggcagaaagagcatgcaggcacaagaggagtgtttccaaagtccaggaggtttgataactcacctgggactggaaggtaagttgatttggctggatccgcgtgaagtataacattattgcatgtaagccttgtcttagtttgggctgctataacaaagttccatataggcttggtggcttataaaccataggaatttatttcccacagttttggagactagaagtgcaagatcagggtgccgacatagtcaagttctggtgaggaccatc

SEQ ID NO: 98035 - DNA, 1029 bp, Homo sapiens
aataaacgacactgccgaaaaaaaaaaaagtgaagtgaaaacaatcagggcacattaaaatgatacaagtcaaataaatcttaaagacacaatgcacacttaaaatgactcaataaaatgacttgctacgttccgttattcaatttgtcattactgtagtgaacagatgcatttctgtggaattccaaataagtaaaactgaaattcagtgcagagaaaactttgtccactagtgcaagtcttgatcaaatgacattttgacattggacatatggaattcatagtatgagccacattttgttgtgaaatttatttacctgcttgtggcttcaaatctgaaaattaataagcctgctcgtttaaaagttgtttgttgttgctgtttttttgtctttttgttttttactagaaaatagttcagtgtaatattaagttagaaaagaagttgctgcccagttaaaggggctccctctcaaataaatctccatccttccctctcccaaaagacatttctgatttctgcttcactttgggcttcctcttcttcgtacacattccatctacctaatcaaacattttcagtccctgatctctcctgtcccttttcctgggatgacagccctaacaagaactgtttttgaatcgttgtgcagctccaggcaatagagtatgtgaagcgatttcagtagaatcacttactcatcctaaaagaaaacattatcccagttacctacatcgcaattaccttatgtaaagcagaactaatgctgactggatgtttaatgggatgagcattaaagctgcaatctactatagtactccagatctctttcggcttcctatgagaaacaccagaagcattactttccacttctacttacagtaattgcaagaggagacctcacattcaggactggcctagtgaacgtaatccatgctttaaactggccattaaacagtcccacatggttggattttttttttttttttgagttgtgctttcacaaaaccttgtcaaagacctcatgc

SEQ ID NO: 98036 - DNA, 1109 bp, Homo sapiens
aattcagtgttgtttacacctagacaatttttcttttttagaatttgctgtcctgttatgcatatttgtttatcttcactcttagcatgaaatgctgcccagttgggtaattttaaaaaattgtagctgactgacacaaattactttttctgagaacagatgactataatcttgctaatcttttacagagaaactgcaattgagaatatattctataggcagggtgatacgatatctaacaagaggaaagattcttgggcattggtataaccacctatgtggtcaggggttggtttttagagtcagactgtttcactatctccccacgttggcaggaacaattttgacagaaaaagatgtactgtgatggcactggaccgcagtcaaggccccctcagctcctctacactctgcaggttaatgcaagcgacctcctctctctacagggctggctgtgtgaactgctccgctggaaggagaacccaagcccagaaaaccgcaccctctgggaaaacctctgtaccatccgtcgcttcctgaaccttccccagcatgagagggatgtcatctatgaggaggagtcaaggcatcaccacagcgaacgcatgcaacacgtggtccagcttccccctgagccggtgcaggtcagtgtccccgaccgccgtaccccacctgatcagggctctgtgtgccagcagtagctgctgagggtccaagtggcacacaccacaccaacttctgtcagagggtgtctcatgccaggtccccaagtacagaagacgctgtcgtcacagtgggtactgtgtgtatgtgtatgtgtgtgtgtgtgcatgtgcgtgcgtgtgtgtgtgtgtatgcacacacaaagaaaaatgactgagaagttgaatgccaaagacagctgctttcctgagatcattttacttgtgggattgtaaagccagagcgctcacggagaattaaatctctcgatcggaaaacatggtttccatcagttcattttctataaaaaacctgtgaagtagttttgcatccaaaatccctcaaagaatgtttgattagactgaggaaaagaaatagccacatgacctagggaataccattgaact

SEQ ID NO: 98037 - DNA, 1029 bp, Homo sapiens
tgtcaccttatattttgtgttcctggatttgtgcttcatggttataccaagagcaaatcgtgtgtgttcattttgtcaccttatattttgtgttcctggatttgtgcttcatggttataccaagaacaaatcgtgtatgtgtgtgtgtgtgtgtgtgtgtgtataaaataaaataatatgtaaacatttacaaataaacctggaactgttagaaaagaaaaccctgcccagtttttcatgtttaagatttccagatgaaaaacttaaattcataataaataacatttcaaatgtcagttctccaaagagaaactattaattaccctgttatggctgattcattgtcaccatatcatttgatgatgtaaaataacacagttaagagaatagagccatattttcaagagcttctttttagtttatttttattttaataaatatgtcttttaagaatataaaatgtatttgtttgataaaatgatgccctatccacactttatgacaaggtcatggcatctgctggagtcagagatagacagccttttgccaatattttattatttatttatttttatccttacatttctcttttggtttgctaacagaaacatacatggtctaaactaggaacataaaattgagtcacttgttctggggtagggatacagcacattagaggtcatgcaatgccaggatatgggatctccagcatgagcctgagactaacgtgtttctagacacagggtgtggctgagccttgtgtcctgtctgtgccattaggtcattatgaccttatgtaaaataagtaaaatacattctgagtatcaccactcttttttttttttttttagctagtcttttgaaagatgagattagccctgctttctgtctctgaagacttttatggcaaatgagacccagtgaaaacagtaaggtgaaagtgataaggcattttctgacctggtcattaatattcaggcaatcccatgatacatttctaagcactttaacctgtggccacaaagtgag

SEQ ID NO: 98038 - DNA, 1057 bp, Homo sapiens
aaatcatattttataaaaatagcatctcttgtattgcaaatgactatttttcttggatgagtgggatgacaaactcaaaagagaccccttgggccctcgcaaagtcttggagaagcagttttacttcccttccttcacttagaccccattctttagcatttcttctgaagctcccacaagacccaagaatggctgctgcagtgtctcctcttcagtcagggaccctggttgaggtttgtgtattgttcattattgctctgttttgcagttgttcaaagttggaagacttgcctgcggagcagtggaaccatgccacagtccgcaatgccttaaaggaactgctcaaagagatgaaccagagcacattagccaaagaatgccctctctcccaggtcagtatcttcaggtgggggtctgggaaacagaagaagccattggtagactctctatcagggggttccttctgcttaaacaactgtcttctctgtcttttatttatagacttaaactgcatttgaggtgtaaaagattatgttgcttctggttgtagaatagaagttatagcttattaaccgggcatggggtagctcatgcctgcagtcccagcactttgggaggctgaggcaggctgattgcttgagctcaggagtttgaaaccagcctgggtaacatggcgaaaccccatctctacaaagaatacaaaagttagctgggcgtggtgacatgtgcctgtagtcccagctactcaggaggctgagctgggaggattgcttcagactgggaggtggagattgcagtcagccaagatcacaccactgtactctagcctgggtgacagagtgagaccctgggtggttcttaaaaaaaaaaaaattagcatttattgagactgggtaaggagagagtattaaaacaatttacgtatacgggccaggcatggtggctcacacctgtaatcctagcactttgggaggccgaggccagaggattccttgagccttggagttcgagaccagcctgggcaacatagcaagatagcgagaccctgtctctaaaa

SEQ ID NO: 98039 - DNA, 1044 bp, Homo sapiens
acatgctgtcaagaaagccaaggttgaacttctaaagtcatggaatgcaggtacatctttctaattgaccatctttagcataaacttactccttagaaataagttgttttattctgtggggagaatggattattttcagggcactgggggtgccatttagaaaattctctctcttagtgcgtttaatagtttcctggaagatatgtgttgacttctgctgaagggtaatatattcatagtaaaactgactaaggattctttttacttcccactggcctaaaaacagtgtgttctaggcctctgtggtggtggaaggtgaagactcaaaatctggatgttgtgagttgaagcacttctcaaaggacctgtgtccctaagctgccacagtcatttgtttgtcttgaattttaaaagggctttgaaatgtgtggaaccaaaatagttctgtttgtagtactggtgattctgggaaaacgagagcatggttgtctgtgtgggagagagctgatgtgggtcgattaccagtggcactgtatcgtgttggttttgctctgcagtgatgggtttctcactgagctgcccagaatcactcactcgatgccttttgggatcgatgacatttgatttgtaatgagtgggcaggaatgggagtggagaccagatctttgggtcaaagagggaaaaaaggaactccgtacagcagatcatagtctcttttgcatctgattccagcctgatgaattctcacacacagggggcattattctatataactaagacttgtattagatgctttatgtaatgctttctttttgggtacattttctattacgtgtaacaaaacattgactgaaagtgtttatttaataagagttaaaatttactaaaccaaatcaaacaaatcgaattgttcaaaaatgtttggatgtagaagcaaaccacgttaagatttgaaaataaattcacattttacattagtttttaaaataaaactaataaactaataaaatgtgaaaaaatttcacattttatattagtttttaa

SEQ ID NO: 98040 - DNA, 1006 bp, Homo sapiens
cctggctaatttttgtatttttagtaaagatggggtttcaccatgttggccaggctggtcttgaactcctgacctcaggtgatccgcccacctcggcctcccaaagtgttgggattacaggcgtgagcctccgtgcctggccgacaattttattttaaaacaaacgtgcttagcaaataagcaaaaatcctttctgactggattttttttaaggtcaaaattatatgtttaagaaggggtatattaattgtcactgtttcttatttatattggagtaattacattcatgcagtcatttaaataatgtttctaaaacacagaaaaggtgtctttaataaatgttatgtgaatcaagcagggtgccaagtacattctcagtgatataaaattccacatatatgcatggaagaaggatgaaggcaatgtattagaataatcagcagagtaggtgatgggattatgtgggattttcttctttttctaataaaaaaagtaaatatcaaattttacttccttcatgaattctttgaataaatgggaagataattatgtcttattccccaattttgataagctgttcacttcatccctaatttatccacaaatgtgaaaatttatacatgatacagatgtatttctgttttttcagtggaagattaaaaaaagaatcaataaatcgttaatgagcccctgtaatgtataaaccaagggatttcttagagttggtttttttctttctttctttcttttttttttttttttttgagacagagtcttgatgtgtatcccaggctgcagtgcattggcacaatcatagcttactgcagccttgaacttttgggttcaagcaatcttcctgcctcagcctcctgagtagctgggtggccatgccaccatgcccagcctaatttttactttattttttgtagagacgaagtatccttatgttgcctcaggtgattctcctgcttcagcctcccaaagtggtgggattaaaggtgtgagc

SEQ ID NO: 98041 - DNA, 1025 bp, Homo sapiens
ccatgtccctcttccccaagtaaacagcaattaaatagtcaaggttttaaaagggtttctttagtttaaaaaaaggagtagttattttaggtgaatttaacaattttccattagttcacattgcaaaatagtgctttggtattaacaaggaagttctgtgaggctgataatgtagtgaaaatatttttcttttctgtccctctcccctgtatacaagaaaaccctgtggtaaaattttttaataaaaccattttgcatgacagttgaaacttataaatcagttgctattcttctttattagaagctgagagacaaacatgttttaagttttttgtcacctgtaattgtaacattgactagaaaggaagaaattggaatcttaatattaagtcattacgtgactgaatttttcagtattgtttattttggaaaataaactgtgatccttaatatgatctttttgatgtattaatactatgttaaagttgagttattataggaatctaattacatgttaagtgggaaattagaaagcactaaagaaaccttgcaatgataaattgtcttcatccgaaaaccagaaggtattcagagtgaaggtgcctgtcaggagagaagcattcctagagtctccattcagacatctccattcagatgttgccctttagatttgggaaatgtggtattagaacaccccaaaccctttagtatcgacggagtataagaagagcaaattgttccctgaataggaagttattacacctttaataaccaggtaaagtcactttacaagggtaaataaggtgatcctgacttttttccttctcaaatgaatctctaggtaatatgcagcaaaactacctctatttacagcctctttcatatggcaagtttgagccttaagcacgtttttacagctaacttataaactcccccaaaactggggcttaccattgaaagtctgccaacactgttacaaatggtcattagttcccaagaaactttgaggaggaaaagaactgtat

SEQ ID NO: 98042 - DNA, 1186 bp, Homo sapiens
tttagtcttggagaagatgcagaaaaactgaagtgcttttcgcatactttgttgtgtttattagctaaaatctgttttagggagagaccatttggctctcattcttccctgggaagttcaaagaggagcccatggaaagtggttgcccaggagacattacaaatgaccattgactttgtcttcatacacagtttgaccaggaaaatcccattttcttaaattctacctgaggtggaactactctctccccctcctttttttttgtctctgtaaatggaagtcagaagtaatgaatgttcctcttgttacaaagcccagccaagtaagggttagatggggttcctaggcctgctgttcttcctcttcccaaagtccaaactaggctgaaggggagagagttgaggctgaataatgagcaccctcatttcttctcagcacacaccggggtaacctgagttgctctgtgggcacatcacctgaggtgtactcacctgactgtcacctgaaatgcagaggctcttgcttcgacctgcaatcctctgaattatgaaatcgatgtccttaacattgctgagactctggctctcattccacagagctatgctttcagcaactccgaatgaaccgccaggcagcaggggctgcctggggctcgttttgcctcactctgggctgtatttgttactctattaatagaaactgtgagctcctgaagaaacctaggtggtgacggtggagttcacccgggaaccttgacttagggtggggatacctgaggtggggataactcgggttacccccatgtgtggtggggatactaaaactgcagataatgtcggccatcagagtagtcagagctccaggttttactcagttgacagacttaggggggaatatttctttcatctgtcgctgagtttcttggatttaatatttaaaaaccttcctgaggtgacaaaatgaaagaaacaagataggcagtacatcctcctggtggaggtctcataatttcagaactctcccgagcatttatcatcccttttagagtgggatgtatatcaaacagccccaaaaaagcttttttaaaaaagttatttaatccatagagcctagttaatagtgccttcattaaaatgcttttgtcagcaaagggttttcagttttaacatttgcgtaacctaacagt

SEQ ID NO: 98043 - DNA, 1026 bp, Homo sapiens
gaattggcagagtattaaggctccagctgagaccagtgtgaattttttccacaagctcaggtgtgcaaaaaataccacgttatttttttaaaggcaatttaaaattaattctaaacctcaagttaatgagggtggagggtaatccattctcagtcattattgggactcccagagttgtccaaaagccacaggtattgtggagcccccttttgacattcagatataaattatcaatcagctcataatgcttactgctgaaataaccattgctaccaacccttgaccagccctttagatccaataactctgctgcctgcttggggtgtagaaatatgtttctagttagtagttcctgtgcctctagtccagctttcctacatatcctctgatgtcttaccacatctctggtactaacattctgggatctgacaacttctgacctttcccaacaaaagatgtaatatcatggttataactgtgcctggagaagcagataaaaagaaaaatttaaatagtgttctaagccagattggagagagtcgtggagcatatacttaactctaataattcgctaagagatgagctgcaagctagtgggaagtacagaatcctattttgccaaatcaggtaattaagttttgaaaacatttactgtaaaactttataaaatgtgcaatttgaaatatgttagcaacacatttcctgggaaactaaattctagaggatcagcttgagtatagtctcagcagttgacacagcaagcagagctcagctgcagtggattaaggatggctgcaaattctttgacattcctcccatggagaaatggggtctaattccttaatcctttaatctagactggatttagtgacttgcttcatcaatggaatacactcaaataacattttggaatttctgagactgtcataaaaagctgaagggcttctattgggcttcctgaaatgctcccttttggatccctgagcagccatgtgagtttaactactctgcaggagagagtatgtg

SEQ ID NO: 98044 - DNA, 1013 bp, Homo sapiens
ggattcagtaaaggttgtgttgttttgaatcagttgctttttgaattgaaagaagccaagaaagacaagaacatagatgcttttatcaaaagcataagaacaatgtattggctggatggtggtcattctggaggaagcaatacttgggttacttatccagaagtcttgaaagaatttgcacaaacaggaattatcgttcacactcatgtaacaccttaccaagtacgtgatccaatgagatcttggattggaaaggagcacaagaaatttgttcagatacttggggatcttggtatgcaggtgactagccaaattcattttacaaaggaagctccttccatagagaatcacttcagggttcatgaagtattttgagattacaggtatattaatgaacttgttcagtggaagaacataagcacttttgagtgttataaattcagataatgggatgtaattcatagctgcattgtcagttttggggtatggggggaagcacacattcctaaaatgtgagtgtaatgtgcaatagtattttttgcttgtgaatgtgagcagttattaatttggattgagttagaattagttaatttgaaatctaacaaggtggtttgtaataatgctgaggagatataagacccttaaaatgaaagttacaacattgttcttataaaaggtaactaaaattgttactgttggaaataactgattttctgagtaatgttttaaactaatttggtgacattttaacagtaattagctattttgagtggaaatattttcatttctcttcaaacaaaagcaaaggtacgatgctgttttctatcattttggaataactgcaccctgccttttgtgtttttgtaaactccttgactcattctttcatgtgtcaccaagtacttttctcatgagagtcaacatatatttgtttccaaatgtccacaagtgtacaatagtgtaaaggtggtttttaaaaacatagccaggtgtggtggcacgtgcctttagtt

SEQ ID NO: 98045 - DNA, 1039 bp, Homo sapiens
aatttgcttaacactgctacataatttgggtgaagtttccttctgcccgtttttcttgacctagataaatacactttgagaaatccagatctaataaatgtcaaccaacattgacattgtaattgggtgattacaataaaaggtgagcagtttgttgtttattaataattagcttttgcaggtaatgaaatagcagggaagtaacatgctgctttaggactaaaaaaaaaaaaaaaaaaaagacactgaagcttaataccttaatgacccagaagacctagatttataaagccatatagaataaaaatgttaatttcttggtttcttcccagaattatattttaatgactccataaatacattccaaatattcagagattcatgagaaaggattcttaacaaatgtttaaaaataacatttctttttggtgttttaacacttaattttataaactgcagaacagcatctctaaatggctttttttttttttttaaagacaaagtagtattatgttgcttcagtttctttaaatacctcgtttcttttgagaccaaaaattcccatcaaggaaataaatcagcctgattttaacattttacatattacattgcctttaagcactatgattggatggctttttttctatttgtttaataatccttggctaaattcacatgtatctaaaggaaaatagctgagttactgaattctataaggggaagaaaaagcatttattttcacatgattaactgaaatggaaaagtaagacatttagcagaataattcatttaaaaataattttaaaaaatcagacatatttaaaaatctaggttgtctatccagtatgtgaatgcttaattataattgttacatgttgaatgggtattaagagtaagtcaccaggtacacaaaactgccatcatagcaaaatgagacagtgttgaaaagacaaaatattttctggaatgaaaatatattcaagttgatccatattcagatgttttctgtttaatacttcagattggtcctttgtccaca

SEQ ID NO: 98046 - DNA, 1003 bp, Homo sapiens
ttcacctttattcacctgagtaacttacctgtttccaaagacacctaggaaattcagaatgttatatatgcttttccttatttactataatttataggacatgagtggatggattctcttcaatagagaaaatgattttctctaattaaaatgcaccaaattgatgtactaagagattgctttagatgaacacatttatgttcagtgaagattatgtggtcttcaatgacactgcaatataattactaggtacaaaacaaaagcagagatccacacacaatggctcactgtcttcgatgacaacacttttaggatctcatttattcattctttaagtaatttttcttttaaaaaagggataggtggaaaaaatagttgggaaatctttaactaggctaaggtttagacataggtataaattatttattttgtaacattcaaaaaccaaaaaccaccctgacatactgggtggcaagaaaagtcaagatcagattaaacatttgttttgcactaatcacaaaactaataatccaagtcactatcatcaactccagttgatctcagctctgattatgcatcagaacaccctgtgaggtctattaagttcctataccaaatcccaaacactcttgaatcagtctacaaagttgggacctaggtatctgtacattttttaaagttcctcaaaaaattctgcttctaggcaaatgtaatagatattgtgcgttgctcatgtttttcctatcagaaccatgattttaaaaaaactatcctttctgtccccatatatccctcatgtggcctccacttctactctcagctccagtggacctgactgccctaaaggttattctagaccctttgccagtgactggctcagggatggacaggtctaagttactttagagcaatgagacctaaggatatggaaagtgaattctgggaaagctttctcatactaggacagggcccctagaatccagcctgactcttccgctgcatg

SEQ ID NO: 98047 - DNA, 1552 bp, Homo sapiens
tcacaggattaaaagggtttttcctgtgattagtgttccatctttgttatattgtggtattgctttagtattcctctagcacctatattctgaaaatgtttagattcaattgaaaataaagtaaatttcccaataaaaggaaaaaaattaattaggtatataataaagtttactcatcatttccaccaccaaaatatttgctgtagttttgtatactatttataaaggagctgaaagaaatataagatgattataattgcattcaaaatataaaacgaggaggctataatgaatacgaatttaagcaagttagaaaaccaaatcgcagcttgaacaggaagtctttagggacaaaagtattataatgaatcagaaaaggtcaaagatactcctcaagtaattgaaatgttctgtgtaccaaaaaataaacactttgatgtggttgtatgactcaggaagtataaacaagtaacacaaaacacagccctagattagagaactgcaaaacaaatatatctttattatgtctttcaagtttaaaggaaaaattgctatttctaaaggttttaaaagtaagggttgtgctattgacactttaaatttgttggcaattcataaaagttaaaatgattctgttaaaagcctggagtgtgctaacgaagggatctggttacaagaattatttcttacattggctatatgcaattcgtgatatttcactgacattttgggtttttttttaactgtaggttttatttttaacttgttttttaaactttctccagctttatggttccataatgtaatttctgaagagtttggagtgggagtgaatatcttttggaagcaccttccatctgaatgctatgataaaacagatacctatggaaacaaagatcctacagcagcatcaagagctgcacaaattctggacagagccttgaaaacactggccgagttaccagaggaatatagggacttctatgcacgacgaatggtcctacacattcaagacaaagcctacagcaagaactctgagtaaataatgaagtgaatgcaatgcacattaacactttagtaaggtataacgatataaattaaagattttgttaaaataggaaagatacatcagatttacagattatgtaagtacgaaggggtgtttgtgtggattctacttgatacagattgttataattaaagaatgctgtgctgggaccactctttaacattcagatgctgaccactaaaagtccaacttaaaatgacttaaaaacagtaagaaaatatattgattcacaatacatgaaatctattgacagaatgtgctgcagtgtttctgatccaatgattcagtaatgtcatcaagaaccttgggaacccgcctccacaccccacccccttttcaaccacaacattggcatcatcctaaggctggctaccctcgtggtcatgggatgattgccagtagcagttggagccttgtgcatcttcatttacatgcagcggaagagtcaggctggattctaggggccctgtcctagtatgagaa

SEQ ID NO: 98048 - DNA, 1005 bp, Homo sapiens
gccttaaataggcttaactatgctgtcagttaatggtgaggcaaaggcaaatcgttttctgactccacattttctaatttgccaagtcttcccattttagggcagtactgcagaaatgtcttgaaggcccagttgtatatggaatacaaatgtttttattgttaggtaactgtaagagtcttaagtaagtcaagtctcattaaaggatcgggtttgcagttaaagtttagcatgccattggttctatttatttgaattttagataatgattacccataagcttttattggtcttcaggtaatggataatttgttaatacaagtgacaggaaaaaagcgtgttgtactcttcagtcctcgagatgcccagtatttatatttaaaaggtatgggattttttttaagtttatatttcaaaagtctattcagttactctttttgagaaatctcttgattcttataggaaaagaacacttcagtacttaatcctaattgtatttgtgtatatatgtaataacaggttcaaatttgaaattatcttattacatgggtatcagtcatcagaattaaagagtgagtcattgaaaattgtcttaggtgtcagtagcatagtaattctcacagtgttggtacagtaagtaactggatagaaaagaataaattttcaaatttatatttgtgattactttttttaaaatgctaactttgctgaatctatattatccctttttggaactttttaggtactaaatcagaagtactgaatatagataacccagacttggctaaatatccacttttttccaaggctagaagatatgaatgttcccttgaagctggtgatgtattattcattcctggtaagatttctagacctcactaatgtgctatttataaaatgtgtactctgtcactcatccttcatgtgattttttttttttagtacaaatatatatttgttatatgtatccggtcctatacaagatgatttttagacaaaactctg

SEQ ID NO: 98049 - DNA, 1370 bp, Homo sapiens
tttaaagctacaatagatctttagcattatagatttaacagtcacagtttcaacttcctataggttaccctaaacatctgtgtaatttgctgaaacatgacttttgaaaataggtgctgtgcatagcagtgatacaggaatgaattattttgctaatggcaaagcctagttggttcctcacatttgtatttccctgtggtcctattcttgattcatcatcatatatataccaagttttgtgaagtgatttttttttccatgtgaaaaatggccaccagataatgggggaaattgtattggaaaaagtgataagcctttagtataaggaggtataaatgatacacatgactctggctacccagagatccataactctctgggtcatgcaaagttatgttattcaggaaaaaggctgaagcttgttgagtcattaccaattgtaagaatttggggatatctgaagatcttaggatatatatgccttgagaatgtcaaatatctgctgtatttgtagggcagcaaaaatgtgtacaatattgatcttgatctgctgggcgcggtggctcacacctgtaatcccagcactttgggaggccgaggcgggcggatcatgaggtcaggagatcgagaccatcctggctaacacggtgaaaccccgtacctactaaaaatacaaaaaattagctgggcatggtggcgggtgcctgtagtcccagctactccagaggcttaggcaggagaatggcgtgaatccaggaggcagagcttgcagtgagccgagatcgcaccgttgcactccagcctgggcgacagaacgagactctgtctcaaaaaaaaaaaaaattgatcttgattatttatgatgttattttgtttgcttaaatttatgtacacatctataagcgttttaaaaacattaaaaatactagtatggtatatggtttggtgttgggaagtagagaaacttaaggaaggtaaaggaatatctaacaagtttccaaagaaaaaaaaatttttaagttctaaatcacagtataacattttatacatgtgttttgtaattcagttgagaccctcttgggaggattttaccatagtcagtaaatctgtaattatgaaatagacatgaactcttagcatattttacagttttatatgaataacatggtgagaaaatcatgtggtaatacattttaactatattctatgatgatgatgatgatgattgttgttgttgttttttgagacagagtcttgctctttcacccaggctggagtgcagtggcacgatcctggctcactgcaaccagtccctcccagattcaagtgattctcgtatctcagctacccagatagctaggattacaggc

SEQ ID NO: 98050 - DNA, 1072 bp, Homo sapiens
tcccgagtagctgggacattcagctaattatttttactatttgtagagaaggagactcgctatgttgtccaagttggtctcgaactcctggactcaagtgatcctccggtgttggcctcccagagtgctgggattataagcatgagccactgtgcgaggccaaaaattattatttatccttcaccaagtaactagagaactgtttgaattataaaacattcactgttagagaagtgagatataccaagtcaagcacttgggcaatccaaactcagaattctgcctctttcacccaacactgagaattataacataaacttcaaaagataataatatttatcttaagacataaattgatgattgaggttttaattgaactctcagtgcttttctatttttagctagcaccacatcacatagattctataaattactggctaataagtttcaaaatgttcttcgaaagtctaagggttttctactagttctaacatttcaagatttaaaaaataaaattaatgcaccagacacagaagtgcactgctcagaaattccttcaagaaagaactcactgcttcattgtaaggagtgtgattagcttagagctaccagctgttaacttcttcaggtccacctcaggattggaatctaggtcatgctcttcttggggtagtcacaaccagtgacttaagctggtaaaagacctagacattgccacccaatgcaggacttttctcataggcagtctgctcaggagttccaggatgagttggcagagactgtcagatctgtatctacatgtcttcccctatccaatcctgcttcctcccctttcctttcacagttatttctcctatttaacaagacttttgcactccttgtttttcttttctttttttttttttgagacggagtcttgctctgtagcccaggctggagtgcagtggtgcagtctcggctcactgcaagctccgcctcccgggttcacgccattctcctgcctcagcctcccaagtagctgggactacaggcgtatgccaccatgcctggctaatttttttgtatttttagt

SEQ ID NO: 98051 - DNA, 1424 bp, Homo sapiens
ctctagcctgggcaacaagagcataactgtccaaaaaaaaaaaaaattcactgtgttattcaaaagcacattttaaaaacaaattgctttttaatctttgaatgaagctgttttctgcatttgagccagctgggctggggagtttggttctaaaaggtgctgcatttttacagtcctcttgtcaggtaatagttatactagattactgccacaatccccacaaactctgtaggtctgtgattctgtagtataaccaaaatgtctttttaaatggattccattagctgcacctgagaactgttttataactttatagccatgctttgaacatgtatattcagttgccctttggtactttgatgtctaagggtaatcagtggtatatatttaaatagccatgaaatgtgaagtaaaagaaatagacacgtggtaaaagattaaagtctaaaaatcatggaaactatgtaaacaagatcaacttgaactgtcagtttggtcctctaagaagcagatgctgagatggaattaggagtgcaaaaggctggccgggcgcggtagctcacgcctgtaatcccagcacattgggaggcggaggcgggcggatcaggaggtcaggagattgagaccatcctggctaacacggtgaaaccccgcctctactaaaaatacaaaaaaattagccaggcatggtggcatacgcctgtagtcccagctacttgggaggctgaggcaggagaatggcgtgaacccgggaggcggagcttgcagtgagccgagactgcaccactgcactccagcctgggctacagagcaagactccgtctcaaaaaaaaaaaaagaaaagaaaaacaaggagtgcaaaagtcttgttaaataggagaaataactgtgaaaggaaaggggaggaagcaggattggataggggaagacatgtagatacagatctgacagtctctgccaactcatcctggaactcctgagcagactgcctatgagaaaagtcctgcattgggtggcaatgtctaggtcttttaccagcttaagtcactggttgtgactaccccaagaagagcatgacctagattccaatcctgaggtggacctgaagaagttaacagctggtagctctaagctaatcacactccttacaatgaagcagtgagttctttcttgaaggaatttctgagcagtgcacttctgtgtctggtgcattaattttattttttaaatcttgaaatgttagaactagtagaaaacccttagactttcgaagaacattttgaaacttattagccagtaatttatagaatctatgtgatgtggtgctagctaaaaatagaaaagcactgagagttcaattaaaacctcaatcatcaatttatgtcttaagataaatattattatcttttgaagtttatgttata

SEQ ID NO: 98052 - DNA, 1138 bp, Homo sapiens
gggcaggcatcaggcctcagtacttgtttcctctgaacacacagaggagcatgcagcatttttggggtcactccagtcctagtggtcctccagctgttagctattttcacctccttccttgctattaagcagtatttccaccccattcatcagccagcctgtaagcattgttgcttatataaagcaaacaacctgaatttcagtatcaaggtgtcggaggggttgttttctcctgaggcctctctcagcttacagatggccgtcttcttgctgtgtccttgcatggtcctccctgtgcatgcgtgctcctggtggctcttactccacatttgctcctcttataaggatgccagtcagattggattttggcccaccctgatggtctcatttaacttaatcatctctttaaggctttatctccaaatatagtcacatttcaaggttctgggggttagagcttcagcataaattttcggggaaggagagcacaattcatcctataacagttaggcagtattctctgacatgccatatctgacatgcctgtgcatcctctggcagcctagatttcagcttagatgtttcttcctttaggaagccctctctgatcctcccagattgggttagaaggctcttctgtatgctcccaagtcatcctgttcttatccctgtcaaaattcttcaacttgtcagtttacttgtccttttcccatgtagactgaaagttccctgaagacaggtaggatcttaactcacagtttgctttctcattgctagcagtgaggagaattgcagttgggtttttccctccttgaaaatggaatttcatacttcaaagttaggatctactgttttagaccacataaactaatgaccttctctcccactttcccaaacctacattatctcccatactgagattcagactacagcccagatttccagactcccaatgcagtctcgactgttctcctttccaactgctatctatgcatgattaagaggtaggtcatataactgccaaatgattgtttacttcatcattttaaaaagaaatataaaggaggatttttattgagacatctagattgtacaccacacactatcatttcccggtcctgagagtggatccagaatt

SEQ ID NO: 98053 - DNA, 1065 bp, Homo sapiens
taaaagcatgctaagatacaaagagagagaaaaaaacaggacagtgtcttagccacctatgggataatatcaactattctaatatacttgtattttgtgtcctagaagttggagtagtggaaacaaaaatagtatgttaagaaataatggctgaaaagtgtcctagttgatgaaaactataagcccacagattacaagaaattcaacaaacaaggtaacacagagaaaaaagtctgatcaaggtacatcataatgaaattgttgaaaaccagagaaagttgcaaaagcagctggaggaaaaaaataaaggtacattcatgcagagaaaccaagataagaatagctacctatttttcttaaacagcaagttagagaccttggcatgctatcttaaaagtgctgaaaaaataaccggtttacctagaatttgatattcagcagaaatcttcaaaaagtgagaagactcagagaaaagatgagacaattgattgccaatggacatgttttataagaaatgttaaggaccaatggacagaatagagttcaaaaatggacccatgcatatatggacaattgatttttgacaaaggcacaatgagctgtgtgtggtggtgtgtgcctgtagtcccacgtgcttgggagactgagatgggaggatcacctgagcctggagaggttgaggctgcactgagctgtgattgcactccagtctgggcaaaagggtgagaccctgtctaaaaagaaaagaaaacaaaacaaaaaggcaccaaagcaaagaggaaaagcatcttttcaacaaatggaataagtatatattcatatgagaaatgaacctcgacttttacatcacatacataattttagtgaaaaatttagattttaaaatggatgatagacctaaacaaaagctaaacctagaaattctagaaaaaaaaaaatagacatttgctgtcttgagattagcaaagattttcttaggatatagaatgcatgaaccatgaaacaaaaaaaatttataacttggaatttattaaaattaaaactttttgaaagacaacagtaaga

SEQ ID NO: 98054 - DNA, 1999 bp, Homo sapiens
gatcctgtcatgtttctccaagccttcttgggacagtagtgtccctagggttgggccactgctactcccttctaggcctctttagtactgagaactaccagcaagggtcaggaaacttgatagatatttagaattgaataatttgcctggagcttggcttttccctggctccagacccctgagagcaaatattcttgctagtttgcagtcccgctggtctctgagtcccatttgtacaacttggaaggagaaaggaagacagatatagggctgattttcttaaattatggtgcattcatatctttgtctctagtgggaaggttggtcttatgtgtgtatgagaaaggtggccgcctttatgttgtggtttcagaatccatactgctgaaaagggcacttcaaatatcaagtttctcttttttgctctccaatatgtgaaagcctacgttataaaaactctatttagtttcctatgaccagtatgatttagaagaaaaagaggacgggctttggcacttgaaagacctgattttgagtcatgccattgctggctatatgaatttgagcaagttatttaatctttctggaccccagttttctcatgtatgaagcaaagtgagtaacgcctacaattctgttatgattttgttgtgactaaataagataaaatataaagtgcctggcaccagggcctaaaatgcaaatgctatggaggtggtaagtcaaacttatcctcatatctcagtatatctcaattcaccctccttatgttgaataattttatagacctttccctgagactgatcaggaagaggatatgaaatctggggcaaggggcccagattttacccagccaagggtgacaaaggaccagaaggaagttgccttcacattttgcctaagtcccattctccctatgctttgcatttgtgaaaatattcatctgagattataggtacagcatgaagccttggaaaaaaggcatgtttacatcctctgccaggatagcataacaattaacaaagcaggtttttgaatctctgaatagtcaggtgcactgccatcaaaataaacttttatttctattctttgctgatagattacaaataaagccactaaaatatcctgaaaaagaagatttatatatgaattggacaccagggacagatttttcacacttattttgttggagcagttttttccttagctgtgggtgtttgggaagttcttttgttgtagcttttgttgcttacaagagggaaaaagctttagtatgctaaggtaagaatgattttgattggaggcaatattgttctcagtgtgggctgactttcacgtattgtagtgattaccagtacataactgagaaaacccatttgttgaagtgctgtaaacagcagagagtctgatctcacatactgccctgatcgacaagtgtttattgtaggaatgtggtcagtcctgtaattttttaagggaaaaggggaagatgttatgccagtcactgtgattgcaaatgccctgatctggcaggtctttttcctttctcgtttatttctcctgtggaatctgaatggtggattcagtacatgtactgagcttccagtgacttggtcagctcttgatgcaattgatcacaccactgtaattccataccctcaattttagtgccatatcaaaatcatgaacactcaaggagaccatgtaaatctacgtcctcaaaaattagaaataatggcattaaaaatgttatttagtgctggtttgtagcactgaatatatgaactcattcattgttctggtactccctgaacaagaactgtttcggttgcagtggatgatatcaactaaggtttccatggcagcactaatttataatatgaaaacttttgtggaatttcaccttctggactcttctcgattgcatttaaatttacattttcccctcatttattaaggtgaggcatatttagatattacttacatgtgtgtactagga

SEQ ID NO: 98055 - DNA, 1051 bp, Homo sapiens
gatgattgtaactttttgaaaagagccataaatattggtgggagttggttgttttccatgaatagaatcgaatattttacttcctcatatttgaatcacaatgaaagcactttcagttgttcaaagagaattaatatagaaacaactgttgattttctgtctttctgtctccatacacatgtctgcatgcacaggcgcacacactgcttagttttcctttggttaggcagctgaagagttactatgtagatcctggcagccttctacccatcagacaagcaagggcacaatcaattcctgttttcttgaaacgtataccaaataatcagaaactctgattattctgctggaaggcaacagcttgatggaaagatgtaccaattgaaaacaattctgatcatatttttgtcaggagaatgagatgcctccagctgcctgtcactaatcatattagaggtggaaagcaggaatgttttaccctgcaaaagattactctaatcatgtgttggaacgctacttgtactggctgcttatcccagaacggtgacattagacatcccttctgtaactggtcttgccagttggtagtagtctaaaccatatgccacatgagcacactttaggaattttctaattacagctcaaaggctttacttttatctttttatgcttgtactgcagacatcagtgattgaaaatgatttccccctcagcataatcctattgccagcagttatgaaagactaggaagatggtaaatgaagcccacaataactgaagaggtgtccgaattcaattatgaagaggcctgtcccatgtggacacataagccatataaatccattttaattgtgagctgtgatgcttatctgattatgtttattttcgatgcaagtgccaaagctggatttagaccagaattccagatcttcaagttctaatgactaatttgggtatccactgaatcccttaattcatttcttaatttgttctcccagaattagagagttgcttggttacagtcattttcacaaatttctcatggatcaaa

SEQ ID NO: 98056 - DNA, 1019 bp, Homo sapiens
aatattagccctcattaagaggaaaaattttattacaatatgtaaaatgtgtgtgtgtgagagagagagagggagagggagagggagagacagagaggaaagagagagatttggaagaatcagctttagtaagtttactggaaatcttcaagctttttttttttagagagacagggtctcactctgtcacctgggttggagtgcagtggcgccaacacagctcactaaaagttcaacctcctgggctaacacagttctcttgcctaagcctctggtgtagctgggaccacaggtgcatgccaccacaactggctattttttttattttttatagagatagggggtctcactttgttacccaggctggtctcaaactgctgggcttaagcgatcctcccaccttggtctcccacagtggtgggattacaggtgtgagccaccatgcctggcccaaactattttttaatacagtaaaatgcatttattatcatggcttagatttagtgaatgtgtaggagtgaaagtctactgagagaataaatctagtaatttaatgaactttcttcatagcttcataagagttagttaattatgatttcttaattcattgcccaaagaatgaattactggaattcattatattttttttttgaaaaaaaaaaactaagttagctgcctgtgtgtgtgtgtgtgtgtgtgtatgtatgtatctatgtattctagagaaatatatattatatgcatccagagatgtgtaaaatattctctatcagtaggagaatagattaataaattgtggtgtaatcatatgctagaatactatacagcagtaaaaaaatgaactagagctgtacacaataacatggatatatcccacagacatgatgttgaaagacagatatggcctgggtttgttagctcatgcctgtaataccagccctttgggaggccaaggctggggggttgtttgagcccaggagttcaagaccagcctgggcaacatggtgaatctcttttct

SEQ ID NO: 98057 - DNA, 1050 bp, Homo sapiens
ggctctgctgtgaacttcttggggaacattagaaagatgacctagtttttttaggtccaagtttttctcctcaggaaagtgaaatagttgaatgtggttgttttcaaccttcctctcagttctgaagttgtgtgactatgatctataaaggtcatttattgttgccttcataactcaagaccaaaggcagagtgtctgttaacactccatttcagtgactcccctgccacttatttctcttggtccaataaactattgtttttttgtttatcttccttttctcataaaacactaagtaatttcagagagaatctcattttggcattctttatatcctctaatgtatgatgtgtcttcgtgactactgaaaaaaattcttaaaagcagctacttccattattctctagtttttaaagctatcccctgagaactaaatgtcaattcaaagattcctgcatttgttatcatttctaccctaacctgtagaagtccaagacataatttgaaactgaaggattcttgcctggagacagtgggctcataaatatgtagcttgatttttctctataagaagaaattaggatttttaacaacactttttcagtatctaagttgaatatgcaaaattgggctgctgtacatgcttgcagatcctgtatttttaattgtagttacattatttttcaattgagtaataattttcaatgaagctactgcaaaataacaggttcttgcctaatgaaagattttacaaaccaaagactcatgtgttttaactctatctctaatttagactctgaaatatgccattcttcctttatatatgtcagatagctgtctgttttctaggccgagcatggaaaacacaacccaagtgggccacagaagaggtcactaatttcctacccagtacccattcttttcctcttccttagtaacacattctgattttattcaaagggataatgtccccagccaaaagactgcatttcctagcctcctttgcagtgaggggtagccaacacagagatcactaggtgggagttccag

SEQ ID NO: 98058 - DNA, 1060 bp, Homo sapiens
acaaaactgtaaggtaatgaatttttattattttaagccactaaatgtgtgctaatgtgttacagcagcactaggaaacacagtgtttcctctcctgttcggtaagaagaatagaatgagctgtgtcaccggtttgttgtaattgctaaataaaatgatttgtgagaagtacttagcatagggaacatagtgatgtatctccgccttgccagcgttcagacgggcaagatttcccactgagtgccctgttcccgtgtttaggttgccgatggacttctttcttaatgtcagtggcaactgtcaagtcttatagtggcccagtcactttaaggggactttgaagtctctcctagggttcatcatttattgattttatatatcaactctcagaagatgtttttatttcacttgttgccaagttttgggaaatttattctagtgccatccagataccacccactcataggtccttccccaaagcaattctccctgtattttctttctcctttctgcctggactgcaggaatgtctgaaggcttgttggggtctgtagagaggtaggggagggaagttcctagcagggagcagagaaggaccagttgccagtcatcccggtgagtgcagggcagtcccaggtgggttgggcattctagagtgaggcattccagttcagggatgactgggctggaagaataaactccgtgtattgttttcttatttttgctttgttttgttttgttttgttttattgattaagaaagtctctctaaagaggagaatcttcgcaatctgacattcattgatgtccttcaggtcagttaagtcagttgggtagatcctggtgtaagtgaataaagtgaaagccacaggttttcctctgtctttgctgggtcagtcagattcccagggaacagcttttgcattatcacaggacaagaaaccaacagaattgtattcctactacccaagtgctaatattttgtgggtttacttatgttatcttttaatgctcacaaaatcactgcgaaatacatattattacttccattttctgctgag

SEQ ID NO: 98059 - DNA, 1007 bp, Homo sapiens
agtggtttcgcactgcagtttgtgcatcctgcaaatgcgcaaggcatatactgtgggcctgtctggcctgagaaggcaggtcccgtggaacggttttattcccctggtggagttcttactgcatttcatagacagtgagccctgtgacttgtttatgatggttttgaggtgctgttagcccaatggccgtgggcttgctgagttggactgccttaggtttgagtcctggccctgccacttaactgtgggaccttgagcagttactagatctctttgtgcttcagtttccacgtatgtaaaaatggggataatcttaatttctattcgtagggttgtgacggtaaaatgaaaaaaaatgtatgtcaagcacttagcagagtgtctggtacgttataagttctccagaagtgtgctaattattattaataatatatttttgaaaagattattccttaacgacgtaatttgtaggaaactggctttccccttatctctctaggcttccatgagaatctatttcttgtgtgtagtgtttgggattaaggaagaggctctttctttatgttccaggatggagacactagtagttctcacggttttgctagtgcacgtccgaataccctgcggggcttgttaagcactgactgctgtgctgcccctgccctccagagcttctctttctgtctggtgaggggcagagtatttgcatctttaacaagttcccaggtgatgctgaggccactcatctgggaaccacactttaagaacccctgctctaggacagtactttccagtggaaatataatgtaagccacacataaaatcatacattttctagcagtcacattaaaaaagtgaaaagaagtggatgaaattaattttaatactgtattttatttaatccaatctatcaaatgctatcatttcaacatatagtcgatataaaaagtattaatgagacagcttatattcctttttttgtactcagtctttgaaactcggcctct

SEQ ID NO: 98060 - DNA, 1107 bp, Homo sapiens
atgtattaaaatggtgaaaatctttcctttatgactaatatgtttccctaataagttttaacagtttccttgatctctatttttctttaggacatatgtaaaaattagatgattatatctacatatgtttataatggtattactgaaatctaaattgcaatttttaggaaaaaagttttaaaaaatgtctaagctattgaaatgttgcaccaatatcaggacttatatttctgagtatcttaattttgtgttgattgattggtatgtatggaacatgtattcgtggacttgaatagttagcccgcagtaattggtctgttccaataacaattttaaatgataataacaaggagaaaccaggttcttctcaagaagtcaaagatccctgtacctttcttatagatttaaaagctcctgtggtcgatacatattaaggtatgagtattcagtcatgtttggcagtgatacactaccaagcatgatgaccaagatgtcagggagaaggtctgttgtccccagacatctgttactcactgtaggtcctaaaaatcacagcattagaggcttcttgggcttacctagaagtctgcaccttagagggctgaggcttcacgttgctaaaccctgggcctgtcatgtgaaatcaggtgaaaatatattgaaaagttccttgactactttaaacaattaagatttagatgaaattgagctgactgggcagatatagttcatagcagaaaagagaatctcaaaatagggacacagcactgtttcattttcatagcagggagggtcagctcaggaaaggtaatgagtacatgatgttatgcaggggcaaggtgggcttccggacattctggagggactagtgctgattggagggtgcagacactcaacgaggaccttcaggacacaccgaaaataacctcacctgtcccacagtttccccagtgtttgtccttagcagtagaacccaatttgactatctagtcacttaaacttaaaattttttttttttttagatggagtctcgctctgtcgcccaggctggagtgcagtggtgcgatcttggctcactgcaagctctgcctcctgggttcacgccat

SEQ ID NO: 98061 - DNA, 2390 bp, Homo sapiens
ttgaggaaccttcaaaggcacttcgtggggtcacaggtcagtaatgcttaagtaaaattgcttaggaaggcatagatgaaaagagcacaaagggagctcattggggctgctgttgatgttgttgaaaatggaaggttgtttttctgcagtgtgtacgattcagccttcctgaagccaggattgggggtgaaggggaatgtaacagggcagagaataaatgctcaatctagctctacaccaagtcagaggatttttttttttttttttttgagtctgggtcttgctgtgcaaggctagagtgcagtggtgtggtcatagctcactgcagctgcagtcttgaactcctggactcaagcaatcctgccttggcatcccaaagtgctgggattacagacatgagccaccacacttagccagtcagaggtcttttttaatggaaattccagtttaaagaaatattctatatagacacatttgctagaattcacctggggtaatgaaggaatagttgatgacaaaaagaaatgttattcaatgttttctttagaaagggcagaccaaattattttaactgctggtattttttatatgatgtgacagaacataatcttccagggtgttagaatctggaacattaattatttgtgctatagctatatatttattactcttcaaaaggccacttcctaatccactgtttgactttgggcacatcatctactctagggtcccatttcctttctgaaaaataaggaaactgcattggaatctactagatcagtgcttctcaatactatctgacccaatgccccatttttagaacaaatgttaaaataaatctcatgcataatataacctacctagaaacagaatttcaataaataaaaatataagacattcaggaaaaactaaaatagaaggctcaataaagaggccagatttttacacccacttataatgaatcactttgcaattaaatgaagtaaggcagtagtcagctggatattgtggatactgttttacatttgacatgtacagtaagagctcaatacgtatatttgtatataacatggaatcactgtgaatgcacctgctacaaatgcagtccaatttagggtaatgggtgtcagctctaatatcatggctgctgatgtggttttccacatggccaaaaattcttagtcaagttctaaacatcataaagtaccatcttcctttaatttatgcaatagttgaatcttggaaatccaaacaaatgttgtaaatccgtagtaaaactgtctagactcacataattatatatatatttttttaaaatcatgaatgtccaggggaacatgagaaagttcaggacacagattaattctttgttgtgtatgacattcccaggattgcaagtcatctagcatcctgccccccaaccccaccgccaacacacacacacacaatcattttgctaatttttaaaaatgcccgctcagtttttcagaatgcctcctaaaaggtggtagatcctttgatgagaatcactacactagttgacccccaaagtccttctagttataaaatcatgagtttgtagaatcagtggcgttttaaactcccgttatattcagagcactgtgctagatgccacagtagattcagagaaggatatgatatggtctaggccctgatggaatcacattctgatatccttgaagagaaggctataggttcactggtgagtttaaggtttggggaagagaggtgcagtatccgactgagtgctcctgggagatttcctgggagcattgggtattgaaggaccaatagaactgaggtggtaaaaaggatttggagggttagagagaagtaaagagaactttactgagtgccctcaggtattgcacacctgctatatatgacacactgctattctctgacaaaccaaagatgagtaagacacatccatgcctaagaaaagtttagactaccagaagagatggaggtgcaaacagaaaagcaaatggtgacatgtaccaaatcagggtggcagtgagaaggcattaaataactggcacactctgtaatacactagtaagttcttaaattgctcacaaagcacaaattttcttccagaaacacatttcctaacaactccactaatagtgctgaaactcatgtcatccttactcacttcatgatggtttcctaaaaccgaacaatgacaacaacaaaaataacctatttcattttgaatctgaattctccagaaatttttttaattcaattttcactgtgcctacaattttgagactgttttgatttatagtcagagcaagagaaagaaattaaataatcgagtggcagattcccaacttgttattgctttcacatgaattactttc

SEQ ID NO: 98062 - DNA, 1044 bp, Homo sapiens
agattccagtaacacagctagtcaccctaagtgagtatgtgttaaagttcaagagggctgctgctgttaaagttgaatagtgcagcacatatagaatgatttctgcttagtagacttcctgtcttggcggtatcactcagagaggattttaataagtgttgtttttcagagatcgttgttcggagtaacaaatttcaaaagtctaaattccgtaagtgaggtcagacaccagtggagaaaatgtagagtgggagtgtacagtgaatcagaagggactgtgtttggcttggggattggtggaggaggacaggaggaactgggttgttggtaataggcacagagggtgaacccgcctccatgaccaactcagaaaacacagtcgtggtccaacaaagcaatcagtctgtggagtgagaactgattccaagaaattaggttatttaatatgtttcaatctctggccctaatgtatgactcctccttatttggcagtggaaatcctgactgctcgtcagaagaaagcagaagaactaaagagactcactgaccttgccagtcagatggcagagatgcagctggccgaactcagggcagaaattaaggtcagttctaaaatatcacagcctgaaccctgagccagagagctgatcccaattatgtttgttttgcatccacagagttctgctctctgaggatctaacatgtacacccagctctcttccacagggtggaaatagagaacacagaagggggaagacccacataatcactgtgtttaagtgtaatgtgctttgaaggaatgtgttactccaaaggagaggtacaagctattttgtcagtcagtagagactgaaccaaataaagtaacttggccaggccatgaattatagctgggatgggggatattattttcacacactgtgatttgtatgtatgcatataaacacatccacaggtatatatacacacacgaagcatgaacgtagtgtaatggtgaagattagaaagcatgcggtctgtggagatttctttcctgtattattt

SEQ ID NO: 98063 - DNA, 1074 bp, Homo sapiens
gctgaggcaggagaatggcgtgaacccgggaggcggagcttgcagtgagccgagaccgcgccactgcactccagcctgggcgacagagcgagactccatctcaaaaaacgcgtacagcaaaaaagggtgccgttacataggtcattggatgctatcactggaatgtctgttgagaaataaacgttttaccatctgtagacacatgagggcgctttaagcaggcagcgtgggatgcagcgtgcaaagggagggagggaggaagaaagctttgtcaaaggtagcctgaaattcaggcatctccctatctggttgcggacctgtgcctgcgtcggggtggggagcaccgaatcgatttaggaaaagaactgcgcaggcccttgatccccacttctcatggtgaaatcaagtttgaggttcaaatcaaggctttcagagagtcagaatttccaaatctgttactttgtcaaaaaactgcttttaatctggtaacgtttcccattaacctcatttgatgtccttccctaagaatgtttaattagaatctccttttctgatgccagcagaattgaactgcttgtgaactgagctttaaattggacatgttgtgtttctagtcctccactgagggtgaattttgcagcaatttgcgtttaactttctgtgtcttgctgcattaagcacttctagaataggatcaacaggacagagctggagtatgcagagattctcaaaagaaatgtaaatttggaatgtaattgggaacccaacagggaggtgtggatttcacggatgaagtcttggtggaagatctaagtgccacaatgtgagtttgaagttattccatcttcataaggattaaactattttaacctctactaggcaaatgtttaagagaataatctgactactgtgcattaagtagagagattagagtttaaaacactttaaatgaatggcagaataggactcagttctctaggatcacaccaatagttccaccagacagatgaagatatgtaatacagtgtttaagcggcctgacattggcactaaaatattgaaattactgtttca

SEQ ID NO: 98064 - DNA, 1037 bp, Homo sapiens
gaattatataatatctttgaagtaaattattaaaatatcctatttaatttgaatagtgaagttttgaaaatactttgaaaaagagaagtaaaagtttaactttttaactaaagttagtatttgtttttcagaaatgaccactgaagattcattctgattatacaatatgatttttatgcataaaatttccatgtaacttgaatttaatatttttaaacagaatattttgactaatcctctattttttcatgactattcagttgtgtgtgtttattcgtaaatgttatgttttgtaattggatcacatatttctactttcagtgagagtatgccttcactatgttaaaaaataagctcataaaacagggtactttttattcaaatgcttatcattgtactttcattgctttgaaagagtaaagtaagtatactcaaaacattacgttttacaaaatcaaataaaacttttccataaaaagtggtattttctgtgtctgtactttttaaagccgtggagccctgtagtagtttgaaaacttattagtttatttaggttatccattttcacttacaaaattgctttcttgtgcagataaagtatgaaataattaaatcaattttggataactatccatctactaggaactttttagataggctgcttactttgctagaaaaagtgattatttaattgaagatccatgatgactgtcctgtggaatatataaaatattcagttacttttgaaaatgccattatagagaatccaggcattgtggaaatcaaagaccatagtgaattttcagaactaccaatgtggacattattagtattgcttgatttaggacattttgagttgctggacaggaaacatgttgacaattaatcatgggtgattccgttgacatcctccatttctttgcatcaagtagtttaagggaaatccatttagcacacttagtctttgtaagaggagtgactttggataactactgaaggccggggcagctgcgatagggaaggggaagatgcaccct

SEQ ID NO: 98065 - DNA, 1048 bp, Homo sapiens
actataagactggtcctaagccagttagatttttgggcccttccacaagtacccaaattaaagtcaagaactcggcctcagtcacggtgtctccagccagtgccatccagacgtcggctggggcgacagcaaaccggtttcaaagtggtagccgcagaaaggcagctcagcgctctgcaccttccagagccacggccctggtgggcacgggggcacctgggcatcctcaggcttcccctggggctgcgagcgctgaaaatggaggcacgcacttacctccagctaaggtgctactctccgacaagaagcctacaccccagcgggtgataaagctgaagaggactccgctgtgcgccaccgcgccttgcctgccctcccccacggccacgaggcaggccaactccctcaagccgcttcccggcgaagctgcccgtgccttgggagtgcggactgagaacgggaagaacaagggaaattgatgaaagtggtggacttgaaatttcccgttcatctcccaaagctttcaacccattcgacgcaaagaagtgacactttcttaatgcagcagaggggaagcttaggtttatgttgaggattctgttcctggaattgtgtgagctaggaatggaggaggggagactttcaatggttaaggctccatttctcattttcccaacttttatatgattgtctatgggcagtttgaatttctggttttcaatttattttttaatgattaattcgtattaaggcaacaagacagtacaacaaataatctctagagaggtccactttgttgctgaagtaaacgttacttgttgcaacccgaggatgggcatgaggtttggccttaggtattcctgtctgggaaaatggagggggtgatattagtggttccctgtactatatcacagccaagagagattagagagagaaaatgtagatcaaggcgagctgcctacaaattactctgtctccaaaggcaacgtgaaaagaaatgatggggaggaaaaaaccccatagattgaattagcactttgactctcac

SEQ ID NO: 98066 - DNA, 1161 bp, Homo sapiens
atttattttaccttttgagcctacagttagcaaatatatttgagtcaagagcagtggttctcaacgaggggtgattttgccttccaggggatatttgacaatgtttggcaacatttttagttgacacactgtggggtgagagttgctactggcatttagaaggtagaggccaagggtgctgctaaacatcctacagtgcacagggcagccccccagaacaaagaattatgtgaccaaaatggtaatagtgccgaggttgagaaacctcagtgtggagtctggtggaagatgtagatggaaaacatagcaggcaggcaggagtggtttacggagaccctcctctgtgttagttatctttcctctacaagtttacgaagcattatttttgatgcatcaacaggataacgatgatgatgactgagaagcacttgtaaggtcccaaggagccatctggtgaccagggaaaatgttcagtagggatttagggttgaatatattatatttgcactctttgctacagatggcaattttcaaataaccacgttattatgatcccatttccaagaatgggagttgaataagttgtaatcgcctctaatgacacattgatgctatgcagacttgcaagagagcagagtgagaggattgcagtcacctttcatgcttggggtggtcctcaggaagtgaagctgaaggagcaggcaaggttttgacaatgattgtttgacggttttaaggtcatttaaaaaaatgttcccccgtaggctttttataatgaatggtaaactcagttctggaatctttgaaggtttgtccatgactgttctagcagtccccaaaatgggttccaaagaatgcaaattttactggccatcaaaggtttcactatagaatgattgggaaatacagatatctttagtataggcctttcataatctttaatatgttaacatgaattttaaagcttcaagaagaaaaaaagatatgcagcagtttattagttttgcattgctataaaggactatcaggctgggtaatttataaagaaaagaggtttattttgactcatggttctgcagtctgtacaagaaggttagggccagcatatgcttctggtgaggcctcaggaagcttacaatcatggcagaaggtgaagggaag

SEQ ID NO: 98067 - DNA, 2121 bp, Homo sapiens
acaaaataaaaacactttaaatgtctaatgattgagggttaaatatattttggcacatccacagaatggaatataataaagcgattaaagttattttaaataactttttgcatagatgaatgcccatgataagaaatgatgaaaagcaggaaataaatgtaaagtatatcatatgactagaaaaaagactggaatgaaacatattagtctgtcctgagccaatgattcctggtcttctgattaggagtgactttgattcccttatatatacttttctatattttccaggtattgtacaagggatgtgaattactttataggcaggaaaaaaaaagaaagtttttaaacaaattgtggtgtatccatacagtggaatactactcactgataaaagaaatgatcattgctacatacagcaacatggatgaatcttaaagcatcatgctaaagaagccagacacaaaaggttgcattttgtatgatcccatttatatgacatttcagaaaaggcaaaactaaggatatggaggggacattgattgctaaggggtatgaggaaatttttggggtgatagaagtggtctacagattatgactatggatacataactatatccatttgtcaaaactcattgaaatgtgtacctgaaaagggtgaattttattttacataaattatatcttaataaatctgacttttagaaaaagcaaacttaatggaccggatttgggaatgtttttatagtatgtgtaggttttggagtgtgatcaagcagttccagaaagttaattgttttaaaatgaggatcatagagttatttgagtatcagatatgtctatcattataatgatttatatgcccagcttgctaaattgttattgttaccagaagtttaataagaagacaacaccaaatccattattgggacttagattactccaagcaatttttattcaacataattccttgagcttttttcatgtgtatatatttatgcttcttttctaaaaaaaattgagatggaaattcacataacagaattaactaaagcatacatttcattggtatttactacattcacaatgttgtgcaatcattacctctctccagttctaaacatttcatcaccccaaaaggaacccctaagcggtcactccccactccactgtctcccacagcccctggcaaccagcagtctgctttgtgtctcaatggatttacctactcttgatagctctacaaatggaacaatacaaatgtgacctattgtgtttggtgtttttcacttagcataatgttttcgaggcttcaagaataaatacatttttcagctcttaataaaaaacataacagatttaaaaattaaaatgaatttgaatggcatttttgcctaactcactagctcagattcttgttggaaaaggtggttatcgggtggtgatgtctcatatttgtacagtggttgccattttcagagtagttcacaaagttcccctgatttgatgttacagcaacccagtgaagtagacaaggcaagtgttacaacccaccccctatacaatacttatactgctccctacgactactgggaataaaggtacttgacagtttttgagtgcttagtctgtgctagaccctgttctaagcactttgcatttattaactcatttaatcatcacagtggtccttcaaggtacatactattattgtcatcatttcacagctgagaaaattcaggcccagaaaagtaactttcccaaggtgacatgaatagtgagtgagagatggagattgagacccacacaggctttgctggagcctgagccctcactctcagctgccctgagtatgcatcataacctgctgaatcttctcagctaatcagtggcaaagctggtggccagctcttcctgacccaggtcgtgagctgtgttgctccctggccctagctcctcgtgtgagcgcttcctgttcatgttgtgcacacctctctttgccaaacgggaggcatgaacctcagactctggcaggtcttaggcgaaacagtgttgctcagcattttgcagtggatggtagctgtcttaattatgtctttttaccttccaggtgttagctactgg

SEQ ID NO: 98068 - DNA, 1146 bp, Homo sapiens
gaacttgtttgaattctttgatttggatgtcagcgtttaggaagcaagctgatgggtggttggttattaggagtgcagcatgaatagaaagttgatttggttccagatcccctttaggaatttaaatagttatatgggttctgctactgaagttattcataaactatattttcgaacgatagtctttccctgctgttgccacatctgcagaatgaggcctgactagaaggttgggagggttaatgctcatcttcagaagtctcagctctgtaatcttttattcctggtttttattcaaaaaggacacagcatgcccacattcatgctgtcagccaacacatgtttgtttcaagtgcctgtgacatgtatggcactgtacaaggggctgcgtgggacaccaagaaatacaacatgtagttctttgcccttgaagtttatagtatagttgggaattcttgtagatgtatgtgtaagtaaaattccaaaccaatataggagttagatagcaatattaaatgaaagtgcaagacatggtagggccccattttcattcactgagtcagtaaatactaggcatctcgtttgtgtcaggcactattccagacacttgggatataacagtgaacacaatatagtacctgtccagagtacttacagcagtaaagctgttcctcccagggaaggccctggcagcttcactgggtgaaacccttctgctctctgccctggagcaccttgtggtctcactggtggcacttcttttttttttttttttttcttttgagatggagtcttgctcttgttgcccaggctggagtgcaattgcatgatctcagttcaccgcaacctctacctcccgggttcaagtgattctcctgcctcagcctcctgagtagctgggattacaggcatgtgccaccacgcccagctaattttgtatttttagtagagacagggtttctccatgttggtcaggctggtctcgaactcccaacctcaggtgatctgcccgcctcggcctcccaaagtgctggggttacaggtgtgagcccctgcacccggtcctggtggcacttcttacacagggtgctggtggcttattcaatgtctgtcttctgcattagctataaactctgggaggactgg

SEQ ID NO: 98069 - DNA, 1050 bp, Homo sapiens
aaaaaatgccaagacctttttaagttctatatttgaccttaaagaatatgtctccatttcattggccaaatggtcagacaggctgtatggataagggatgccaaagtaatcagcctcttcctgtagggcgatgcgggtttgctcatctgtgggaatctgaacttctccatgaaggtaatccaaaaggtatttaaatagacgtccatcacggtcaataacacaagcccctagaaaacattcagttcaaaaatgattatagagattctgtcgatcaataagatttcaacaaatcaaactaggtctgaggacctctacaattataaatgtttctttctcacatgaaagttaacatctagtgttcaaataggtttatgtaatctaagctagacttttggttattcaaacaccaaatatgatataccagcaaccctctgcttacaaataggtgatattgtaaaatagaatctgaatgagatgtgtgggacaatcacctgtagttctataatactgcacataagtttgaatgcaaatatatatcaccagggttgccatgtttggttgtactggtgtactatatacaccatgctaggccaagtgggcaagagaggctaaaaccaaacccacactctgctcaccaagccatgcaccctggcatggaactgcatcttcctggataaaagggcacccttttctgatttgtacacaaagaaactgaatgagtcagtggtggacctttgcgttctcactaccatatgggaaaatatattctgagatccatttagaactttggatgcaatgactatattcccacaatggccactgcaaaagctaagggcaccccacactgctggtagaaacagcagtttacccctaaccttatctcagctggactagaacaggtatatggaggttctcactaaagagagcatgtggggtgctcatcactatgtccagtgtttgcatatcagcaacactacaaatctggggttcctcactccaggcatgccagatgattcgaattactgggttagtccttttgtactacgagaa

SEQ ID NO: 98070 - DNA, 1043 bp, Homo sapiens
gccgcggaagaccgtggcggggctttctggctccccagctcctcccggctcttcccgcttcggaagaggagtgtgagccccttgagcgatgtttttcaaagtggggttcgcgggcagatcccgacccctcctcagactttctgaggaactgtgtgctgtggccggagtgtcttcgttttcccaagcgtccctgatggttttgatgcaggtgatcataggaatgcactctgggggacattgtccccgagggctggacactttccacatagcagggagcctaactgggtgcttttgaggatggggcctgcggagtgcccccctggtgtggccttggaatgatgatgttcctatccttaggagagactgcctggggttggggtaggaggagtagctcttaaatcctcgggatcggggtgctgctgtgttatcgtagccaagtcttgagatggacagatgcttagagagtgaaagggctgggtcaggatccataggggtgaaacagtgctggaggaggcggtgtggggtgaagcaggaagaacttggggttcgtcctgccgttctggattggggctggctccacaacctactagcagtcagtccttgtgtggcccctgtacacatcactctttttttttaccccaatggcctcatctgtcaacagggacagtaattcccatccaatagagtttttgtgtgaattaggtaaagtgtgtcaagtgtctcttacaatggctggcacataataagcattcagtaaatgggagttattaagagtgacacaggccctggcttccttggcctacagaccaaaaagtagggattaaacaagtggggtaaaaagtggacagacacacagtatatttgtagaattgtgcaaggattctaacttggggggcagaaggatacgtgggacggtcatgcaagaaattaggtttgctgaaggccttgaagaatagataggattccagggagccagtaatgaggcagagggaacaagttccatcccatgcctcagaggtggctctcacacatggatctttgga

SEQ ID NO: 98071 - DNA, 1037 bp, Homo sapiens
tgaatcatttccatcagcataacctgctggaatgactctcatcctaaaattccttttcttgactcttatcccaccttcactacagcttcacttctctacttctatttacaacaaagtcttctctaaagggttacatccagccttccatctcccattcactctccagcccatttttggctggtttgcgtcctcaccacaacattgaaactgctcttgtcaaggtcacctagaactcccacaataccaaatatgatggacccttgatttctcagtggcatttgacatgaatgacactttgctctcttggttcctgtaactccatacgctcctgactcccctccttcctcttggctcttccttgtaagcctgacttctaaatgctgaagtcaatgcttcatgttgtctcttctcatttatctgccctttctgcagatggtttcattcactctcatagctttaaatgcttatgctttccaaatatccaccttcaacacagaattttacccctgagctccagatttattcaattgctaattgatctctctacctgaatgtctgaaaagcatctgaatcttagtagtccaaaacacagcttctgatttcttccctcaaacctattcctctcccataattcactgactcggtaaactcactattatcccattgttcaaattaacaatttagagatattcctacatttttccctttcccttaaatcccatatattgcagccatgaaaatgcacttctcagatctccaattgcagggagcattgttgactgatgcctcagctgctgtcctttgaaatttatcaccaggctgcactgcccactgactgctcccagccagtgactgagcagagggatttaaggcaggcccattcctgggagacacagaactcttctgatatgggggactttggcttgaaggctttccactggctgtgctgaaactttctcagaactgtatcatatctacaacttttcctacttttcctttcctgttctccacaagggttgaaactgtctaatgtcttt

SEQ ID NO: 98072 - DNA, 1058 bp, Homo sapiens
aggctgtattcatttcctttggctgctgtaacaaattatcataaatgaggtgcttaaaacaactgaaatgtatttccccacagttctggaggccagaagtctaaattcagttatcactggttttcccacctcaaggtgtattcccagctgcactctctctggaggctcttcaggagaatctgttccttgctttgtcaattcctgatggctgctggcagtccttggcatgtggctgcatcactcctgtctctgctgtctcttgtaaggactcttgtgatagtatttagtcctgcctggataatccaggataatctccccattacaagatcctcaatttattcatatcttcaaaggccctttttccacatgaggtttagaattaaagggatctaataactttgggggaccattttccagcttaccacaggaccagatgaggaatgtgtagcacttaggggattcgagtgaggggaatgaacgtgacccaggagttgagggattcttgccatgattgataaagtgagctgagtcctggattgacatagtgagctgagtcctgtggactcaaggcaggtagtggtggggaggctgagtattgagggttaggcaggtgcaggtgacagagttttttgtttttttttttgtttttttttttttttcagatctcttcagatggaggcaaggaggcttgggaaggaaatggaggcatggggaggttggtcttacatggctcaacatcaactgctgcttctcagtgaagctatttctgatccttttcctctgcccagtcacagttaatcgcttctcctctgcattgtgtattgtagccattactcttgtaatactataatgtaatgatttctttatcttcctgtttccataataggccataaatctaatagacaaatttaagatttcctatttctccaacccccttccccaccttggattgggtatatctcttctgtacttcctttaaactctgtgtatatctctaaggttatacttcttacattgtatgaaaacactgtctgtacccgcattgtaccatgcattcc

SEQ ID NO: 98073 - DNA, 1411 bp, Homo sapiens
aattttcccagattggctaccctcattcctatgggacatttccagttagagctgcagaatcagtttctccattctgtctgctagtcaaaggtaggaaattaggtagagcagcaagtatcaagatttaatttttgtgactgatctaattatgtagaatgctatgtctgtgctgcagtcctcttactccttttttatacatattctgcattcctcacaactcttgaattcttcatcttctgtctagctttcatttcctcacctctaaactctgggtttatttttctcaaaactacatctgtattgttattcccttttctaatcttcagttaaaacttgtgaaatgcattttgtctatgttttactaaggaatataaaaatttcttaaggtataagctgaatattaactcattttaaaaatctttttacagataattcttctattttcaaaatatctttaaagcacaacaacagggcattagctcaggctcttagtagagaaaaagagaattctcgaagaattacaactgaaaagatgctattgcaaaaagaagtagagaaactgaattttgagaacacatttcttcgcctaaagctaaataacttggtatgtaagctatattgtttttgaattctaattataacttaaatcttttagctgcattattatagaagctttaaaaatatttttcaaatctccaatagtgaaaaattattgaaagtcagtataccatgtaagtctatgtcaaagtacaaactgttaatgggtaataaaatatgtgttttaaatctacattctaaatgtgtgcttgtgtgctgtgtaaaccagtataatactttgaccaacattcgattgctaatcataaacaaagcttggtacattaatacatttttaaaagatggtcatagttcttccggtgttcttgaaaggaaaggaattcccagaatgttgttattcttttttaatctcagcatttacctggctacaagctaaacagaatgagaattatagttgtttcttttccttccaaatttcaactctgttcacagacaggacagtgagagccaatgattagctaggctgcaactatagatctaaatctaaaatgagtagaactttttataatggaaaaaggacctactctacttgtgggtttaattccggtggctgacaaactgttctcttgccatgtgatatattactatgagaagatagaaaaatgtttataggaaaacaaaattgttctaaagtattcaacatatgtgtgtgtgtgtgtatacatgtatgtatgtatgatatgtatgactatttggactatataatactatttggtactatataatataccattttagctgaatgtgatctcaatttttagctcaatatgatatcaactattttttaagttttctc

SEQ ID NO: 98074 - DNA, 1033 bp, Homo sapiens
ttgatctatttgtcttatcattatgctaatactgtactgtctcaattactgtaaccctcctaacttttttctttttcaaagttttctttgtttttttagctattctaggtcttctgcattttcatatgaattttaaaatcagcttgataatttggcaccattcccttgtttctattacagcttagctctgtaataaaaaacatggttgtgtgttgcctaattttctggtgtttattaataattaaaacatgtttgtatctgaaaatttagaaatatggataagtaaatatataaaagatatattaaaatcacccagattttgaattttaaaaagccatttaaaagatgtattataaaattcaataaaatattgcataatacatatgtagacatgaacatattgcatgtatgtaaagatattgtatttgtgtaggtatagtcatgtatttattcctacacatagaagaatgttgaggttatataccaaaatgttggcagtgattatctttcgttggcatgattaaggatgcactgtgttttaaccttattatcacattattctcattaaattattaaaggtaaatgcaaaaattgttcttttactattaatgtcattgtataatttggtactgtgataactaacatgatttaataaggttagaaactttgttttctttatttttttcaaaaatagttccatcagagttcctttctactgtcagctagcaagaagaaacgaattagtaaacagtgcaagttgatgcgtcttccatttgcaaggtaaatatgggcttgaattacactagttcagagtatatagattttatataacacaattagtgtttgtgtgtattgtacagtgttcaggatcatcaacctgtagttatctactaacgtagaaatgagctggtttgtagtgtcttgctataggttgtttctctaggactccaaggaaacttacggtcaatcccccaaccaggtttatttgtaatgtcttgctactttatagttcttttttttcttttcatctagt

SEQ ID NO: 98075 - DNA, 1025 bp, Homo sapiens
ataactgcccatgcatttaaagaaaatttataaaacacataatttctcatttccttcccacttgcctttagggttccattaacttcaaatgatgatgaagatgaagataaagagaaaatgcagtgtgacaacaatattaaatcaaagacattacctgatattccctcttcaggatcaacaacacaacctttatcaactcaggataattcggaagtgttatttcttaaagaaaataatcaaaatgtatatggtttagatgattcagaacatatttcttctatagttgatgtacctcccagaggtgagattgttttaaaaattcattttgagtatttgtattagttacattcatcagatgttcttcctgagggcaattatgtataacagttaataagttagctctcttatgttaccgatttgctaacttctgccatttaaaactgctggtgatagatttaattttaaagtaaatatgctgacaaacatcacacccacagtggcctaatactgttactctggaagaaatatttagaaataaatggacctaatgagcttttctcaatatcttagcttatgatttgaaagataccatatatttacttagttttaccctctttttttgtagatatgaaaattgggggcctagataggtatagagactctttgaagatcatcaccagttaattaatggtaaagcaaaaacttgagtctgggtaatggttgagcaagaaaaaagatggcatttacattttatttacatagtattcctaaatgataatctgtggtgtagtctggtgcttacagatttgccatagattttcagactgggatatggaactataacaattttgaatttagagcttagaattgtttttcctttctgaaaatgtgtgtgtgtgtgtgtgtgtgtgtgtgtgtgggcatatgtatatgtatataatatatacacacacacatatatacacacatatatatggtatacatataatgtatacagtatacatatatacatgtgtgtatatatt

SEQ ID NO: 98076 - DNA, 2776 bp, Homo sapiens
tcagaaaagtgaaagattccagctctgaaaaaaagagagaaagatcaaagagacagtttaaaaatagttcagatgtcgatattggggaaaagattgaaaacaggacagaaagatctgatgtcctggatggcaaaaggggtgcagaagatcccggttttattttcaataatgaacagctggctcagatgaatgaacagctggctcaggtgaatgaactaaagaaaatgacccttcaaactggctttgaacaaggtgacagagaaaatgtactgtgtaataaaaaggagaaaagaataacaaatgagcaagaggaaacatactctttatcccaaagttcaggtaaatttcaccaggagagtaaatttgataagggtcagaattccctaacttgtaataaaagtaaagcttctagacagacatttgtgattcacaaattagaaaaagataacttactcccaaaccaaaaggataaagtaaccatttatgaaaacctagacgtcacaaatgaatttcacacagccaatctttccaccaaagataatggaaatttatgtgattatgggacccacaatatattggatttgaaaaagtatgtcactgatattcaaccctcagagcaaaatgaatcaaacattaataagcttagaaagaaagtaaaccggaagacagaaataatttctggaatgaaccacatgtatgaggataatgataaagatgtggtgcatggcctaaaaaaaggtaatttttttttcaaaacccaagaggataaagaacctatctctgaaaacatagaagtttccaaagagcttcaaatcccagctctttctactagagataatgaaaatcaatgtgactataggacccagaatgtgttgggtttgcaaaagcagatcaccaatatgtaccccgttcagcaaaatgaatcaaaagttaataagaagcttaggcagaaagtaaatcggaagacagaaataatttctgaagtgaatcatttagataatgacaaaagtatagaatacacagttaaaagtcactcactctttttaacgcaaaaagataaggaaatcatccctggaaacctagaagacccaagtgagtttgaaacacctgctctttctaccaaagatagtggaaacctgtatgattctgagattcaaaatgttttgggggtgaaacatggccatgatatgcaacctgcttgtcaaaatgattcaaaaataggtaagaagcctagactaaatgtatgtcaaaagtcagaaataattcctgaaaccaaccaaatatatgagaatgataacaaaggtgtacatgacctagaaaaagataacttcttctctctaaccccaaaggataaagaaacaatttctgaaaatctacaagtcacaaatgaatttcaaacagttgatcttctcatcaaagataatggaaatttatgtgattatgacacccagaatatattggagttgaaaaagtatgttactgataggaaatctgctgagcaaaatgaatcaaaaataaataagctcaggaataaagtgaattggaagacagaaataatttctgaaatgaaccagatatatgaggataatgataaagatgcacatgtccaagaaagctatacaaaagatcttgattttaaagtaaataaatctaaacaaaaacttgaatgccaagacattatcaataaacactatatggaagtcaacagtaatgaaaaggaaagttgtgatcaaattttagattcctacaaagtagttaaaaaacgtaagaaagaatcatcatgcaaggcaaagaacattttgacaaaagctaagaacaaacttgcttcacagttaacagaatcttcacagacatctatctccttagaatctgatttaaaacatattactagtgaagcagattctgatccaggaaacccagttgaactatgtaagactcagaagcaaagcactaccactttgaataaaaaagatctcccttttgtggaagaaataaaagaaggagagtgtcaggttaaaaaggtaaataaaatgacatctaagtcaaagaaaaggaagacctccatagatccttctccagagagccatgaagtaatggaaagaatacttgacagcgttcagggaaagtctactgtatctgaacaagctgataaggaaaacaatttggagaatgagaaaatggtcaaaaataagccagacttttacacaaaggcatttagatctttgtctgagatacattcacctaacatacaagattcttcctttgacagtgttcgtgaaggtttagtacctttgagcgtttcttctggtaaaaatgtgataataaaagaaaattttgccttggagtgctccccagcctttcaagtaagtgatgatgagcatgagaagatgaacaagatgaaatttaaagtcaaccggagaacccaaaaatcaggaataggtaggttaataaccattatgaaatgataaagttttagaagtgttttgttttttgttttcgttttttacttagccagtgaagtattttctaactggtatttttatggaatttaaaaacaatatataactgagtacatgatccatagaaatagcatgaaggaataaagaaagtttcatactttgggaaataacagtgagagtatcttggacatttacaactataaatggatttggcctttaccacaaacttgtctaataaagaccataggcaaataatttgctttttcatacatctgaaggaaattgaatgttttaaatgtatataataatgaattgta

SEQ ID NO: 98077 - DNA, 1050 bp, Homo sapiens
tatatgtgtgtagatccctaaggttttggcgggtaagtcaattccaggtaaaagcacactgaagcaaaagaattacaaaggtttagagttgcaggatttgttagaagactggtgagacattttttatctttgtgctcctcatggtgccttacacagagtgagtgatcaatggcatatatgttgaatgaactgtaatttgtgtgcttccatgaaaagagttgaactaggatgaactttgggagccatatgtgatttcagaatgaaaaagttataggctactttgacagtttgtttcaaatgttagtctctttcctctcaaaattgaatcaagatttaaaatttgctgtggtgatttgcagaccactatatagctcatatctatttgtatctctatatactttttaaaatatttgtgaaaaataatattctttttcaggtgatagaccattacaggacttgtcaaataccagttttgtttcaaataacactgctgaatctgaaaataagtcagaagatctatcttcagaacggacaagcagaagaagaaggtgtactcctttctattttaaagagccaagcctcagagagtaagtatttcaaatgattttagtatgccattataaaatatatccttaaaaaaatttctgcctgaattagtatttgagcacttctgataattcaataaaatgtatattattgatatgtaacaaccacagtatgatttgggtaagagttgaagaaatatgtcctttggacaggctatttttggggggttggagaattgtctggatttaaattgatttgcttttggttagttcccagttctactactgtcatattttaaattgtagcctgatacttataatttttaaaatttgtggcctgtgatttgcaagccatttttgttaccccatttgtttatttcctaccttgttccctagaagtcaaagtggtttatgtgtcctttactctcaaagaataacagtcctttctctttatttttgtaaatttcaaacataccccaacaaagagaatagtgccctcctccaa

SEQ ID NO: 98078 - DNA, 1034 bp, Homo sapiens
agtgtcttttgcaatcaatttttctctgatcagtgctttcaatgtatcttgattctgatacatagtgttttcaatgtcgtttttaagtttctccttttctttaggagttattaggaggttttaaaaattccaggtagatgaacctttctggttttttgtttttatttgtaaatctagttttattgcattttggtcagaaattatttattgtaatatttctgctttatggaaattgccagtattttctttgtgacctactataggatcagcatttataactgtgctgtgattgcttagatgtatattctccataatcaaggtctaaagtttgatatatatccatgagatttactgtatttattatgttgcttagatcttctgtttcttattttttgtaaataagtgatctgttttgtactaaggttatactaagagttgtatattaaaatctactgtgtcctgtgtttccatgtatctcctgtagtttttgcttcagaagggtggttgctctgctttttgctatgtaaatatcatgattattacttattcattttggattatggcctttattatattaaaaatgtcctcatttgtcatgttcagtgctctggactaaagacttaaagtctttaagatataaagactttaaaaacatatttatgagaccttcctgataactcctaccactcctatcttcaatacctatgatgatcattccataatagcaagcagctttaattaggatgtactttcatgggagctactagaagctgtgatatacctagtgtataccatttccaatccaaaaagaaggaagaaaaaaaagtggcaactggatggtcatcactcggaatttatactgaatgttgtggcttttgcttttaaaaattttaccaactaagctgtatagcaaatcatctgcatgcactgtacatttaaactaaaatagaaccttatttccttacagcattttgctgtgttttatttagaataggtacttcttttgaaaggattaattaaactctatctaatta

SEQ ID NO: 98079 - DNA, 1028 bp, Homo sapiens
tctttagggggacacatcattagcaggcatccagattcagatctgaatcccatcctggctgtgggtaactgtaccctcaacttgctatcaaaaggtaagtgacagcccctacttggagattattaagctgtttctctacccctttttctctctggggaggcaggaaatccagtcttgaaaatgacttttccctataatatcaatacatttctctgcttttctggatactggaaattttgtgagtcttgtcttaatagcacaggctttcttcccctgtgtctttctggttttttgtttgtttgtttgtttttcctcatactggtcaccctacactggacatgtttgtgttggttaatgtccggatgtgatctgattattgctgggaactacatactattgagaactattgggtccctttgttgaagacattctccaggtggtacaggagtgttgtggcacccacatcgtgctttgagctcacacttaatttatcattgatggaaacatacaggtctttttcaggtgaaaaatgattgggcctcattctatatttatttacttgatttttgttattaaaactaagtccacaacatctaatttatcgcttcttccaacttgcttgaaaattattaggaagttctaattggtcctctgtaaatttgtggggttttttttcgttaaaaaatatggactagttttctatcatctgcattgttaaatacttactcttcataccatttaaaccataaaactatctttttttttttttgaaatggagtctcgctctgtcacccagtctggagtgcagtggcacaatctcagctcactgcaacctctacctcctgggttcaagcgattctcctgccttggcctcctgagtagctaggactgcaggcatgtgccaccatgcccagctaatttttgtatttttaatagagatgtggtttcactatgttggccaggctggtctcgaactcctgacctcgggtgatccacccgcctctgcctcccaaagtgttgggattaca

SEQ ID NO: 98080 - DNA, 1052 bp, Homo sapiens
ggggctaaatatctactctccactccccctaccttccagccaaataaaagccccaataagcaaatataatagatgccactccccccaccctcaccacttcaaccagcagactcgtgattgtctgccagagaatcccagcatcagatacaagctctggctttgtggaaaagagttgcctcacattgtgttcagagattaagctctcaaagtctaaagatcatcaactggatcagagcaaatttaatcaaagtttagagcagggaaatatgcccctctccctatacattacagttcttttatcactttcctgactaagaaaaattcagaaaattggctcaaagttattcaaagagcaagcagccagtgaagttgaaaaagatgaaacttttaaaaataggatttataaaacctagcttttttttcaacctggaatctctttaatcttagattaataagaaaagcacatgaacagattccaataggaagtgtgttatcaatcaaaatagaacaaaaacaaatatatctctgtcactatcacaaagatttaatctggcacatgcttttcgagtttttagtagattgaatggggcaacgatcaaaactcttgaatcaaggggtaaggctgatgaccataatggaaaaaaatgtgttccctaccggaatctgtcctgaataataatcatcaacaacaacatgagcatagctaggacctatacagagctcactgtgtggtcaacatggttctaggtcagtttcacacattaacttactaaatgctcaccacaatcctatgaggcaaaaactatttttatccccattctgatggggaaactaaaaggcagggttacccaaggttacatagctagtcagtaacaaaaacaatcaacaaacactctgtcaaagaacctgggccccaccggtgctataaacaaaccaacccagtttttgaatgggggaaatggcagaatcacaatagcccatccctctaaggggtgttgtctagacacctactggtggccagaaggaaacagagataagagaatccccaacta

SEQ ID NO: 98081 - DNA, 1050 bp, Homo sapiens
cccagcactttgggaggctgaggtggatggatcagttgagtccaggagttcaagaccagcctggccaacatgatgaaatcccatctctactaaaaatacaaaaattagccgggcgtggtggcacgcacctgtaatcccagctactcaggaggatgaggcaagagaatcatttgaacctggaaggcagaggctgcagtgagccaagatggcaccactgcactccagcctgggcaacagaacgagactctgtctcaaaaaatatattttttttaatttttagccaagcagatgtagtcaaatgcgactccaatgtggttactattgctaaacagcgacatctaagacagcagccactgctaaggttgaactaagcctattcccacccagaattttgtatctgcttcatgtgtgtactttccacaggtagtctgtgtgggccagatcatctgtgctgtggttgcagaaacagacgtacaggcaaaacgagcagctgaaaagataaagctcacctatgaagatctggaacctgtaatcttcacgatcaaggtaaacagggctggccggtctctccctacggttgtagaattaaaagtacctttgtaaaaatcttaatgaaggatctaattgtttttccttgccactggtttgctctggaaaaatcaactttctttggaaaacattacttgcatgagctgaaattatctttggttccaaggagtggaaaagacagaagtttctcacattcaaaaagtctagaagtgggcagtccaggacttctatggcattctgtgtgtttaggatccagccttcttatatctagtcactccatcatgcattgcttcctggagggcacatttggtccacaatggccacggaagctctagctgttacatccacattccagacagctgagaaaataaggtgatgaagaagggtgtgccccctccctttaaggacacttcccagtccttaaagggaggcatgtacattgcacatgccttcctccatctctttgtttggaacatggtcgcatgccacacctaactgcaa

SEQ ID NO: 98082 - DNA, 1051 bp, Homo sapiens
tatttttcagatccctgagtgagaggttcttgtacctgagctacctaagtagtctaacacaagcatttttcttcaaggaaaaggtaaacgaaaaaaaaaaggcagattcccaaacctcacccatcatgcacatttgacttatctcatgttccctggagagtcacatttaaataagaaattagtattcatcgtccgggatcatcatagtgtccccagccctcagttatgaacgtagcttccttctgaaggtttcgctaatccttcttgctggttttctctgcaaatctagaagacctttccttggacttcccatctctgcagccagcctaccgctctaattctcccttgcttgtttgacacctttcatctgtcccgggagacagtgattttccagagcatactggcttttaagaaaaaactaacagtggaaggaaaagtcggaagaactggcttttatgcttttttgtttttctgcaatttaggatgccataaaacacaattcattcctgtgccgtgaaaaaaaaacttgaaaaaggaaacgttgaggaggcctttgaaaaagtcgaccaaattgttgaaggtgagctcccagggatacttaatagactctgcctgattctattctgaagcaaccatcaaaagtgtatgatttcccctcagaaagtccagcctctaaagtcttggtgctttgccaaatttctcttacatctcttcctttcaaattgtgtgtgtgtgtgtgtgtgtgtgtgtgtgtgtgtatgtgcagttttggcgttggtgggtagggagcaatagcataaataaaagaaaatctctaagattttggtttgggcagagtaaggaacaaaacttggcacttttaatttgtgatccagaactattgtctctgaaacagattgccacaggacaaatgcctggttccttcgtcaggataaatccaggccagccaggcagggcacggtgactcacacctgtaatcccagcactttgggaggccgaggcaggtgaatcacctgaggtcaggagttcgagaccaacttggccaacatgg

SEQ ID NO: 98083 - DNA, 1002 bp, Homo sapiens
cagagtgagactctgtttcagaaaaaaaaaagaagaagaagaagaaatacctgaggctgcgtaatttataaagaaaagaggtttaattggcttatggttctgcaggctgtgccagtgtggcacgagcatttgctttcaggtgagggctttgggaaatttacaatcatggcagaaagtgaagtgggagcagggacatcacatagtgagagtgggagcaagtgtgagtgaggtgggaggtgccacacacttttaaacaaccagatctcacgggaattcagagtgagaacttacttattaccaaagtgttggtgctaaagcactcatgagggatccgcctccacgatccaatcacctcccaccaacattgggaaatacattcaacatgagatttgggaggcgagaaacatccaaaccgtatcaccaggtaaaaagggctataaaataccattaagaacattggggtttcatgacttcagaaattttaagaatttcttgcctaggaagaacaatgtacaagcaacagatttaattgcctttgagaaacgcttttggtgagaactctttaggaaggactctgcttttccttatgtgcctggtgtgctgtaatggaggcccaaagatagtcatggtgcttgtgacatgcactgtccagtgagggacatggtacaataccaccacgaatgtatcatacaaggtgctattagaatatggaaaagggagtgaccaactccacagggctgagaaggaaggggttcccaaaagatttggaataggaagcatttgaggtaggtcttggcagaagagaagaggttggtcagatggggaagagggaggtaggagcagcatgtggagcagcctgaaatgtagctgtcacattctagagcagggagcagcttgctgtgtgtggtgtagggtgtatgtgtatctgtgtatgtgtatgttgggacagggatggcaaagatgaagagggggttagcttgagaagggctaagagcccatcct

SEQ ID NO: 98084 - DNA, 1051 bp, Homo sapiens
tttttttttttttttgagacggagtctctctctgttgcccaggctggagtgcagtggtgcgatcttcactcactgcaacctccgcctcccgggtgcaagcgattctcctgcctcagcctcctgagtagctgggattacaggtgcgtgccaccacccctggctaatttttgtatttttagtagagacggggtttcaccatgttggccaggctggtctcaaactcctgacttcaagtgatccgccggcctcagcctcccaaagtgctgggattacaggtgtgagctgccgcgcccagctgatggaaagtttttatttaagatgaaaaagcaactaaactaaatagaacttaatcactgccttattgctattattagtagtactactgctattacttggtatgtactactattagtagtaatagagtggtcacagtagaccttaaatttatagaggatgttactgtttacaaaatattttcacatgcattttataattcttcacagaaactttgtgagaaagtaaggctgccttgctttcaaagcaagctaactatagatagaattgatgattattagtcttccagaacaaggccatggactaccattaagtaaacttaatgtcaatttatctgataagaaaaagtggaaccttttttctaatgatacatttcaggtcctactcttaaaaagcagtcttggaagatttcccagatctttctgggataaaattagttttctttaaaaaagcagtttcattttccagaacttaaccagtatagaaggctttagcatcagagaactttatacaataaggcttgcccagcacagagatccttagcactaggtgactagttatagtaagtgctgaaatgaaattctctgttagttctctatacctgtgctttgaattcaactcacatttttcaatacctaaatgccacgaagaactttcagaacctaagcgtgttaggccgttcttgtgtttctataaagaaatacctgaggctggtgcggtggctcaggcctgtaatcccagcacttcgggaggcaaa

SEQ ID NO: 98085 - DNA, 1100 bp, Homo sapiens
ttaaaggacaacgtttcacaaataaaaatgataactaatatgtccctatatgtatcaggccctcttctatgcactttatgtagtaaccccatttcatcctgaaaactaccctgtaatctagacactattattagtcccattttacagatggaaaagccgaggcatcgaggtcaggtaacttgtctaagatcatagcgctagtaagtggaagaggtccagttgaacccaagcagtctggcttcaccattataatgcaccgccttaccaccaagatcttatttattcattcaacaaatatttattcagctagagaccagtagagatagtgacatgttacgcctatggcctcacaaagcttatcttctatttttgccacgttttaaaattgtatcatctttccccagtaccatcttgatttaggcatctattacccctaactaaatgggacttttgcaataacttcctaactgtactatcccctttctcaacatttccagagcaatcttctcaactgcaagctgaatcatttctcttcactgtttaaatgcctctgtttatactcagggatagctctgaccaatgtttttcacctttacttcccatcacatttgtggttcttaacctgttattaccatcattgtggggtatgtagcaaatgatttttgactaaaaatgatattaaagtaagcagattattttctttaaaatgtaaagtggattaaaggttttcctgaactcctggcctcaaataatcctcccaccttggcctcctgaagtgttgggattacagaccacaccttgccacttatcttttctctgcttttgggtgcacccatgggaataggcaccgtgcagctagcaggggaaacgttgtttgtgaattgtattatggtaggaaaaggttccaaacaattgaactctatgctttggtcagacaggacacatcttgtcttgacctttcttgagatgtccttccctcattttccactgtcaaaatcccactattgtttcaagccttatctcaactactgcttttttcccataagcctttcttagtcatggatgtgaacacattccttctttgtaattgggctacaggc

SEQ ID NO: 98086 - DNA, 2349 bp, Homo sapiens
ccgccgcctccgccgctgctttcgctggagggcgggcggatgtacggggcgcctggggccccggcgcaaagcgcctcagtgactgtggtccgctcgttgcggcggccgccaccgcaggcgacagggtcagtggagaaagagccgcgggaccctacggcgccccgctgtggccgatggggtcctgggcgggaagcgggtgatctgtggctcgggcgggaggcatgggaagggtgtggattgggagacacgttaccggggaggaggctaggactgtgggatatgggcgaaggaggctgggctggctgttagttttgcaggcctgagtggtgcaaggcggccgctgttgcggtcacaggcatgacctagggtaggatggtgctgcccgtaaccaggcttgtcagaagaaggggttcaccttttgacagtgttttagaattggcatacacattttggatgcctgctgactatggtgataatctctctttgcgttctgcgatgcttagtggtcgtggaagatgtaagtgaatgtaaagaggaatgtggagaaaactgaacaattaggtttatgacgggtgatcactgtagcactacaatgtcgcttaaaagtagttcacagcactaatttgaagggtttcttgtagagagaaatgcacattttgacgtacatttgattcaagtgcaggtaattctttgtgcctgtatcgggtataattgccagctttatatcctgagagtgggtgttccatttgattcatatgtgactagactaaggtttgatgttttgctttaaaaattagtattatggcactgatattaaggctttatttctcctttcctagggtgtcttttatgaataatcaaaagcagcaaaagccaacgctatcaggccagcgttttaaaactagaaaaagaggtaaatatttacgttttaatgtctctcttcaaacctccagaacatcttgtgtatcttgccttctctgacaggtacttgcatattactaaagcctcaaaagaagataccagaaagaaacttgaatttctcgttgactgccatttcacatacacctttaatatttctactgctttactgctcaagccttaatttttagtatcaatatatctctaagccggttagtgaatcttcttttcggtgtgaaggtaaaatatttttaaaaataaaaataagggctctgttttcactagcaggcagtctcatttaagcaaacttaaatgagcaaaaatgttaatttataaaaggagaactcctaatgtagtcacccagattttgtgaagatttgtgagagaaaactcagacttcacccatggaagttaattgtggaacaggattcacattgtaatgtcttttgaaatacagacttagtagaaaaagtattagaattatattactattttttttttgcattagtgtgtacttaggtgagtattgaattctgtagcaaagtgctgtgctagtgatataaagctaaataagacgtagtctcagatatatttttactgtttttggtcaaaagcatattaaccttgttttacaggtggttttgaggaaatgaagaactaggtcagctactggttataagttgtgtttttctttttcttccttaagtagcagacattttgagatatatattgtagaattttaaaatcactaatcataggctgtctgtccccttgtagtagtggtggggagaccaaagtgtgatttgattctaatctttgcagattcatttagatttagctggtaaattttcttaaggagctggagttgtaaactagaacagtttggcagtaaaatgggaaagtgtatctcttgaatatgtgggttactgatgttaccttgatacaaataatagcaagtagctttagcattcttattattagcatcagggagagatgtaacttccccggttccagatagagatgattcgtggcctggctgttgatggttagggtactgggtagggtatacaacactccctgtctgggactgagggagtttccagacacaagactttcagtgctaaaaccaggaaagtgctgggcactcagaggtgtttgtcaccctagtactgtgtgaacagatgtcatctagcctagattgggaaagcaaaaccctattatgaagtgtgtgaaagcaactcagtaaaggtcaggtatgtgcacaaggctgtggtctgggagctttctattttattaatgtcatttggtatttacaacaactttatgggataggtactattcttatccccattttacagtaggggaattctggcatggcgagtgagactatttgcttgaattcaggtggttaaatggtggtcaggatttgaa

SEQ ID NO: 98087 - DNA, 1368 bp, Homo sapiens
gtttctgtcattgggtgctcattaaatgtactttctaaagctcaccttcataaatgccaaaggattggttcaatttttttgtttgtttaatattatggacatttaaggaaaaggatcaagagctccagtgtctggacaaaacccaaaggaataaaatgtacctgttagaggatggcctaaattttggaaaagccaagaggcagtaggagggcgttcccagtagaaattggcttatggcagtaggaacacaagacactagcacatttagatcacttgtgaaattatttgaaaagttgcacaattcttgtgagtgggccatcttgtcttacacttgcagaggggaaacatgcaaaggatgtgaatttaatctaacttatttaacaattgcatcttcataaggtgatagttttgtggcattttggtaaatcttttaaaactaaatgttttgggtcccttgtccccccagatgaaaaagagaggtttgaccctactcagtttcaagactgtattattcaaggcttaactgaaaccggtactgatttggaagcagtagctaagtttcttgatgcttctggagcaaaacttgattaccgtcgatatgcagaaacactctttgacattctggtggctggtggaatgctgggtaagtgtctgtggtttgtgggcttaataatttagaaaggtataatatatggagattatggagagtctagaatatgaactatttggcaaacttgttaaaatggagtgatttttttggttttgttgtattttggttttatccaactttagccccaggtggtacactggcagatgacatgatgcgtacagatgtctgcgtgtttgcagcccaagaagatctagagaccatgcaagcatttgctcaggtaaatgaaactttacataattgttttcagttggctactatccatgtggtatatttgaggaatattctacttttaagagttgtggttagaaagttgaaggaatttgattttaaattttagggatactgttcttggtgcaacgggatgaattagaaacttaaggtgtgttaaggcgaacaaaatagggaaaaatgaaattaactcttctgttcctatttgtcctgaaattactcaatttttaagaaaaatgtcaagctggaaaagtcagtttcgtattgtgatttctctagtttatctgcatacatttatttttaaagttaaatgagttgtgagctgattagcttgttaatcaagatctcattggaaagtttcatacgtagttatgtttgtgttactgtaagcaaagaattaaagtacatctaacctggacattcttatgtgtcactaggaattcttctcaagctggtttaagcagctcata

SEQ ID NO: 98088 - DNA, 1050 bp, Homo sapiens
agaggaatgttaaatcctaattccgccacagatttggagtaattttgcttgtttgtttgggttgttttttgagacagagcctcactctgtgtcccaggctgggggtgcagtggctcagtctcagctcactgcagcctttgcctcccgggttcaagcgattctcgtgcctcagcctcccgagtagctgggattacaggcatgtgccaccatgcccagctaattttctgtttttagtagagacagggtttcaccatgttggctaggctggccttgaactcctggcctcaagtgatctgccctcggcctcccaaagtgctggggttataggtgtgagccaacacgcctggcccaatattgcatatagatgcccagaaaacttgatatgtttatcaagcaccaggcactgttctaatgatactaattcactcaatgtttataaaaaccctgtgaggcaagttttattatccacattttacatgtgaggtgcagaggttaagtaacttgcccgagatcattcagctaatgagtattgtaacttagatgtaaacttggatggttagatcccagagcccacgtattgaacaggtagccagtataacatgctttactgcttctcttattgtaatgcagttgctgttttaacccttaattgttttactttttacagctgctgctgttcttgaagggtttttcagagtcggagaggaacaagctagctatgttgactggtgttcttctggctaatggaacacttaatgcatccattcttaatagcctttataatgaaaatttggttaaagaaggtaatcagccttaaaggatggtcttcagttgactcagagtggggtggataagagcatggtttactgttcatagatgtgacttctgtgaaagtcttcgtttattaaccagccttaaatttaataagttcagtctaattcactagacatttaatgaatacctttggcatccaggtttaatggctttctttaggcatacaacagatacccagatttagacaaaatgttgttatatgtaataaaaataaaa

SEQ ID NO: 98089 - DNA, 3033 bp, Homo sapiens
attaataccaattgggagacttggagaagatgacgtttggggaaaatgtcaagctggaagggaaaatcagttccctgtttggctccaattgtcggattattctctacagtaatttttttgaagcttttttttttttaaaaaactgcttgcagtagtgagtatttaagttaccttactgtaattctcacaacagtcttgtcaagtgtagagactgttgccctcaatttatactttggaaaacactttaagtaacttggccaagaatatacaatttgcaagtggtagactagggagattggagaagtgataaactgtggcccaggaaagttcagggttaagtttgtgaggaaagtcagtaatcccatgtgattgaactatgaagggaaggatatagggggacacagtgattgaaaccagggaaggtacttctgttaattaagctattttcttttacaggagtttcagcagcttttgctgtgaagctctttaaatcatggataaatgaaaaagatatcaatgcagtagctgcaagtcttcggaaagtcagcatggataacagactgatggttggtaactttttttcattcttcccattcttgccaaggatgtaaatgagagaaatttctcatttttaagactgtgaaaagaaagtgtttttcttaatctgatttaaagaaagtttaaccagataaattcttcttttaggaactctttcctgccaataagcaaagtgttgaacacttcacaaaatattttactgaggcaggcttgaaagagctttcagaatatgttcggaatcagcaaaccatcggagctcgtaaggagctccagaaagaacttcaagaacagatgtcccgtggtgatccatttaaggatgtaagtttttgtttaaaccgtctttttatggctaagcttctggcatagagattttcactaatttgaggaacttacttcaccaggatgagattgagttaatagtaacaggatgttatactggaactttgcctcattcttttgcatatgcttcttcagtgcctgactgaggcccagaaatacaagagactggagctcagggcacctttcagttgtaaaggtctctttttatatgtggtacacatgtggttgccagttgcatggaaaaggagttgttagtttttgttaaaggtctaaacttgatgtgtgaagtatgtacataatcaaaactgacttctgttactaaatttggattcatttgcagataattttatatgtcaaggaggagatgaaaaaaaacaacatcccagagccagttgtcatcggaatagtctggtcaagtgtaatgagcactgtggaatggaacaaaaaagaggagcttgtagcagagcaagccatcaagcacttgaaggtattagaactatgccttgacaaaacaaactattctgctttcacgtggtgataagtgaactgtgactatatttttctaagaggatttatcacatcctgtggttcctagggatggcccaccagtaaataaacaaatagtaacattagctattgatgataatgctctgaattgggctgtggttcacaggttaaaaacaagaatatggcctggccaggcacaatggctcacgcctgtaaacccagcactttgggaggcaagggcaggaggattgcttgagctcagtttaagacgtgcctgggcaacatagtgagacctcatctctactaaaaatcacaaaaaatagccagtcgtggtggcgcatgcctgtagtcccaactactcaggaggctgaggcagaggatctcttgagccctggagatcaagactgcagtgagcttatgatggctttgtcagacaaagcctgggtgacagggtgagatcctgcctcaaaaaaaagaacatgatgaaaaggaacttcagcttgtaattagatgtttgcttttgaagggggtattggaaaataggaatttttccccccctctaaaatactaatattgtttgacatttacttggactacttggtatagtattgtttattttacttagctacttagattttctgcttttttttttttctcttgagacagtctcactctgtcacccaggctggagtgcagtgatgtgatctcagctcactgcagcctccatctcctgggttcaagcagttctgcctcctcggcctcccaagtagtgcctggctaatttttgtatttttagtagagacgagcttttaccatattggccaggctggtctcgaactcctgacctcaagtgatccacccgcctcggcctcccaaagtgctgggattacagacgtgagccactgtgcccagcctattttttaaatttctggtaaataagttatagtttgcagtgattataaaagatgagttaagttctatattgtctgtattgtaggagttttgtaatggatggttatttgtaatgaatgactaaatcttttctctgttcctttaaaagcaatacagccctctacttgctgcctttactactcaaggtcagtctgagctgactctgttactgaagattcaggagtattgctatgacaacattcatttcatgaaagccttccagaaaatagtggtgcttttttataaaggtaatttagattttgaattttgtaaataacacttaataaaaacccttataaacacaaaattatccaaatgatgagttatctggacatcagctccctgaaatattttacttctagttatgagtcacctctgattaaattgggtgctttttagtgcactgatacttgtttaaaacatctaaaccctattcacaagttgaagtatgaaatctaaagccatcattatgcgtcctcaaacttgcctcctatactcttaaccaggtatacattcccaaagttcagctaggtgtggtggctcatacttgtgaccccaacactttgggagcctgaggctggaggatcgcttgagcccaagagttcaagaccggcctggactgcataaggagacctcatctctacaaaaaaaataaaaaattaggcagggaatggtggc

SEQ ID NO: 98090 - DNA, 1752 bp, Homo sapiens
aatcctagcactttgggaggctgaggcgatcaggtcatttgaggccaggagtatgaggccagcctggacaacatgggaaacccagtctctactaaaaataaaaaattagccagttttggtggtgggcgcctgtagttccagctacttgggaaactgaagtgggaggatcacttgaacccgggaggcagaggttgcagtgagccaagagggtgctgctgcattccggcctgtgggacagagggagactctgtcttaaagaagcttcaaagttataaatgggaacttttgccttctgatacataatgtttgactgtttttttccccttttctagaatctgaatctgaagctgaagaaggtgactgaattttgaaactacaccctcagtaaagcaaacaggagttgtagataaaatgtcatgtctcatgtgtcctggttcttacatcttcctacctccctgtatcaagcatgatataagggctttcatggcaaattttattttaactgtttctatggttgctggaaatgttgggtttagtttctaaaaccatgttttaagtagctacaggagctatagatttgaatctaatgttgcattagtcttttcagttatcttctacctcctgtattttctactgtaataatgtaatttaaggccttccacaatgaacagttcactttattccctgggttttctataaacagttttaaggatatgatttggttaaaaaataatttgttataaaaattctgtttgcaaattaaactggaaaagtatccagagtctcaaaaggcaatgatttgtgagataatatggcatgcccggagccctgctcatcaatgaaaaacccatatgtaataatcgaattcatttaacatgaatcttgagtacgtggaccattgcttgcatgttaactttttgttttgttttgttttgttttgttttgcatttttaactccagatatcctaaagctcaattgtttggtctctggttttcatccttagagaagccatggagaacagacttgaaaagtttaggaaatcataatgtggcagaggtggtgggaagaagaaagttgagctttttccccttgagaaacttctgcatttagtttctatctttccaggcaaaacaaatgggtattcttttcatacaaccattttcaaatgaaccttagaaaagtcttaacatttaaggtattttatgcacagaatacacttagattgataggaaagaactcgtaatggagtttgagtaaagaaaatgactgatgtactaaacccagtaaaaattgttgaaaatgttaaaggtcagcatgttctaattgggaatctagatatagcttagatttcctattggcttagagtatttgctataacaaatgaagtgcaatgacaattatatattcctactcggtcatactggactggcttcgttctcttaatatactcagtaatgactcaagcctctggctattaacataccctagttgccgttttttaattgccatgagccaaatacttcttggtatacaattgatccatttattttaatggctgccttttcattttcatcttttcttgctgctacccatctatgtatgtagtcattggggggaaaatgtagccacattttttatgggaagactttgtgttaaaagtgaacattttgaaggtttttaactggtgaaactagcctggaataatgccaccagagactgagtggaaatcgccccttttgaaggtgccattc

SEQ ID NO: 98091 - DNA, 1116 bp, Homo sapiens
ctgtatctgtataccattaagtaataattagactcccaaactgtaaaccacctacacagaattctggtgtagctaaaactacattaatatttctacaaccaattcattgcatgtttcttccatacaaagtgtgccattttatactgtgtatagtgaaaaagtgtgtcatcttccagaactacattattatctttgatcgtagtttgtttcttcataatgacactgtagtgtttacttagtagaacattatagtaagtggatatcacttgtgacagtaatagtgtaaagaaagggaatgctttataaaaagattgcagattccattccatataaaaagattccattctgaatcttaagtggtaattttagaattcaggtgccagtgccagcctatggcctcaagtatgtaattcttaatatagatgttaaattgtacttttaattatgattggataaatgttttttctaactgtcagtttctaaggctgtctccttagaaactaaatgagtttttagagctggttgtaagtttcttagccttactctgtgagttatagatgttatttcattctatatatagatgtttattccattcttatttaaaaaaaaaaacctccatataccaaaaatgctacaggatattttgaaatagcatattttagttaggggaaatgcatgtgaccaagaggttggacttctaattcagtttttcaaaagcttttttccattatcatacccccagcctttttaggcttttttttttttttttttgagacggagtctcgctctgtcaccaggctggagtgcagtggcgcgatcttggctcactgcaagttccgcctcccgggttcacgccattctcctgcctcagcctcccgagtagctgggactacaggcgcccgccaccatgcccgactaatttttttgtatttttagtagagacgaggtttcaccggattagcgaggatggtctcaatctcctgaccttgtgatccacccgcctcagcctcccaaagtgctgggattatgggcttgagccaccgcgcccagctagacttttttctaatagagtcccccataaattttattaccatagatacgctgtgtatgtactgt

SEQ ID NO: 98092 - DNA, 1051 bp, Homo sapiens
agtacatttaaaaataccttagccgggcttggttggtgggcgcctgtaatcccagctaggaggctgagacaggagaatggtgtgaacccccaaggcggagcttgcagtgagccgagattgtgccactgcactcccgcctgggcgacagagcgagactctgtctcaaaaaaaaaaaaaaaaaaaaaaaaaaaaaaaaaaatatctatctatctatctatctatctatctatctatatcttcatcccatcaactcattaagaactgagactatactcctagcataaagatgaaaggatgataagtacactggaaaataaaaataattagatttgaaatgactgttaattgcctctagttaagctgggagaaaaaagtgaagagaaaggagtcagaaagcctttctgatccagtttcatataattatgtctaagattgttcagatattaatccacttaagagtttttggacaaaagccaattataaactcattactccaaagacaaaggtacttgtcacatcatccagattccacttaaatcaagtccactgaaaacctttttattcctggtattttaacctgtaggccttagtaggctggggaatagaaaaacttcgtattgatactagaggactaatactgagcatgaaaaatcatagcaaggcaatttaccagaatttgcaaatacttatcaacctattttatatggcacctgtagacagcatctgaggaatatttgtacaaaggtaatttggtaatttaagtaacactgtacactaaaactttggcatctacattacatttaaagccaaccaatagttgtcagttcctgcaagcagcctacttcagtatgagagcagaggtttatcagtgttatgcctacaactttaattcattcatctagaggattttcactgatttttatagaaagaacccaaatgattctacttagtaatacatttataatcaagaaagaatctgttaagaccttgaaagacagcaggaaatgctttgtctgttgcctgtggtggggtaaggaacaaagcacaactg

SEQ ID NO: 98093 - DNA, 2648 bp, Homo sapiens
tggctaattttgtttttgtatttttagtagagacggagtttcaccgtgtagtcaggatggtcttgatctcctgccctcgtgttccacctgcctcagcctcccaaagggctgggattatgcctgtagcgtgagccactgtgcccggccaattcagatatatatatatcttaatagaggtgggatctcgctgtgttgcccaggctggtcttgaactcctgagctcaagcagttctcccatcttggcctcccaaagtgctgggattacaggtgtgagccactgtgcccagcctacattacatgtgtttttttttttaaagtattagtgttaactaactttttaatttctttaacaaacattgagtattttttttccttaaattttgctttgctttgcagccctagggtggtcccaaccatgtgatgtctggagcataggatgcattcttattgaatactatcttgggtttaccgtatttccagtaagtgacaatgatctatttcaaccttgctttgcacaagaaaggtgcctgtttatatgaataaatacttttgcttcccccattatagactattaattgtagataagcataaataaactaattcatatttctttcataattgttttatttaaaacatctttcagtatataagcaattatccgtgtccatgtagggaatcattggcgagtttgttctgcaagccttaatgttagtttttttgctgtcagctttaactgtgtctgttttggtggtcatcttccccaagtctgtttttattttatttctagacacacgatagtaaggagcatttagcaatgatggaaaggattcttggacctctaccaaaacatatgatacagaaaaccaggtacgttttaagagttagtgacatccttagtatcatttgatcacatctgctgattagaacttaattttttttttttttttgagatggagtcttgctctgttgcccaggctggagtgcagtggcgtgacctcggctcaatgcaagctctccctcctgggttcacgccattttcctgtctcagcctcccgagtagctgggactacaggcactcgccaccacgcccgcctaatttttttgtatttttagtagagacaaggtttcaccatgttagccaggatggtctcgatctcctgaccttgtgatccgcccacctcggcctcccaaagtgctgagattacaggcgtgagccaccgcacctggccagaacttaatttttttttttaaattttcactctaccaagtctcaggcgctgattaggactttataaataatgaagtcaaactaatattttttcagttaaatagtagattaccttggtgcaaagcaggtaacatttctatcccatggctgccatttaaatctctagaaaagtgatctgggaaagcatagtaattgatacctttgctagctgttttaagttttcagtgttataaacatgaatggatattgacttatttttaggaaacgtaaatattttcaccacgatcgattagactgggatgaacacagttctgccggcagatatgtttcaagacgctgtaaacctctgaaggtaagcctttgagacattgctcaaatagtcaaaactgagtttcttctgtttgtcttttgagaccgagccttgcttcgttgtccaggctggagtagagtggcacgatgttggcccagctcactgcaacctctgcatcctaggctcaagcaggtctcagcctcccaagtagctgggattacagatggatgccaccacgcttttttttttttttttttttttttttcaagtaaagacaagttttactatgttggcctggctggtcttgaactcctggcctcaagtgatccacctgccttggcctcccagagtgctgggattataggcgtgagcgaccatgcctggcctcttttctgtttttatggtggttatatatatatggtttactatactgttacatagtgtagtcaatggtagtggaaaaggctgttgaatgaatttctttttttcttccaggaatttatgctttctcaagatgttgaacatgagcgtctctttgacctcattcagaaaatgttggagtatgatccagccaaaagaattactctcagagaagccttaaagcatcctttctttgaccttctgaagaaaagtatatagatctgtaattggacagctctctcgaagagatcttacagactgtatcagtctaatttttaaattttaagttattttgtacagctttgtaaattcttaacatttttatattgccatgtttattttgtttgggtaatttggttcattaagtacatagctaaggtaatgaacatctttttcagtaattgtaaagtgatttattcagaataaattttttgtgcttatgaagttgatatgtatctgaacagtttgttctaagtaccatttttcttcctacttctattaaagaatggacatagatttctgtttttggagacttcctcaagtctttgggaaaatttagcttcatttccattttagggattgtcaagattgagacattgccccctaagttaaatgtaatgaaactagattatgggacacacagaacttaagattagccgagaagagttccattttattcctactcaaact

SEQ ID NO: 98094 - DNA, 2130 bp, Homo sapiens
caccgtgcctggctaattttcatatttttggtagaaatagggtttcaccatgttggtcaggctggtctcgaacttctgacctcaagtgatttactaccctcggcctcccaaagtgctgggattataggcgtgagagccactgctcccggtcctagagctctttactctttccccactgtatcctaactcttttggcaacctggactaaaagaacatttgagataatgtttgacagtgacaggtaccatataggaagaagttgtttagctgaaataccaaaaaataactcatgtgagtggtggtttgatgaaagaaatttgtgtcattcagcatgtaatagaatcagaactgaacactaaaccataaattaaaaaaatacagtgggtcagagtagtagtacagtttgaagacagtaatacctggaattgagcatcatgtctgtcattcttaaatttgcatgcatctttctaacaggggaggtagacatgtagcagtaaaaatagttaaaaatgtggatagatactgtgaagctgctcgctcagaaatacaagttctggaacatctgaatacaacagaccccaacagtactttgtaagtatcagattagaacttgggaagtggtatcaggtatatttaaattaggagcaactatacttagctatttttcatgtgtttgtagccgctgtgtccagatgttggaatggtttgagcatcatggtcacatttgcattgtttttgaactattgggacttagtacttacgacttcattaaagaaaatggttttctaccatttcgactggatcatatcagaaagatggcatatcagatatgcaagtctgtgaattgtaagttcttggtatatcttcgttaatttgctggttttatccattccacatatcaaaatgtgcatcctaagtgtgtacaatttttatttgattaaaaataaagggggaggaagaataggtatgaagagatttgattacaggctgttgatccagcagtgtacatttcattcagcaagtaggatatccaccatataacaacgtactttgttgcagactatgatttagacttttctgatgcgcaaaaatagtaacttcgaatgctgggtaaaaattaaggcgtgatatatctcataaaagaaagcttcataagaggtagtaagttttagttactggtgattttctagcagactggaatgttgaccattctttgggaaaggaatcagaggttttttgttgggtttttttgttttttgaaatggagtctcgctttgttgttcaggctgaagtgcagtggcgcagtcttcactcactgcaaactctgcctccccagttcaagtgattctcctgcctcagcctcccgagtagctaggactacaggcacacgccaccacacccggccaatttttgtaattttggtagagacagggtttcaccatattggtcaggctggtctcgaactcctgacctcaggtgattacaggcgtgagccactgcacccggcctgttgtggggttttgtgatttggtttggtttggtgttttctgattacagcaactttctctttattctcagttttgcacagtaataagttgactcacacagacttaaagcctgaaaacatcttatttgtgcagtctgactacacagaggcgtataatcccaaaatagtaagtcttccaaaatattcataaagtatcttatgccttaatagcttatgccttcttaaccatcatttatgattttcagaaacgtgatgaacgcaccttaataaatccagatattaaagttgtagactttggtagtgcaacatatgatgacgaacatcacagtacattggtatctacaagacattatagagcacctgaagttattttaggtgagtattaattgtcctttgagaacctttgtatttccttattgagacttaaaatttttttagcagttttaggtcttacttgtggggctttatcatattctctttaagggataagtatcatgaagtgcattatggattttaagctctcaattgtaccagataattagctctgggaatttgagcaagtggcttaacctttctggaattgttttcacatttgtaatatgtggtagggtttttaaatgtaa

SEQ ID NO: 98095 - DNA, 1774 bp, Homo sapiens
attattacaaaatattctaaaagggttttttgtggtacttcaagaaacctgattagttttgatctattgaaatcacaaaagtagaacagggcattttatttttgtataatttaggattaggtatgcttctttgttctaacaagtcatgttttctaacccttctttcactaagcaaaccagaacagatttgaactgttatgggttatatattagtatggagatcagctcagatgacattaaaaatgccgtagtgttattcttgtatgccaaatctttttttccccaaaattagcactttaattttatttactgttataatatttgttttcttagattaggtaggaaatcttaatttggccaccgcctactttgacaagtaaatattacatcatacgattttgcaacattaaattagaacactagaaactaaaaaattatgtttcagtgaatgctacaactaagcattttttttttttaagaaaaacaattgtattatgttttgttgccttgccactttgagtatcttatctgaaaatctgttccttgccatgtttttctcctgttaacataaactatgtgccctgtgaatttctggggactgaatttgaaattgctcctgccaaccgtttgtggcctggcgtgtatctgaatgcctgaatatctccccgctgaatgaatttcgtattctgccctgaattcactcgggtatattgattggctggatgatcttggtgccgcccacttgacgtttccagaagagtcaccgaaggaaaagaaccaggagtgtagaggatgatgaggagggtcacctgatctgtcagagtggagacgtactaagtgcaagatgtatagaatatttttcaacacttattaacttttcagataacataatctatatatagattaagctttcagggatttggaaatctttttttctttctcttttttgtttttgttttatttttccatttcttttggtgggggggattgtatttttgctttctttagaaatgtaatgtttgttatatagaacttccagaacagtaatcaaattaatgaaattagacctaataattatgttttttgatggtgttgaccaataaaatatctagtgataaggaaatttgtagcatcaactagaataatctacattgatagcatttattgtgataagtacattgtttccacttcttgatatgactgagatttatttctctcttttagatgaaattgttgatactttaggtgaaggagcttttggaaaagttgtggagtgcatcgatcataaagcgtaagtttcccatgttgggattacttttagggaagttggcaatacaggtaattgatttagctttagaaagtggtctgaccatgagttagatacatatctttatacccttttttacttggatgtaagacacttccagttaagaggtacttgccccttcatattttttaaacagctactaatagtatgtataatttctaattttaggctgagaacacactttatattgttttgaaagtattgttttgttgttcaactggacactgttgttaggccatatttttttcccccaccatattagtggttctcagccttggttttatgttaagatcctcctcgagaggtttgcctaccccagaccttttcagggtagttacctaggaatctatatttttaggaagtgctgtaattcattctgataacatagctggagataacttggtgtcccaagtttaattatgtatgtttatcaaactactgattgaa

SEQ ID NO: 98096 - DNA, 1120 bp, Homo sapiens
ttgatcagttaggttggggcagaaataaatcacaatggtggaatgtcatcagttaaggctatttttactttttttgtggatcttcagttgcttcaggccatctggatgtatacgtgcaggtcactggggatatgatggcttagcttgggctcagaggcctgacagcgtggacttctatagtgctatatttgtactactgggagggcaggggtaaaatgtaccaaaattagtaaattgtgattcctccctctacttttttcacttttttttttttttgcattcttccaataaatctgggcatgatatggctaatgcagagtgcctgtgaatgaagttcaaactgcagaatatgggacaacacagtaattggatttatcagtgatttcagattgggtgataatgattcttgaattttggtcttaaaacgaggtcacgaggggacctttgtaattacgaattttaaacagctcagtgtggggtacaatttaactaggaaaaacttgccttttatgtagatgagacactcaaagagaacttactgtcctgattgggatgacaaggattgggattatggaaaatggaggagcagcagcagtcataaaagaaggaagagatcacatagcagtgcccaggagaacaagcgctgcaaatacaatcactctaaaatgtgtgataggtaaggaggatacttaaaatgtctgaatataacaatacattactagacaaaactagtatcacttaaaataagtacctgattactaccattcgtttgtttccaatgagagattttgatggtttgtaatgtttgtaaaattaagctgcttgtgggggagtctaggtgctgtcttgaagagaatgtgaggatatttggtcttagcataaaacattgaaaataatttttatttctctagccattatttggaaagcaggtctataaatgagaaagattatcatagtcgacgctacattgatgagtacagaaatgactacactcaaggatgtgaacctggacatcgccaaagagaccatgaaagccggtatcagaaccatagtagcaagtcttctggtagaagtggaagaagtagttataaaagcaaacacaggattcaccacagtactt

SEQ ID NO: 98097 - DNA, 1050 bp, Homo sapiens
ctgaagattttctttttgtttttggttgtttttttttttttttgagacggagtctctgtcgcccgggctggagtgcagtggtgcgatctcggctcactgcaacctccgcctcccaagttcacgccattctcctccctcagcctccagagtagttggaggcgcctgccaccacacccagctaattttttgtatttttagtagagatggggtttcaccatagccaggatggtctcgatcttctgacctcgtgatccacccacctcggcctcccaaagtgctgggattaccggcgttagccaccatgcccggcgaaagattttgtattttatttcaagaggagaaggaagctattgaagtgttgtaggcagggaaatgacatccaaagtaatgacaacagtcatagtttaaatatgctgctatcacgttttcagtaaatatgattggttttttgtcttaactgggtttctgctgcatcatttctcaatcatttttactcccttcagaatttcttggctctttgtgccagtaattactacaatggctgtatatttcataggaatatcaagggtttcatggttcaaacaggagatccaacaggtaagttattccattaaccaagatctaaggaactgaatgtatagtatgaagaagtgggtaaaagaagaggaattaaatacgtggagtttttgttttgttttgttttgtttaataagttctgttctacaagtacagaacatgcaggtttgttacataggtatatgtgtgccatggtggtttgctgcacctatcagcctgtcctctaggttttaagcccagcatgcattagctattcgtcctaatgctctccctccccttgcccccacccacaactagccctgctgtgtgttgttcccctccttgtgtccatgtgatctcattgttcaactcccacttatgagtgagaatatgcggtgtttggttttctgttcctgtgttagtttgctgagaatgatggcttccagccatccatgtccctgcaaaggacatgatctcatcctttttatggctgca

SEQ ID NO: 98098 - DNA, 1036 bp, Homo sapiens
atgggatggacgtttgtgtattatgtaccaggctttgctaggttacataattcattagctcctctggatggcctgtgaagtgggttatagtatctctgtttcgtaggtgagaaaacaagattggagaggttaaatggcttacctaagttacagtgtgctggtaagtggcagagccactatttgaacccagatctctatgacgacagctcttttgcccatatgttttgatgcctcaaagatccaggcctaaagtatacctgtgtaccattttctttgttttgacatcagaaacttgaactttacctgatttctgtatgttgtcatcttgcgtacgcccagtccccacgacagtccggtttgtagattccctgatctgcaattcttcccgttccttcatggatttgaaggctctcctttcttccttgaatgactttgcatccctctcgtttgctgagagttgggacaatgttggattactggtggaaccaagcccaccacatactgtaaatacactcttcctgaccaatgacctgactgaggaagtgatggaggaggtgctgcaaaagaaggcagacctcattctctcctaccatccgcctatcttccgacccatgaagcgcataacctggaacacatggaaggagcgcctggtgatccgggctctggagaacagagtcggtatctactctcctcatacagcctatgatgctgcgccccagggcgtcaacaactggttggctaaagggcttggtgagaagcctctttcatatttgatattttccctgcaaatactttgaaactttaggatgtctttccagtaaagttttaactgctttagggttggggagggcatgattccatttttatataataattttaaaataatgttgctgaaatttggcagttaaattgcatttgaaaaaggaaacattttttattcttatggagtaaggagagcagaagtcttccttactggactgagcttcatgattcctcacttttgtggcacaatgcctgtcacccaggcacttggaaa

SEQ ID NO: 98099 - DNA, 1022 bp, Homo sapiens
tcccacaatattttctctaggagcttgtacctccaggcccatacatccttccaaagctcccaactaccctacagagggaaaccaccgagtagaattcaacgttaactacacccaagacctggacaaagtcatgtctgcagtgaaaggaattgacggtgtttctgtcacttctttttctgctaggtacaatttatttttctcttttttttgtgtgtatttattggtaagcatcttccttacaaagtctataaccctggtatttaggcttgaaacaaatagttttctctggagttgatttacaaagtagcatactcctcatttgtttgtgggtcctggagaactatggaattttttcaaaacaataaaaacggtaagtaacactaagtattttctatgtcaggggactatactatgcattttacctacagtatttctaatcctggtaatgttcaaagatagttgtttttactttagagaatacagatagatcctagtgatgtggtgataaggcttttattggttcccagcaaatcagtgattcccaagtgcttttttatatttatctttacattttaaatatatattttcataaatcagtctttttatttaacatcatgggaaatatttttctgaatagtctttttttgtttgttttaagagactcccaggctgggcacggtggctcacacctgtaatcccagcactttgggaggccaaggctggtggatcacctgaggtcaggagtttgagaccagcctgactaacatggagaaacctcgtctctactaaaaatacaaaattagctgggcgtagtggcgcatgcctgtaatcccagctactcaggaggctgaggcaggagaatcacttgaacccgagaggcggaggttgcagtgagccgagatcgcgccactgcactccagcctgggagacagagagagactctgtctcaaaaaaaaaaaaaaaaaatgcagatttttgtattcacctcagaccttataattagaatggagtttgcctgagaa

SEQ ID NO: 98100 - DNA, 1050 bp, Homo sapiens
aactgtgctgaatgagaagtgtggaaatggagactgccatcatagccaacttgcttggagaagtgcagagataatgtgatagatggagaggaatgaaggtgtgtagtgagggttactgaaaaattggacacacttgaatgtattaaatatttaaaagccaacagggaaggttcttgttgaaaggaggaagaaaggacacagacatcaatagtgttagattctaaacagggcaggaaggtgaagaatgatctaaagcacaatgaaaaaaataaatacccacctacccaccctctagttagttgtcttttccactataaggatgtttaactataactccatatatttaagtatatatgactgtgtgcccttttgcctttttatacttatatatttaaaaattacatccaagaaataaattcattttttctttagcctctacaatagaagagttcatatacctcttatgaatgactaacgtacaggtattcttaaatctttcagggaactgatggagtagagtatttattaattcctgttgataatggaacattgactgatttcttggaaaaggaagaagaggaggcttgaagctttcctttattcttgaatctcccatggaagggttgtaccccagctgccactcctctagttgaaagtgttgtgtttacatctgacattaaattatttttccagcatacaagatttaaatttgggaagggggggatgtcctcaattagaactttttgatcagcctggctggtaccgtctagtactatgcagcggtcctcaagttggagaaaatgtgcctttcattcattacctctctggagacttcttgctggaatgaacagtgtgctcagggactatttggaactggatgtttttgaattattttatacttagagatattctgaattttttgagggccttttaacactccccgagctgattgtttgcaagtgtgtttgttccagagtgtggaagtataaagacatgggcatcacgtaaattggttttgtttgctattctgtgtgtcagaaccaacgagtg

SEQ ID NO: 98101 - DNA, 1048 bp, Homo sapiens
acatagcaaattttcaagcagctctacagatccactgctgagcaaggtgtttgccaacacaaattgaaagacaaacccagcttacttttaaaattttctgtgctaactatggatgtgtatctgccaagtacatatttttcatattctaggcatcttaggagattttcttcccctttggcaaaaatgatttcaacaaacattttaataattgttctgctctcatgacttacttgttccttctttaaaagtcctatcaatacttgttcactgctctgggataacatgcaaatagcacttttattctgttcttttgtatgggtgtttgtatattgggtcatgtcttaagtgctgacttatgttcatatccttttgaacttgccaggcctttcttttcaagatttttaccagcagtgtcgggaggcattcctcgtcaatagtgatctgacactccgggcccagttaactgaatttagggaccacaagcttataagaacaaagaaggtaagactccactattgtagcattgtatgccaggaatagtccgtatcatttacttaaggacacatatatgtttgacttagacctgattttgaaactgatgttccctgttgagtcacagagattcatttaggggatgtgccatttgagtttgtagaaagagccatggtagaagtaccctgcttcagagcagagcagaaaactcacatgttctagtccagagtaataggcaattagaaacatggtgagtcaaataattctgttcttttgttttttccctcttgctcattcattaatttggtctgtatttattgagtactaactacatagatattgcactaagtattaggatacagtagtaagcaaaaatctgattgcttttcttatggagcttaaagtctaatgggggagatggacattagtcaagtaatcgcacacataacattttaactgtaaggaagtcctatgattagaaggtacatagttctgaaagagtttatttaaataggtggatttgacctaattatggatagatatcagaagagaccac

SEQ ID NO: 98102 - DNA, 1050 bp, Homo sapiens
gcctgtagtcccagctacttggaaggctgaggtaggaggatcccttgtgcccaggaggttgggggtacagtgagctgtatttgcaccactacactgcagcctgggtgacagagtgagacccttcctcaataaagaaaggaaaaaaaaaagacttacttgaggagaaacaaagatcttgatatataaaaccatctctctttttttagtctaaatggaaattacatattgtaacttaggaatcatttttaggaacagactactacttcacctagtcatttctttaacttatatgatcctagtaattactcagttttattactgaaattaaatatgcttggtccttaactggtactgttgctttaaaaagaaaatactaccaagtaaagaatttcacgtgtcctattttacattaatattactgtctaattttgatatgagacagatatttgaagctactaaggactgactactctgttcactttcagagtgacttagtagaagaatattttgaagctcacagcagttcaaaagttttaacctctgatagaacactgcagaagctaaagagagctaaactggatcaggtatgttacaaggaatgttacttctaaattttttttactctgtcctgaaaaatatgctacgtaagcaacagatttgaaaagtatacacaagtagaattattgtcctgatcaaatgaaacacaagttaatgtgattattacttcttttattatataaatagtaaataggccgggcacacctggctcatacctgtaatctcagcaccttgggaggccaagggaggaggattatgtgaacacaggagtttgagaccagcctgggcaatatagggagacctcgttgttactaaaaatttaaataaataaataaataatttactggattagacagactgtaattatgcatttttcccctcttactcgtttattatttcttcaggatctatgataatcatcagggtcatagttccttgatatccatttaccatttatctctgttattcatttaacctatatgtattcactaa

SEQ ID NO: 98103 - DNA, 2126 bp, Homo sapiens
gtaatcccagctactcaggaggctgaggctggataactgcttgaacctgggaggcagagggtgcagtgagctgagatcgcaccactgcactccagcctgggcgacagagcaagactctatctcaaaaaaaaagagactatcttgttcttaatcctcttcaattcttcctttttattcttttctccctggctcctttgtagtttaatagttatttaaaatcaggtggagcatttttatgtttcagtataacaccaaaatgatctcagctaagttgcttttgttgcttcttttcatatgaagttttttccctatcctgtgaatcagcctttaatccaaaaatgacataaagagaagagcaaggactgagccttaagtatgcctagaatgttgaggaggctgaggacagtgaagaagagatgaaataaccacaaccagtagcttgggaaccaggataatgtcataagactcaaatggaggaattaatatcaagggaagattaaaaaaaaaaaaaaaacttagtgaatcatatagaagaccgaagggattaaggaagaagaagcagccaattcatttgtagagattgttatgagtattttgggtcagtttcaagactggaggataaaaatgggggcaggttagaaaggtttaggagccagtaaaatggctttcacttgtacaaatttaactacaccttctccatttagagaaaaaaagcaaaaaagcagttaatttggtatgtgccctttttctcagtgaacagtgtcccagtgtgagagttaacttggaaaaggtaaatctgtttcttcatttgggttcattttccacatgcctctcatggtgtgagtgtgagagcatcattaaagataacacttatatttttttatttaaaatggcctctattataagtgatttggtctttggtctttagaaaaaaaaagcgagagaaagaaaattgttaaagtaaaaataaaatggcccctaaacaaaagaccactattccatttattctcggttgaagaaatggccatctgttcaacactctattttatgtattatttatatgtattatagactttttggcacaaaataaactgttcacactttatggaagatttaaaagattttaaagtataattttaactctgcacagttttcacttgattttagatctcactttctggcccttctttctcaccccccatcaaagatgtgcctcaactatatatggtaagaaatgaaaggaacataagtggttgatggagaggagagtatggtaattagagaaagcagcaaggtcaaagttagttatttgtattttcttttaaagaaatctgtgggtaatatgaaggaaaatttgaagattctgggaagacagctaataaaggtgaaagcagtattactcctaatatgggtaggattatttttctgataaaagtaacagaggtttttaaagaatttttgtaagcgtaataaggttatttccctctttatctactgttgtcctttaaaaggtttttatatatttctttgtttacagcttcagaactagcaaaaacaccacaaaaaagtgtttcattcagtttgaagaatgatcctgagattacgataaacgttcctcaaagtagcaagggtaagacattacattagttctttgaaaagaattttcatagttgcttcaagatagagcatgttacttttttccttgtttgtgaatttttatatatattttcttcttttctgaaaattcattcaacaaaatgcaattaatatttcaactcatgtaccttagtatacccgtgtttagcagtcagtaagagggaaaaatatctgtgctaactgaagttgtgcaaattgacagggttaaccagaaatagtctttaagtcctgttgtcatgtgcttgagttagccaattatttatagaagatttggctttgggaaatactatatgaaataaggcgtttggagtttggaagtcttacagattgtggagcagctgtttttgaatgatccattctaactagattaaaaagtgtacatttcgttgctctttatttatatttttgtttttgtttttgaacaccaatgtcacttgccgacatttctgtttttttcattttttagagac

SEQ ID NO: 98104 - DNA, 1127 bp, Homo sapiens
gtgatcacctggctcagcctcccaaagtgctgggattacaggtgtgagccactgcgcccggccaagaaagcttctaccataaaacagctgtttaaatctcaacctcaacaattgtacttttcatctttgcttcagaaaataaatataaccaaaaaactccctttagtcctcccttcccagggacaactgttactaggaattgaatgcatatccctctaatctggggttttgctatggttttgtatttttacatagatgtctgtgtatctttgaatagcatgttaaaacttatataaacagtttcatagcctgttttctttactatgtatttccaaatattttatatataaatatagttaaatctttatgcaaggctatgaggggtacaaatcttaagtttttttgttaaaatttttttctgttaattttgttcttttttcctaaatgtatattgcatttttttctttcagaatcattgaaaaatggctctgctacaggtggtggaaataaagtttattcttttcagaatagaaaacactctgaaaagatggctaaattaggtatgttgcttttctgatttctataactattactcatctttcctaaggtagatttaaccacattccccatgattattataccactacatttcctaaaagaatgaagagagattccctatggtttagggaataatgagacgttccctaaaagaaggatgttatattaagcacaattaagttcatttgtttttttcatgctcagatgtcttctgttttcagctagattataagcttcttgtagtatgtgcacagtctttgtttttctttagtcctctccaaaatatgtagcttagtttctttttttttttttttaaaggtggagtctcactctgttgcccaagctggagtgcagtggtgcaatctcggctcactgcaacctccacctcctgggttcaagcaattctcctgcctcagcctcctgagtagctgagactacaggtgtgctccaccacacccggctaatttttttgtatttttagtagagaaggggtttcaccatgttggccaggttggtctcaaactccaaacctcaagtgatccacccacctcggcttcccaaagtgctgg

SEQ ID NO: 98105 - DNA, 1063 bp, Homo sapiens
cttattataatgtttatggattatttcacttttaaaacttttaacattttcttttgaaaatatagcgcaaaggattgatctggttagtaaaactaaataaaaactgctttaatttttagtttaattctttcaaactttaattgaaaatgttcagtaaagcctaatataaaacaaaatgcccaggagtggtagtcactaataactacccattgtaatttaaaatatgtggttattttgaaccctaaaaatatatactttcaagattgtgtgtgtttttttttttaactatataaactgtggaagagtggtcagagtggtcagttttaatcaaagagaaagcttttttcccagcttttaagtaatgacaatataaatattataatttcttatttaaatgtaatgtttagaaagaatttatacctgtcatgctctatttctttggatgttcttataggagctaaattgaagaaggagcgagcgcagcttttggtcaaccccaaaaaaataataaagaagccagaatatgatttggaggaagatgaccaggaggtcttaaaagatcagaactatgtggaaattatgggaagagatgttcaaggtatttgagggggtgaaatatacactcgtttctgctagtagcagaaattgctttataggatacacaaaagtagtctggtaggttaaacagtggtgttctatatgatcatgtttctcatctaaaaagcatttgcttcaatttctccatagttcttttttttaacaaccagtcctgcacatagttttcagtaagaaggaatctatagaccaaccactctaaagttattttatttttaaaatttttccaggatacatgtgtacaatgtgcaggcttgttacataggtatacatgtgccatggtggtttgctgcacctttcaacccatcatctaggttttaagccccacatgcattagctgtctgtccttatgctctccctccctccacccacccgcaggctgtggcatatgttgttcccctccctgtgtccatgtgttctcatttttcaactcccacctatgagtgag

SEQ ID NO: 98106 - DNA, 1945 bp, Homo sapiens
ggtttgctgtatttgagtataaacagctcagtgttaattatatcaaaggaagttctttacatcttcattgattacaaaatttaccaaagaaaatgtatctaccaaatataatttttaaagtacttgttaaggaatgaggcctctttaacatataaagtatcttaaaaatattctctgacctggaaaataggtttacagtagctacaagattccattttaggttttcttatgtcaataaatgtcaatattttacacttccagcaaaagtacccgttaaagctaaatctaaatattattcctcatagcacagtttctggtctccttaaattaaggatcctactcatcaggattgaataaaaagggggaaattcctaaaattggtatattgtataatattgtgggttaagtaaaatttaggggggcattatggaaatgtacctattttaaagggcagtggcaattactataatattggttaaactggtaaagtttgttaaataatttatgtccatgatcattctgagtgttttttttctttgcagaaaaacaggattgggttaagaaaagctaaaatactcatttttttaaaatgtatagcccaataagaactaaatgatttatttcaaaagttaaataattttttttggaaatcatggaatgtatttgcatattgatgttccaaacaggttttatgtattgttttttatagcagggagtagttgaaaagtaatgagtatattgattagctgtcttggaaagagaggattggctttctaacaatcactgatacaggtttgggtttgggggggtttgtttgtttgtttttaagttttatcatccatactgaattgagagatatgctccatgtttaaaaatatttgtaataagttcatctacttgacactgaatcttttttattcttactctaaaattattctggctttacattcagtttaagtggttaagtgaaacagtttttagggtgcaaaaattattttcccactgtttttctcatgataatttgagtctcctgagctataatttctgaaggatttttactactttggcattatgtaatctgatctctgtcacaatgatattaaataagaactatctcactttcatatgtttgcttcataaaaggatatggaatgtacacatcagctctttttttttttttaaactagcatcaacctataacttggtataaacttcccaagtatttagagaatagtgctggtgaaaatttaaataggataggcatatagaaattatgacttgtattgagtgatgtcctttcaacctaggactagtgacaaccttcattttttcagagctgaagaaaaaaccgtgaatttaagatcatatttattggtgcatgtaagccattatcctgtcttaatgaaccgattaatgctgttgattgttgaaatgtgaaatgtagtcactgttgaccttgtaaatatctgccagagatgaaaaaatattttaagttattgtaaataaagatgtataaaattcagtatcagtctgcaatgcagaaacatatcttagatgttaaaatactgtgtttgagagatgtgtaatttacccttagatgtatctagttacattaagagtgtaaatttttttgtacagtataaaaatacagctctatttggcttttaactggatttccctgagttgattttatcttacgtaaattttatatcttaaaagggtcttttcatattttttcaaagtgtaccatttttattttatatctgaacctttatatcataccctattacattaaggcagtataaaaattatatttaacaccacaaaataagaaacaagacaaaggcaggtgtgaaattaatacataaaacgtgccatatatttctgtagttaattgcaggggtacagatttagcactgaacgttaaagcagccaaatgtaaaga

SEQ ID NO: 98107 - DNA, 2575 bp, Homo sapiens
tgtttaatgtaatgcaatttgtgtaccttctaatcatatatctgcagttcctcatttttataaaactttgatatcatgccagtaagctagatgttgaatgtatgtaagtagcatttggtaactgctaagaggttacaaaaacattattggtaaaaaaaatttccttagttctgatctggttggataagattttatcataacttttctgggtctcaggctctgatgtttgaaaaagaagggaatatattgggttttaaaaaagtgtattgtgacttaaactgttataagttatccttccacagaatacatcagagctatcagtgctttgtacatttagatgtttttacttgattattgtttaagaaaaatatactgaatttatagaaagcaagtattctcctaattagcaaaagttaaaattttatctctaccattaaaattacaatagattttgataaataaccagaaaaaacgcctttttttttttcacacctagcaatcctcccgtttttattgtaaggactttcttttttccctaagagactttctgttagactctttatatatgagatgcttgtttaaatatggtggtctgtaacatttttccagctcatgtgaaaatggaaaactagaacctgaactagtatctacaacattgccaaagtccagggtaaagctaaaagttgataagtagacaatttattgttttgtgtgtgtctgtgtgtgtgtgtgtgtgtgtgtgtgtgtgtgtatggtgtgtatatgtatatatcacaaagttgtattttaaatattttaaataccctttcttttaatttaagggatgtcaaataaatgaaaggagtttaaaaatagccaaaataaatgagctataaaggcccataacatactaaaacaggcagtttcaggtatgtaaggaaaggaacattatacttacctagaaagtgagatctaaaaaaaaattaaaaataaataaaaaataaaaaagaaagtgagatcttggctatggctggaggtcagtcactttatggcataaattatttgggaggtaaaaagactgttttcaattcaaattgtgcatttattggcatctaaatctagcatgattttggttagagcacaaaagaaataccacataataccaaatcacagcaaatgttagaattaatacaacaaaattttcctttggctagaaatcttatgttatacctgaaaaattggttttaaaaaatgttcatcttggccgggcacggtggctcacgcctgtaatcccaacactctgggaggctgaggtgggtgaatcatgaggtcaggagttcgagaccagcctggccaacatggtgaaaccctgtctctactaaaaatacaaaaaattagctgggcgtggtggcaggcgcctgtaatcccagctactcgggaggctgaggcaggagaatctcttgaacctgggaggtggaggttgcagtgagccaagaatgcactactgtactccagcctaggcaacagtgcaagactccatctctgaaaaaaaaaaaaaaaaaaaaaaaaaaagttcatcttagaggattttatttatctgtatgtatatacatatatgtttgtatgtatacatacccacattaacattttatgaccctgtaacatttgttttctattcttttaggtgatgtgaattgacctcagtgaagaaacatttcatttagtctaagccttgcattcagggtcttacaacagatttcttgtgcaagaattattattagttaaaatggaaggtgttagtttaacaaactgagagtcaaattttctaagtttttaaatatgcattttaacatgcattatttttggcatttaatttaaaatagttttgtttcatgtatacaacagctgttacagatatatgccagcaatattcatacttttttaacaagcttttgttatatattttctaatctccataaaagtctaatcatctatgaaaaagatatttagggagaaaatacttgttttctgtaataaaacaattaggttggtgccatgtatgccaagttggataaaagaatacaaagaaacagctgaaggttttgggagctcgctctgacattaattactagaaagcaaactaaaatgcaaagtgaatagttaactcagaagatttgaattttttgaaatagggtctcactctgtcctctaggctagagtgcagtggcactatcacggctcactgcagcctcaacctccctgggctcaggtgatcttcccacctcagcctctggagtagctggaactccaggcatgcaccaccacacctggctaatttttgtatttttagtagagacgaggttttgccatgttgcccaggctggtctcgaactcctgggcttaagagatccacccacctggcctcccagaagtgctaggattacagacataactaccacacctggcctgaagatttttaaatgtgaaaatattttaagaagctaaggggaaaatcgttattttaaaatcctgatccccttaactttaccccttaccattccccttacctttccaattcacttttgtctatttatta

SEQ ID NO: 98108 - DNA, 1023 bp, Homo sapiens
accagcattggggttggcactgagggaggtactaatttagcagccaacaatgctaatcgatactcaactgtcagtctgcaggaagaccggctaggtcaagctggcgaaggtaaagagctcctcagcccaggagcccccttgaccaagcagtctcgatccccaagtttcaatatgcagctaatatcccaggtgtagttttgacatcctccctcatctttctgcttaccttttaaactgaacatttcattgtgcaagaagacacttcatcccacattgtgaaaatattggtcactgttatcagatttcatttagtttaggtatcttcatactgtattttgtatcaaaacagcaataaggttttctttatccctctttcctacatcttctcttcacctatcccttgtaaatgtgtttgtgaagcagtataaaatggttgccttttccatgccttcctttctccttgggtgatgtgcaatccatcgtaggctgatcggtcccatttcaacactgtgagactgagggtacattagaggaaatggtgtatatgatccctatgaaacgattctttggcttttgtttaaaaacaaaacgggtttgttctcataatctatagaactatgaagattactggatcatatttttttctcttaaccaggagtgcctcagagattctgctatgactttggacttctctgagtctgtgcaatcattttctggagaagcatggggaaaggtggtagactgctgcactttttcattaaaatgagggtagctctttctccacccccccatctcctttatcccgaagacataaatgttcaattacggaggcatttaaatcaagttgtgaccacctccattggagggcaggactcttgattgtgtaattgataatgcactttctcaatggctgtatagtcattattaacgtgtcttccctcttccccacaaggacatataaggtcatttctgtccttcaagtttggccaactaacaaatcagaatctgaggggcatgttctat

SEQ ID NO: 98109 - DNA, 1043 bp, Homo sapiens
cctttcaacaatcttgtaaattaagtagaggtggcatttccaaggcaatacaggtaaagagattagtaactctagtgttactaacagtattcttttattgtcagtggtctctgagggacccagtaataataccctttttccctattcaaatctagagccacgtgataaacagaaaaatagttcgtagatggggaacaagtattttcattactgttaaaagctaaattgaaagactcaactttccttcacatctagaccttggaacagcccactggaaagaatgtttgagtgagctgatcaggcacacctatccaggctgcttaattccacatgggcttgtccaagtggagagggaaggagcaagacaatcctttagctcaagatttttgctagattagtacaacccaattaggaaacatgcatcagtcaaatggcaattaccaggtatgtcactttccttttcagggagcagaaaatggtaggacaaaatgccagaagtatttagggaacatttctcctcatgtaaacagaagagtggagaacatcctaatgtttatcagagattaaattttgcatgttatttatcatctgaagaatcagacaattctaaattgtctcataatcagagtttatatgttaattctttctttggaatgctttttctctttgaaagtcaacaattttaaggcatcagtggggtatgtgactcatattttagaaattctcatttgaaaagcctgcttaaaagaatacagaacaacaaagatatgtttattacacattataatgcaaattttaaatacatattcgaaaattatggacacatgtagtataaacaaaaactgcatattgattgtaaacttgtatagacttatattatcattgtaggttgccaatgccatgaaaaactcattaccatttgatgctcctgattctacacaagaaggccagaaagtccttaaagttgaagtcactccaacagtgccgaggatttctcggactgcaattacaacagcttcaatccgtcgtcatagatggagaag

SEQ ID NO: 98110 - DNA, 1050 bp, Homo sapiens
cctcatctgtaaaatggggatactcattatttaagttcaaagagttgttttagaggtaatggagttaatacacataaagcattttagcatatgtttactatttataaagagttgttttagaggtattggagttaatacacataaagcattttagcaaatgtttactattattataatgaagaaaagaaccagatagtaaatggttatctctgagtgatgagattgccaattatttttcttttttatattttgtgtatgtgtatttcctaactgtgaacatggttgtagaataagacacttttataaaatcctttaactggaattttcaagtatttatattggcttttttttttaatattaaatgctttaccttaaaacataaacaataaatttgggtatttgatatctacaatttgcatatttctcacttgtgttaatcttttccttacagacatggcccatgaacatggacatgagcatggacatcataaaatggaacttccagattatagacaatggaagatagaagggacaccattagaaactatccagaagaagctggctgcaaaagggctaagggatccatggggccggtaagatgaattaagtaatttagatagaatgtatcctagagaatcaagtgtctatgttgcttttcaatgtattctccttagagaatcatgaaaaatggctttttactttaaagggttttttttggtttttgttttgtttttgagacggtgtcttgctgtgttgccaggctggagtgcagtggcgcgatctcagctcactgcagcctccgccacccgggttcaagtgattctcttgcctcagcctcccaagcagctgggattacaggcacgcgccaccaagcccagctactttttgtgtttttagtagagacggggtttcaccatgttggccaagatagtctcgatctcctgacctcgtgatccacctgcctcagcctcccgaagtgctgggattacaggcatgagccaccacgcctggctactttaaaagtttttggtttgttttgagacagggtct

SEQ ID NO: 98111 - DNA, 1090 bp, Homo sapiens
taataccaagtctctaacttcatctttccgtgatgttgtaatgactagtgtgggcagagcccatctgacctgtgacagataagctgacgtgagtcttgcatttgagggttctgtaaaatcctgaggcatatgactattaaatgtgaaaccatcaagtgtttattcttctattttatatgtgaaacttgggcatatacttaattatcctatgccacagaaagattcctattgcgattcacttaaatgatcttctgtagggtagcatttaagtcaattagaaagatgaaaattaaatgtcttcaacgtatatacacacacgttgtgtatgattataattttttctttttttttttctagcaatgaagcttggagatacatgggtggctttgcaaagagtgtttccttttctgatgtattctttaaaggattcaaatggggatttgctgcatttgtggtagctgtaggagctgaatattacctggagtccctgaataaagataagaagcatcactgaagataatacctggaagcatcatagtggtttcttaactctccaaaataagatttcttctctgtagcctacttgtctggtttatcccttacagaatattagtaagatttaatcaattaaaatatatatatatgccaatctgcttttgtcattcttaaaaaaaaaaaagtgtctcaagccatatcagatttggtttagaatacatagggggttggagaacagcagtagtgcgttctgcatatagcaggcaggcatcatatatttggctgagcaaatgggcatgttctaagaagtttttttttaatctttttctttttttttttttaactagtcctgacctagctggcactaacaagtatttaaatgggagttggccttgctgttttttttttgagatggagtctcgctctgtcacccaggctggagtacagtggcgtgatctcggctcactgcaagctctgcctcccgggttcacaccattcttctgcctcagcctctcaagtagctgggactacaggcgcccgccaccatgcccagctaattttgtttttgtattttcagtagagacagggtttcacc

SEQ ID NO: 98112 - DNA, 1018 bp, Homo sapiens
gctcaagcagtcatctcacatcagcctctggagtagctggaactacaggtgtgtgccaccacacccagctacatttttttttttttttgagacagagtctcactctgtcacccaggctggagtgcagtggtgctatctctgctcactgcagcctctgcctcctgggttcaagtgattctcctgtgaaaattgcttccttttctacacttgttctgtatttatgttcctctgatggtctccacttctagccactttctttttttggcgatttaagtttttggcccaaatagataaacatcttctacattatttttctcttattctcgatactgggttgccatctttggtgatttagtacttattatgaaagagagaagctacaccacttgataccactttcatctgcatactcatgataatttgtatcttctgcagtgaactcttaagttgaagaaatgaataatttatatgtatatttgtatacttttaaaaatgtaattgaaaaatcctctcatagttacttaactccaaggtttaaaaatgcttcccagggtaatgagtttctttagtcatgtgactttagaaatgggaaccaaagcttccttatctacttgtgaaattcttgagttttttccttgaacttcctttttatcttccctttggcttatatatctgtgttttttgtttgtttttacttgcagctttcaaaagtagttttcaaagtcaatgagattgtttaaaagagtaggtacctgacagtctcttgcttgaatactatctagtgagtgaaccaaattccctgcaacaataaccacaactttgaatcaagagttaaatgaaaaaagtaactccttcagcatttactgagcacctgctggggctgaggaatgggggcatgtagatctccctctgctgtctggagctccctttctggttggaaaacatagaagcagcgcaaaagtttcacccaaaaccttggccatggtatgctattgaaaccccatagttcagattttat

SEQ ID NO: 98113 - DNA, 1090 bp, Homo sapiens
agcacagacaagttgtatatagcacaaagctatacccccagaggagacactatatcagttgctgtctgcctaggctttctgtaaacgtgctggctatcattcagcctaaatgtagaatgagtctatccctttaacctgggccatcaccaggaatgtaaaggaacctagaacgaggacccaggcaagagatgagaaactaggggacagatgagtaggtaccagggatggtgatgagactgaagcaagtggggaatttttattttcttctctacttttctctattttccagattttcttagagcaaaaagcaggtagtgctttttacagaaaatgaatgctatataaaagtaattttaagaactttatatatccctagtgttatgtacaatttctgactttgaatagagatatctcccaaagggccaagtttggccctttagttacaatggagaatctgttgtgtaaactgagcaaatacacctgccaagttgaaatttaatttaagccaatcttgtctagatgaacttaagagaacgtctcctaaatattttattgcagtagtgtagcatgattgatagtatgctattctcttgaatagatggggttgtttcttgagccactttttattcctttgatcaaaaccttgaggagaaggaatgcctgttttcctgactgctgttgcatgaagttagacatccagttcctctaaaggtgacatcagatggtttagatacctaaaaagaagtgaggctaagccataggtcttcttcgtactacctgaagttgagacctggtctctgaactcagttattgctgaagcattaaaatcttacatcttgcttaaactcaggcagcttgacctgttctcatttttctctatcaaataaattgaagcctggtaataaattgatgatgagttccaaacatccccttggttggagacattgtattctccccactcacaatgaggtcctgccagtttccagaaaattttgcatgggggcttacccatccttttagaatcacattgcaagtcactctaaagcattagcattgttatctcatgtagctgcaaaagcttcctttcaca

SEQ ID NO: 98114 - DNA, 1102 bp, Homo sapiens
acttccctggctgaggcaaggttgttgcagcagccccaggagtctttgttagaatcccaccccagagctccttcctccagtcctctcagcagttttgttagttccagtattaagtgtaatttctacaaaaaatgcctggaatatttctgtttccagaaccggatgctcctgttagctagtgtgtgaaagataactctgacttgcctaagctttgttgatgttttgaataataattggcgatagtctcttgacttctgcaagagaaatgaaacagaaattggtctcaagttttagttgctcttgtgaaggtcagggacagtttgtaccagggtgtgggtgtggaaaagaaggggagatatagtcattaaattagaatatgcctgtgaggggagttaaggggaattcctttaaaattctagaaaacacacacaggtgccaattttgtctggctagggaaaagtaaactgctgaaaacacttggggggagaaatgaagctaatggtatcttgatcagtcaggaggattgggtatttgaaagcagggaagaaaaataattggacttggatattcctttgccccttcatctgagtaaggtgaaagcaagtgactcttcagaagaggcgaatgggacactgagtccagcagctcaggcagggtggagttggtaactgatgggcacaagtcttttactgggctctaaagaactcattcatctgggtgtggtggcttacacctgtaatctcagcatttcggaaggctgaggtaggagaatcacttgagcccaggagtttgagaccagcctgagaaacacagtgggaccctttccctacaaaaaactgaagaccttatgagcttccctagtctaagagtaatttttatgttaatttcttggcttgggcttaaaccccaacaaagtggtgattattcggaccccagccctacctctccctagtatgctctcctttctcaagtactcaccacctctagccacagtgaactgcctccagcatacacacacgctgctattttgttgcatctgagtgggctggctccacacgggatctgtagtttccttttgatattttctttcaatgtgccagat

SEQ ID NO: 98115 - DNA, 1061 bp, Homo sapiens
ttttgaagtaggagagcaactagaaaaaaggagtggcacagggacagaaacttcttttctccattgtttgttcaaggccacgtgggtggagtcattgaggtggaggtttaactctgtgacataagtttccctgatttagtcaggctgtctgtcgttgggcttttcccacttccttctactacgtacttcttccctattcctcctactgaggccattaaacccttagttgtaattttccctgaacatgctttacattctgatgaattctgaaaaagaatgtggggtttccttgcagatgagttcatctgttgtttcatttcctttacaatgtaggttttcttctctgtctttttggattagtctgtttttggttctgtctaccaaggatccctttctttagacttctatagatccctttctatagaacttaatctacttaagtcagggagaccacccagaaggaaagagcccatactttcaatcttaggcataagttagcttgataagattttcagaaaaattcccttttaaccacagaactcccccactggaaaggattctgaaagaaatgaagtcagccctcagaaatgaagttgactgcctgctggctttctgttgactggcccggagctgtactgcaagacccttgtgagcttccctagtctaagagtaggatgtctgctgaagtcatccatcaggttgaagaagcacttgatacagatgagaaggagatgctgctctttttgtgccgggatgttgctatagatgtggttccacctaatgtcagggaccttctggatattttacgggaaagaggtaagctgtctgtcggggacttggctgaactgctctacagagtgaggcgatttgacctgctcaaacgtatcttgaagatggacagaaaagctgtggagacccacctgctcaggaaccctcaccttgtttcggactataggtaattcatcaactcttcctgaggctgggtgggtgggagggagtgaagtgtctcagactctactgaatggcagaaacgaggataataagaagtgcagccactttac

SEQ ID NO: 98116 - DNA, 1013 bp, Homo sapiens
ttatttgatacccacacagtcatgtagaagtatatcttttttgtttgtttgttttttgagatgacatctcactctgttgtccaggctggagtgcagtggcacacctcggcttactgcaacatccacctcccgggttcaggcaattctcctgcctcagtctcctgagtagctgggactacaggcgcacaccactacggctttgctaatttttgtatttttagtagagatggggtttcaccatgttggccaggctggtcccgaactcctgacctcaagtgatcctcctgccttggcctcccaaaagtgagccactgcgcccagcctggaagtatgtttgtaagcccagatggaatcatcatctattgtttcttttttttaattaaaaaaattttaatacagttcaaatccccatgtctggctcatttcagctcctttactgccaaagcaggggacaaggactgcttcagtttctctgccttctctttctctgaaggtatctgctgcattgaacttgaaagttcacattatccttatttttcttgatcttgacagatttggcatcctttcacctggctgtgagcagaaagtccttgatttcctcaattttgcaaggcatggcgatgaggcacacagggagaggacaaggacaggcacccctctatcccatgtatcacccaaaagacactcacagcctgccatcactttataacctgcttttagtttgtttaacagtagatcacaaacatttttgcatgtcagtagtcacatttctacagcatcagtttaatgtatgcacaatagcccataatatggccatagcttaatttacttgatcaatcttcagttgttgcacagtgtttgctttcatacgaagtaagtattaaacatccttgtaacttagtatttgttcttatccttaattgttttctagggggacaattcccggaagtggaattacagagtcaaaggacatgcatttttcaagcctcggatgcatcttactagatgtccta

SEQ ID NO: 98117 - DNA, 1663 bp, Homo sapiens
aaaaaataccatttgaatttgtatttcataaagtgactctggggtgcttactttagtcaattcttaaaattttttatttgttccctaagaaagtaattactgtttctgttgcctggacagttacagtttccaggaaacatcaggaagtaggaaactgtagggccagagagtagtacaacgttaaattgtccgatttatgtgtattacttaaagctataaattgaactagatcttgccgtgctctgtattgagtataatttgtatacttttttataattaatgactaaatgatcactttggaggcagggtggtgggggtgtattagcagccaaataagcacatctgatcaaaaagaaccaggcttagattttttttaagtacattgatgttgatgttccaccagaaacaccttaagtgtatactgttgtgtaatgtctctagaaaggaatcctgtcttaaaactgggttttgctgttttttgaagtttctacctaaaatcatttttggtatatcctgataatctctataatactagaattgtctgcaaaatatagtaagaagaattggagcctaatagctgattcctcccaatttatctgttatgttttgtcactattcacattttagtcttttctacgataaaaattgtatgtgtactttcatgccagtataggaaacctcaatcttttttttttttcgcctttaagaaggttttcagtgattatacctcaggtatttctgagtgtcctattgtctaataggagaaatatcttcccgagctcagaattaaaagttctcctaaattatgaagatcccaaatcttatgtaaataaccttaggcatgagtccttagggagaagttaatgaccattgttaaagtgcttttttagaaaatgttgtgctgtatgttcttgatttgacataaatgaatagactttggcaagggaggaaataagttaaaaggcagcttacaagagcctattccctataaagggtataattttacacagtactcaaagcttgttatcttttctgaccattttagtacagaattagtacttggtggttactaacatcaacttgtgacatctagaactagggctcttagtgtttagtgggccacttctctgatgtcagatgcatgcagacctgtactccacatgcaacccaacagcagtgcagtgtgataactgagcggtcgcatggcagaggacatccccctcagagtgggcacaagtgccctctagggcagccaggggaatactattgttcgatacctgggatttgactttgtcaaacagctctttgtgcccctatctttgttttgtcaaatgtagatcagttaataaacatgagtagcttgaattttcatttgtctccctgtgtctttgtcacagctgtctgcacaggtaatcctgtactaaatcttttctgttatgtttttggttagaaaacaacctctacttgtcaaaccaacacatacacaagaaaccactaatagtaataataaacagatcttaatgtattttcctagatattttttaaaatagcatagacagtatctatgtataccataatacttccttagcaaaagtaacagcaacataaaaataaaatctaaagtcattgatatgcagataccaagtttgagaagattcgggaa

SEQ ID NO: 98118 - DNA, 1047 bp, Homo sapiens
tcactgcctcagcagctaagctcctttcctattaagggtgtctccttgggttttttttcacccctttaggtgtcctccttaactattaaaacagattatgactcatacctttgacatcttgtcatcttccactgaaaactttaatttgcagcttttaccaaattattaacaccaaataaatagttttattgctgtcattattgttattacacatataattttagcttgtgttttaagatttgtgggaaatgtaaaacatgcctttccccttcctttgttttgcatattcaggatcacaaactctgtatcactggcagcagcttgctcaaccaaacttgggaaccatccttgatccacgaccaggtgtcattactaaaggctttacccagttgcccggggatgctatttatcacatctcagatttagaagaggatgaagaggagggtattacttttcaggttcagcaacctcttgaagtggaagagaaactttcaacatccaagccagtaacagggatcttcctgccacccattacttcagcaggtggaccagttacaggtgagaagagtgtctggttgaatatggtataataaccagaagtactttgcattctgacttactagacagtcagctggctacctctgctcactggagggtacttaatcttgcatatcagataatgaaaatctatagcattagtggcattcctaattctctccactttatcttagccagcctgcgttagtagattgggtagagagctggatgaattcaagtcagtggttcacaaaccttttgggctcagaaactctttatactctaaaaaatcattgagaattccagagagcctatctgtgcaggttatatctattgacatttaatatatcataaatcaaaactgaaaaaccataaaaatatgtattaactcatttaaaataattgtgttacacaaatatgtttaatgaaaaatagctaatttttttacatagtgagaaaaacagttgttcaagtctctaatttttgacttaatacaaaatagctttattc

SEQ ID NO: 98119 - DNA, 1012 bp, Homo sapiens
ttatgatggtataaaacatctggagaagagattttttccttgtttctggactccaattattgatttaggccctaatttgtatattgacatcttccttaatactcttatttattctaacaggtgactttccagatatattgtatcaataatacataagatgagccctaaggaaattcagtttaggactgtgtaccatagaactagttaaacttgggtcatcctaccctaggcccacagcctgccacttacttaagtggtgctttgaatatctaaaacctctttcaataaatcttgagtctcctgatatttttaacttgttagaatgtaagcttcatgagaacaagattcatctttgtttgattcatttataaatggtatttttgtattaaaaaattaataaaaacttctgagtttatattagaatttgtaatgttggttcaaagagttgttttaacaatctgattcttaaacttctgtgcaatcctgtgaacttttttaaaagactgaaactatacattttagtagattttcttaaaaatagggaggcataattttgttttttatgtttgaaataattttaaacttagagtaaagttccaagagtagtataaagaatttttgtatatccctcacatcgattcttcagtttttaacatattattgcttttgccatatcattcaatctctctttctctttctttccccctgggctattttaacagtaagttgctgatataccttattaccccgtagtacttaagtgtgtatttactaaaaacgaggacatttggacactcttaaggacactgtcctacataaacgcactacaaccatcagcatcaggaagttgatgtttatgcagtattatcatctaatccacagagcccattcaaatttttccagttgtctcactaatgtccttcaaaggatacattgaattttgttgtttccatctgggacagttcttctgtctttatttctctttcgtgacttttgtaggatgtcctcagtt

SEQ ID NO: 98120 - DNA, 1587 bp, Homo sapiens
ttaagcaccatagggtggctatagttggcaataatttgttgtatattttcaaatagataaaaggtaggattttgaatgtcctcaatgcaaagaaatgataaatgcttgaggtaaggaatgtgctaattaccctaatttgatcattatacattgtatacaggtgtcaaaatatcacatgtaccccataaatatattcaattattttgtgtcaattaaaaatactttttagaaattactgtcaaaaaatgtatgccatcatttttactttagaagttctcttactaaaagaaaaaaaacctggagaaaaaaaaactatactactaggatatactaataaaaatcagtggagaaatgatcttgtctagtatttctttggttatcctactttagaaaaactaattttcatcaattttctctgtagcctagtaaaagttgaaatatattggattcatttacatagactctcctctttagatgtctgctccaatgaggatctccctgaagttgagctggtgagtctgctagaagaacaactaccacagtataggctaaaagtagacactctctttctatatgaaaatcaagactggactcagtctccacaccagcggcagcatgcatctgatgctctctctccagtccttgctgaagagactttccgttacatgagtgagtattttttttactcttttagtttgtgcattaaagtaatgatcatgggtatcttggtattgatttttaaagcactgatgtttagtagccattgttcagtgtatacctacttttatttgaactgatttcacaggaagagataattctgtgttatgtctgaatgcagaaagtttgtcatccttatgactctcagtgtctagtgttgcaaacatacttagacgttttcgttacttgatattttcctcagactgagtagaaaagggaactttttaaaaagcaaagtgatttaaaattttaatattcctttataactgtcaacatttattatcccagtagtttgttatcctaagctatcagcttttgacttttatctttattaatatcgttggtaaacacagtcacaagaattatgtcagcataacgaagcatagttcttaggtacataagtagttttaataatgccaggagaaataaatataccctatatagtaatcttcattatttaaggattcctaagtgagagactgagccagatttgttctgaaaataggtctgttttacaccaagctgttagaaaagacaaatgaatttttaaactttgaagtgtggagacctttttgcatttgatcccaaaaatctgcattaaggctgaaattacttttctaaaaattcatttggtaaaaaatgttgtgtgcacagtagctgttagaatttataataaaagcttatgagttcaatactgatatgtttgtgaaattcctttaattagaattaagtaggtgattgcatcagatcctggacattttcccagtgagtgctttagtgttttaatgccagattgtcgttggagaaggactattgtgcaatactcattttcatagtaatcactaacttgttttcagcactagtttccta

SEQ ID NO: 98121 - DNA, 1049 bp, Homo sapiens
tgacagagcagcagagcaagactctgtctcgtgtgtgtgtgtgtgtgtgtgtgtgtgtgtgtgtgtgtgtgtgtgtggtggtggtgttgctgttgttattccaacataaaattacaaactccttttttgggaaggactgctatttattatgtctctttttcttttagtaaaatgttttatcatttacaaagtaatagaaattggtaagaaatggaaaccccatgccaataaccacagaagtgtttgaaattttaccagtctgtggagatctgaaagtctaggtgttaggaaatcgtggtctgtactcactaaactccactcttagcatctcacttaccgacaccttgcagcttgtctttggatccaatctcttggctgaactggtttctggaaagttatcattgattttatggtcccttacccctttttaaataaaccgaattttccctttgactttgtataacgtttaattctgttcacattctatctctgaaactctcctccctaggatttgctcaaagtgcttctctattcttctgcctcagtaaccattttcagtctcctttatttactttgttcctttctacttcttgagggtaactctcttgtaaaacattgaatatttatgatgcctgtgaagagcaggcatgagaatgaattaactataagtagaagccacaagttgccaagcagagactgtcttgatataaatcaaataagtagaattgaacagttttactgatgacagttcctgatttttttaagtatgcacatatatttagtacattgtattcctttgtatgttccactgttattaaaccatttatttatagacatttagttccagttgtgtggtatgtgctttttttttccccccaaaccaataccgtatgggcatccttatccctacatcttagcacacttcgtgagtatatccattgtgtaaattcctggtggtagaactgttaagttacagcatgtgtgcatttaaaagtttggtagacattgccaaatagccttctgaaagcttgttccaatttgcacctttt

SEQ ID NO: 98122 - DNA, 1074 bp, Homo sapiens
agaatgtggtggatttatggtaatgattataaattgatactgagatttccagtataaaatcacaaaatgccaatttgggttgaagatagagacttggagagtaactatagtgtagttggaaattgaggcctttgaagtagatgagattccagaggagagaaggagagagagagggcccatgagagaatcctgaagaactggggagaatagccattaaacgcaggtagaggaagagagttctcaaatttccacagcctcctatttattatagccttcaagctctgaatctaataacctcctggattgcagatagccagtagccatatctcaaaaaatttacctgttcttatttgccctgaagttcatgggcaaaccaaaggcgtctattgcatgttaattctccctcaaaaagtaaccttatcttcaaagcccttgagttgtctgtgacaactggttttgaaaaacaatgagtcttatgtctaaacatactgtaattagaaagtctctcgcctagtagaattacattactaaaataggtatgtctttaatatgcagataattctagaataaatctagaattatatgtgtttataatactccatcctgaccatcactcaccgccattttaagttaccctctgttctggtcatataagattgcacgtcctggtgccactgattacttcgttgacttgaagagctatattgcctatagtttttcttttgacactgatcatatggggacttctgcttctgaaggccttaaggactataatttttaaataactgaaggatttagagtcatcttaagccaccaaaagcaaatttgtgttttattgttagagaggacaaagagaaatgaggacatagattttctacctcttcttgacttgttgctgtttttaaaatttgtattttccttactgctatgtgaaagtgccatttcaaggggtcttcctagctatttgatttgaggataaattctgaagagcagattatacagaaatattcttaaatctgttagcacaattgtcatctattcagtctgtttctaatcttctgtgaagtatttcca

SEQ ID NO: 98123 - DNA, 1033 bp, Homo sapiens
tcggggagtgaggggcaagagaagttgtaaggtttcaagcctgagtaattgaggcatatgccagatgtagttatcttttaggagaggaaaaagttcatctatccccaactcatcagttaacaggtcctgttttcactatctcacaaacccgtaaatccttcttaaaatttccattcacctagtttatacctttattaaaataatccatgcgtaaatgtgataaaattttctaattatttttgtctctaatctctccattccaaaatttatcctgcatcctgcatttacatttatttctctcaaatgtcacttctatttagaaatgtgttccctgcaggatcaagttcagacttcttaatctgaactagtcaaatttaaatctccaaataccttccccataattcttcccactcaaattggtctgtatatgctgccaacctggctctgtctgctacttgctgttggatattatcattattattttctcctaccagatagtctcctcacctatccaaatcttttcctccttagggagtccacttaaatcttacatcctgtgtgaagccagaccacctcagctagaaaagagctctctcccgacaattctgttgtaacactcatcaaatatttattatctggtactatcttattttcttagatttcttagctcattggatattagatctaatccagatcattagagctgtcccttttggagcttagacttcttaaatctttaacctccctttgggcagaggctgttgtatactactatttatctttttttagtacttttggtttaattcaagtggcatttgttgaaagctgttcaatgaacagctgtttgaccagttgttaattgaggtcattgtattgaaattttctttttcaactggctgcttaatatttatatataagtgatgttctagctttattcttagctttactactgactcacataacctcttgaagataccctgtttaactaccccgtattgtggtttattcatgctagaaaatgagcgtacaaagt

SEQ ID NO: 98124 - DNA, 1944 bp, Homo sapiens
tcttaaaatatttatatgtgcacatgtatattacacaaacaaaaaaagactaggagaaactataccaaaatgttaacagtggctctctgtgaggtagcaatagagggatttttatgtatttttaaatgtttttatgataagaacatagaacagttgttaagagtatgaccctagagggaaactaagttcacattctacttccacttctttttattaattgcatgcttttggacaggttttctaacttatttttaagtgttgtcttctgaaaaatgggaatcataatatcacatactttgtggagtggttgtgagatttaaatagataaaagcactaagaacagtgctttcactaataagcacccttgagtattagctgccacgaccgccattttcatcataaggaaaaaacagttgtttttaaatgtcttgtctcttgtgtgtttatcctagaaagccgtgattctatcccactttttccggcatcccaatattacaacttattggacagttttcactgttggcagctggctttgggttatttctccatttatggcctatggtaagaatgctggttttaaataaattaacttagcctagatgttataattatatagatgagttgggattttagatttatgatttgccacatttaatttataagtctaatgactgattttagatttcatggtatatttctatatctggtacatgttgaattttagtctgcagaaaaaagtaagaattggtatgatgatcagtgaaccaccactgcttttccaagaattccgtgcctttgcacaagctgtgtcttcccttcagcttccttcccctcttttaatggagacctactgttattctgcaggaagaagttgtttttccacctctgccccccatccctgtccgtttcactgcattgtaaactatttcactgtattagaaacatctttgtgtgtgtccatgtccctcactggacttgtgcttcttgagggccgggatcatttatatattttttatttgtggtgtccccaggtgctcacgtagtacttagcacaaagtagtgttcaataattgtgttgaataaatagtgaatggattctagagctttgatttttaggacagcttttgtgaattgcttctggatttaagaaaaaaaaaaatatatatatatacacacagaatgtatttttattcaataatattgacaaatcattaattctcttccctaatctctaaagtgtcattacaaaaaattgtttaaagattcttgaaagaaaatcatgtttgtgtgggaaagtgttgtttgggttagactccaaaaagtaacaggtatgtttgtgtttatggttgaaaagaacattaaaatacagctggaagcaaaatcactttcaatgttcatctaaggattttaggggtttctttcaggttcagcaagtcaactcttgaggacctattttcctgaaggaatgagtgaaactttaataagaaacattctctttggagccgtgagagggttgaactatctgcaccaaaatggctgtattcacaggtatttacttatttgtatttattaaatgaaataattttaatggaagaactctttgaaggaggttttaggaaggagcagttgaatattagaaaaaagggataggaaacttgtaagtgaaaattgagggaggaagggaccattaggtgcagtggattgcttacattttatgtccattcgccaaacatgttcagaccacatcctctgtgccaagcagttattgggattggggtggagtgcctgccctcatggagctcacagtctcaatctaatgaggatgttcaggagatgagctgtaggaaatgggatcctagttagctgggtgtttttcgttttgtttttgtttaagcaaatgaagagcttcattatctgctttccatcttatgcataaattggaat

SEQ ID NO: 98125 - DNA, 1093 bp, Homo sapiens
ttatgttaggaaattaaataccatatatgaagtgtgtcttgatttgtcgcttatgggtttcttttccattattgttcaccattctttatcaaaaaagcacatgtgtataacttttggttaacttatttgcactaaaagacttcaaattaattgtgtcctacaggatttacatgggtataatgtgaagtcagatatttacagtgttgggattacagcatgtgaattagccagtgggcaggtgcctttccaggacatgcatagaactcaggtaagtgctgctaaaatccctgagctacttgcctttcataagactgcttacattctagataatttctgttaaacatgtttgctatagactcttaggagctttattgttgttactgttttaatattttgcctgaaaagtgttgaaggaaagttctgtttcttttagatgctgttacagaaactgaaaggtcctccttatagcccattggatatcagtattttccctcaatcagaatccagaatgaaaaattcccagtcaggtgtagactctgggattggagaaagtgtgcttgtctccagtggaactcacacagtaaatagtgaccgattacacacaccatcctcaaaaactttctctcctgccttctttagcttggtacagctctgtttgcaacaagatcctgagaaaaggtaatattgatctcttttaaatagcacaaaatgtacatgttttacattttatagaagctttgtaacattgcccttccaggagaatacaaatcttttgatcaaaatattgtctgctctagaaaatatcaatgctaagaacaattagtgggaacaagcaaatgagaagaatactggattcaaaatcagaagaggctgggtgcggtggctcacacctgtaatcccagaactttgggaggccgaggcgggtggattgcctgaggtcaggagttcaagaccagcctggccaacatggtgaaaccccgtctctactaaaaatacaaaaattagccggtgtggtggcatgcacctgtagtcccagctactcgggaggctgagagaggagaattgcttgaacccagtaagcagaggttgcagt

SEQ ID NO: 98126 - DNA, 1027 bp, Homo sapiens
ctccagagttaatgttctcctcagaggtggaagaatatcctgataaagagaaagaaatcaaagcctcttcataataccagctcacctttggaggaataatgacccagtatttgtcccatttttgtttttaaatgtatttttataagatgtatacatgtgtatttgtaatagattttttgattatataatactgaaacatctctcaatattatgaaaaatgttaaaattgtgtttgctgtttatgtctaaacattaatttgtctagcattatcatcttaatgacaaagggaataatgaactagaaaccagcaagtgaaagtgtttatttcctattttctcaaaacagttgtatttataactattaccttaaaaagcactggtttagaaaaagccataacttaaatagtgttataaaatatatatcaggtttaaacataaatttagcgaatatggtagaagggaaaaaagccttcatttttgacctccccttactgaataaattgaaatatgaagtttgtcttttctgaaactggcttagtgattgagtatcatgtaataattataatataatttagcttgaaagatgctctacattatgaccaataaaaagggaatgtatgttttgtttgaaaaattatataacctaaattttttacctagaagtaactaaaaagttgcttctcattataatctgtactagtggttctcatatctggttgtacatcaggatcatagagggagattttaaaaatctatgtagcaaaagaggctgagcagggcaaggctcaggggaataaaggagagacctgtgagcttgtgggctcccagttgacatctgcagtaccctttcctctgtcccttttttctgagtgacaagaaataggagtagaaattcaccatctctgttctccagctctttgtcagagaggtttctggttttccaggaaatccccctcttgagatgggtcctgcactgggaaagatctcttcagaactatatccaatggtacctcagctgttgtatatg

SEQ ID NO: 98127 - DNA, 1802 bp, Homo sapiens
aataaggacagcagtcatactggattagggttcatcctaatgaccttatcttatctttattacatctgcaaagaccctgcttccaaataaggtcacattcataagtactccaggttaggagttcaacatatctttttgggaacacaatttagccccttttaaaaaaaatccaccgagttagagcccaatgatatgggtaatagaaagaggtagaaactaatgaaattttatagatcaagtttaattttctttaggatgttttaaccccaaaggaatgttgtccaaagtagtctagttagatgttttatgtggcctttgtaaattagataattttgtcatgcgtgttaagtatacactgtagctacttaaaacctagtaatagtatatgtgctagcattagactagagaaggaaaaaactatagtcaagaaagtaaagttttgttaagtttacaactgcgctgtgacaagaaacttttatattttctaggattgactttgctaaaatatcagtagcaatccgaaattttttggccctggatcctacagctttagcatctttctgtgagtaagcagtttaacatgataactgtgtaatacttcagttataccataattttgaaccaggataaatataattttttttaaaagttgtattactgctccttataaacattacctatagatgttcagtgaatttgtaattagaaacataaaaggcataatattgatagaattattttttcaattgaggttcatctaaataactttgaaaagcttaatttattgtactatattacttactttttaacttttgtattttctacttgacattaaacagattcagcgggtatggccttttaataacaaacaatattttatatctttctgatcatttggaatgcattttgttctaagttttgagaatattaataaaactagttttaggaccttgagcaagtcatttaacttttaaaaagatgttctaggttcttgtcagttctaatgatgaaatagtgaacgtctcaaaagatccttctgcacctattgttctcaaaaatttatataaggatgtctggcctattgaaatatatttatttggtcaaataaatttcttttatatcatcagtcatgaaagtatagattattttcgatattaatctataaattcaaaataaaccaggttgttaaaaattattagtaatttcatttgtctttttctcagtgtactttactgctcttatactatctctgagtcagcaaatgacaagtgacagaatccacctttacacaccttcttctgttaatggtagcctctggtaagaattcacaatgacattagcaattgttaatggcaataacagcaacttttcttatccttccattctttttcaactgcaaataatgaaggctctgtttttgtttccaaatatatggcaagaaaatacttattcctttggttaatgggtaactattgttatgtccacctgcatttttaatgaaatatcttccttttaaaaatctgttttagatcttcaagttatagtttttttttttttcgagatagagtctcgctgtgtcacccatgctggagtgcaatggcactatctcggctcactgcagccaccgcctcctgggttcaagcgattctgcagtcttagcctcctgagtagctgggattacaggcacccgccatcatgcctggctaatttttgtatttttgtagaaatgggcttcaccatgttggccaggctggtcttgaacttctgacctcaggtgatccacccgccttggcctcccatat

SEQ ID NO: 98128 - DNA, 1037 bp, Homo sapiens
tagcatctttagaacaatagcgcgttcctgtgactgtcattcttctccaattgtaattttgactactggatggtattacggcagcttgcctcgtcctaatcttgtagtacttgcattaatctactgttcgaacgaatggattgctaaatgggacaaactacaagagtgtctaaaatttaacccttttgaataaatgtcttatgcaagcagcatgagatacttggaacattaaattggcttctaggcatttctgttactatatgattctaaaatacttctcaactgtaatgctgtctgaactacaaacacttttcttattcatgtaaatgagggtttagaagggttccccccacctttctttctgccctaaaacgcattcttcccagtgtatgcaactggcctttttaaaaattgtgttagtatgtggtttaaaacctccatttgtttcccattgaattaaaacaaaatccaaacttcccttggtctgcaaggccctaactaatctggctcctgcctacctctccttggtaattgtgcggcagccttgctgtccttttacctgaaacattccaagcccaatttaacctaaaaatatttgcatttgttccggttgctgctttctcattcaggtctcagctcaaactcagagaaactttccctaacaaaagtagcactcagtctccttcattcattacgttttgtgtgtgtgtatcttgtgtatatatatatatatgcacacacgatatgtatacaagatatgtcttaaatatagcatataaatatattttatcgtacatgctgcatataatatatagtatatattatcatatatatatttttaacattgtttctaatactcaaccactagaatgtaagtttcataagagcagagttctctccattgtgttcattagtgtattcctaatgcttagaaaagggcctggcctagagatggaaaggaatgtaggaaggaaggaattttatatgaaatttaggatgggagaacaaattttaaattgcccatgtttctcatcagt

SEQ ID NO: 98129 - DNA, 1001 bp, Homo sapiens
atgatcatgccaccacacttcagcctaagcaacagagtgagaccctgtctcaaaaaaaaaaaaaaaaaaaaaaaaagggaaaaagaaaactgtccagactctatacaaattgtaggattgagccaggaaagcactctagaaacaaaacaaaacaacagatcgttacagtgttgtctctaaattccaagagtgtgcctcagtaataacccataattcttgcaactgtgaccagaccagctagttcttctatgaagaactataaggtgcaatgagaggaaatggggcacctgagtggagctggtccacgcaagacttttctgagctctaatgatgggtaaagtcaactgggtaaagaggtggaagataaataaatatagtatttgtcatttacttctaaaaagtgggtaggtgtggtttctaggaaatcaattcttctgaaaggctaaaaaatgtgtttaaaacatggagttagggggagcattttatgcaatagtcgttttctctttcacgccactggtgatggttaagagtaggcaccacaggggaagactgtgtttcatttgatgtgtatcccagtgtgtagcacagggcctggcttgctgaggaaatgctattgaaaatatattccagtgtgctgagagctggtggccagtgggactgagtgagctgtgtgccgtgtattgacccgcttcctagtcctgaattcctttcagaagctccggcagggaggatgatacagtcagacaaaggagcagatccaccagacaagaaggacatgaagctttctacagccaccaatccacagaatggtatgtgtcaccaggactccttttctagaccagaaagtaatatcacctctgacatgtgatcaaatgaataggcagaaatcctgacagacttactgtgatccctatgaggatcttgtacatttttggttgcactactgccctaccagtgataactttaagaacaaatttcaagccaggaaggaaataaatgga

SEQ ID NO: 98130 - DNA, 1052 bp, Homo sapiens
tctgcatgtgaagaatattagctagcttgtaaaaaaactttgttttagaataagacgggaaatgaaaaaattttgtctatactaattacaagtaggcaaaagacagccactagataggggaactagaagggaacagggaaaagtgaaatcaattaaatctgttgggccatcagctgaatttgttcataagggattttgtttctttagtcccatatgcattgctctctttatgtaatttctttaaaagtgaatttgaaattattttgaacttttcttccaggcatgttactaccagattcagcgtgagaagcttaactaggctgcataacagcttgaaaactggattatctactacagagtgttataacaccatctggagtcttcctgtagtggcaaaaaagaacagtgttgaaattggaaaggactttgtgttatttaggttgttagaatgagccttaccaataataagagccctgagcccagaaaaaaggactgtatagtttaaagggaggattgaaagggaggtaaaaaatcagattagaccagttcttggcctatgataagttccaaaaataccatttatctactatttgaaaaaagaagaggatatcccttcctacagtaaagggtatgtcagctacatgaagttgtaagaaaagcttccagtagagcttcttatattaaagaagttgatggatatttttgaatttctggtttgcctgaatccacctgcagttaccccgatccgtttgcaagaaccagatcgtacttgaaactatagtggccacactctgccttcctgagtcccttccagtcatgtgtgcatcatgtctctttgccaagggaggggagaaaggaacttttaaactgcagttttaactttttctaagctgtttcttgatgggagaggttctgtgcaaaactaccacattctgtccccaaaatgtggaatgcatccaaataggagtcttctgcctcttaacttaaaagaacataggaattttgtttttggtttctttatcatgctacagagagtgaatacactggaattc

SEQ ID NO: 98131 - DNA, 1028 bp, Homo sapiens
gacaaagttaactattttaactagaaaaatggaagcaataccaacctagggttgatgcctgggatctcccatgtgataattgtcttttccctactttatccttatcttcagtgctttttcttttctttttatttctgtgcaggggggaaaagtatatgggaatgtggcaagatgatgtgtgtcaagggaatggtgtggtggttacccagtttggattatactacgagggcaactttcaccttaataaaatgatggtgagtggaatatttgcatgtagttattactaactttttaaagctcctttgtccttaactttttaaatcatcttttgattagtttccaccttcttagtactattttccttcttttaagattccataaggctttggggatatgactgcgtgcactcttaagttactctgtattttatgtgttgtaatttttctcttgtttcttcttgtagggaaatggggttttgctttccgaagatgatactatctatgaaggagaattttcagatgactggactcttagtggaaaggttggaaactagctttctttttttttctccctaataaattcttttactaatttttttttactttaaaaatagctgatttacatgccataaaattcacccctttcaagtgcacgtttcagtgatttttggtcaacatggctgtacaaaccaccaccacaatccagtttcagaacatttccatcgcccaagaaaatcccttctgctcattcagtgacttccatttccacctaaagtcccagccaaccactaatcacccttaatcactctatagatttgccttttttgggccttttgtataaatggaatcatacatgcaatctcctctatgtggcttcttacacttagtataatgtttttgttttttccatattgtggcatgtatagtatttgttcctttttatggctgaatagtgttccaaaactacattttgtttatccttttaccagttgatggacattgggttatttccaactttagactattgta

SEQ ID NO: 98132 - DNA, 1063 bp, Homo sapiens
taaaaaatttttgtaagtgaattaataaaagcttctaacatttcttaattttatgttctaatatggtaaatatcaatagatacagtccacataagaaaaataaagggatcccgagaccaaaatatttgagaactcctgctctatcctggggtctctgctgctctattcactaactgccaggttttgtctctgtcacctgagttatgcccctatttcatatgtacttttatgtagtagaatttttctgaaaccaatctccttttcccagtctcctgcagtgtgctacttatgctcgtgggctgaattttctcctacatttaatactatatgtctaaggcagactgaggctacagattctgcataatggttttatgttctttttttttttttcctctttaatttttgccctgtaggcatctccagaatatcagaaactgcaggattccagttcttgttatgagtgtcttgctctccatctcggcaggaaaaggaaggaagcagaatacacactgggcttctggaagaccttccccggaaaaatgacggtaagccatgccagttgtcatttgttaccctagcaaacagcaaccatttcgataacaattgatacaattttctctgttcctcacttgtttgtggtaataaccttttaatgacccctttcctaaaatgtctaaggaccatactaatgggtactctaaataccttctctcatttctagaaatcctctctgaagacttactcaccttctttagtttgtttttgtcttctttttaatctcctttgagctctaattttgtgaagtgtttagatcccatataaatttagattttacaccaagctaagctacgaccagcaaattcccttaaatgtgatttgtgtctgttttattttctctttacatgttaaaataattttgattgtttgacttgtattatatttgtctttaattccaggattccttgaggaagccagagcgtcgactgctgtgtgagagtagtaaccgagccctgtctctgcagcatgctgggaggttttccgtgaattggttcattctctttaa

SEQ ID NO: 98133 - DNA, 1035 bp, Homo sapiens
tttgctttttcttccagtgtttctatttagcacagctgcctagaacaattagtcttgccatttattgctgtgacttttggctttgaaattaacaggtaatggtgtcagctggtctctgattattcatcttaaattgttggatgcatgattcatttcctagaatataggcacaagtctgtgattaaccgtttgtattgctaccatttgctacttttcatactaaaaatcctgtcttatagatagggaaattcttttaattatatctggcttatttcattgtatttctactttcacagcacctaaaaaatgtgcattctgaaagaggtactttctagtgaaattttttatttaatgtacatattaccaattccaaaatgattaactaaatttttttttcctctgcctctagtgatttcctaaataaaaaccaagagctgttgcaagatttgtcagaagtgaatgacgaaaacactcagttgatggaaatactgaatactttgtttttcttgccaatcagacgacttcataattacgcaaaagttttgctaaagcttgctacttgttttgaagtggtaagctcccatgtatacctctttggacatttggaaagccaaggatcatagttgtttgtatggattatgccaccacaagatctggaactccagtaatttaatatttacctgtgtctaattaaatttaattttcttcagggaaatgacagaggaaagtatgactgtagataaattgagttttctgtggattcagtttccctttagggccttatcaagatgaataaactgtattcattttatgaaactgtctaaagttgagactctatcagatgctactcattcagtagttgtcaaaatttattggatgcatgctgactatgagttaaacagagctctttaaagccctggctttctgtataatggcatacacctgtaaggcaggggtgttacccagcctggattcatgctagactttatgccaggtgtttaggttaccttagcaaatgctgagaggaatcagtta

SEQ ID NO: 98134 - DNA, 2030 bp, Homo sapiens
tgagagacccaacagacaaccaacagtgttctgtttttccctgcttcacttctccacttttaatttaattaaattaattaatttatttttttgagactgagtcttgctctgttgcccaggctggagtgcagtgacacagtcttggcccattgcaacctctgcctcctgggttcaagcaattctcctgcctcagtctcccaggtagctgagattacaggtgcccaccaccacgcccagctaatttttgtatttttagtagagacggggtttcaccacgttggtcaggctggtcttgaactcctgacctcaagtgatctgcccgcctcagcctcctgaaatgctaggattacaggcctcagccaccttgtttggccttaattttatttcctactgtttacctactgtttatcccctttttatttgatctgctttcccactctgttttcccttcttttttgtaaactgaaaccattggcttatttctagctttcttttccccataaagtaactcacattctcaaagtgacatgctgcagggaaattaacccccaaaactagtatattctaggatttcttatttttattaagtaaaatagcatatgggcttttttttttagtctttgtgtttgtttttctggctagtaagttatgaatgtgtggggacaagatctttcttgctaaaggtaacattgggaccaagtacaatggttcatccctataatcccagaactttgggaggccaagactggaggatcacttgaggccagttcaagaccagcctgggcaacatagcaagaccctgtctctaccaaaacaaaacaaatttaaagattaaaggcaacattggccaagatgtgtctgtagttgccagtcctggctttacattccccatgaatgatttcacagtctagatagacgatcaaataggctgatgaaaggaatgaagctctcgtgtgtgtctttggttaccatgggatgttaatagtgcattgggtctgtagcttgcctgcctgatttaatgggatatgtgaataaagacatggaatgttttttatacagtggtatctggggtaaatgacaaaaagtccctttttaagaaaatctcttttcattgtacaaaaggcaggttaattcttagatcctagatattttaatatatagcatagagatcctccctggtctcattaatcttattttactcggaaagtggtcctgagacatgtatccctatcatttggatctttatatatccagggggtctgtttccaaacagttgtaatgtgaaatgaaaggtatcttggagataattgaaagtaggtgtgtatagttatgtatagatctggatatgcatatataacaatgatgtactgatgaaccagctctaaaaaaaagcgaccccgacgacccccccaaaaaaaaccctagtctgtggtgcttgcagattttcactatggccaattttcaagctgccaatggtttaattacttgcttgcaaattttctgaatatttaacagttagctcttgtcagctgatataagccagcttcagtataccaaattagtaacataattatatgttatatttaatccttttgttttcttctgtttcagcttggatatataagcagagtgacagcaggaaaagatagctatttagccttggtggataaaaacattatggggtatattgccagtctccacgagttagctactacagaaagacgattctattcaaaactaagtgatatcaaatctcagattctcaggcctcttctcagtttaggtaagttgcaaccccctctctcccaccattaaaccatcaggtctttatctcttcttcctatgtcacaaataatgaaaacctgttagtttatggtttacttcttgctatgcactgtctttgtgtgtgtgtacacaggtagtcaacaatttacaaactgtttccaatttgtcaatagcctcactgcccctgccctgtcctaccactcccagagctcctgcggcttccagaagtagaaaatggaactttt

SEQ ID NO: 98135 - DNA, 1145 bp, Homo sapiens
ggactacagccactttgcctggctcgttaatttttgttttcaaatgagaaaagtatttgtcagccttagtatagtattttgttcagcatattctttagaatacaagttctataggatgtcactagatgttgtacagaaaaggtttctgtggctaaatgtttggaattccagctgggttaaacatatttaaacagggcttttatttacaggatttgtcaccaccttcagtgtgtgctaatgtgtgtgtgaatctctgcagaggaggtagtgggaggatagattgtagcagtgagtatttaccaatttcatttgactaacaggtccccttttctacagagagcctctagaatatgcttcaaaaataccattggtggcgtatgtttttgaaaatcttaagtttgtccaaatgatatgttttcttaccctctggactcccactccttcaccccacgtctggttggttttcagtttcccccaggctcttaagaaaggctgcacgggtgaaaacgaggacagtggttctgacccccacatacagtggagaagcagatgcgctcctgccttctctgagaacagaagtgtggacctgggggaaagggaaggaagggcagctggggcacggcgatgttctgcctaggtaagcgctaccaacatttaccgatagaagttggcttaaacaaataatctctctcctgggaaggtctctaaatctcactttcctcatagaggaaatctgggctcttctagcttcagattattacacaccattaactctgataaaaagctgtcactttactcttgaatttgttcttaacagtaaaggacttggccaggcctggtggctcacacctttaatcctagtgctttggaagactgaggcaggtggatcacctgaggtcaggagtttgagaccaggctggccaacatggcaaaacccagtctctactaaaaatacaaaaattagctgggcatggtggtgggctcctataattccagctactcaggaggctgaggcaggagaatcgcttgaatctgggaagggcagaggttgcagtaagctgagattgtgccacttcacttcagcctgggcaaaagaatgaaactcttatctcaaaaaaaaaaaaaggaaaagaaaaaaaaagcag

SEQ ID NO: 98136 - DNA, 1040 bp, Homo sapiens
aattctcactatagtgcagaatattaaaaagagtcatttttaaaaagatgaattaatgtgaaatactgtgtgcttgaaccagatttctacaactgcttttgaaaatttaaaaagaaaatccaatttggttaaatctataggggactaaaagtttgctgttaaaatttttagttaattcactaacccttttttttttcttttttcttttttttaaccttcagatggtgaggtctacagctttgggactcttccctggagaagtggaccagtggagatttgtccaagtagccccattctagaaaatgccctggttgggcaatatgttattactgtggcaacaggaagcttccatagtggagcagtgacagacaatggtgtcgcgtacatgtggggagagaattctgctggccagtgtgcagtagccaaccagcagtatgtgccggaaccaaatcctgtcagcattgctgattctgaggccagccctttgttagcagtcaggattttacagttggcgtgtggcgaggagcacactctggcattgtcaataagcagagagatttgggcatggggtaccggttgtcagttgggtctcattaccactgccttcccagtgacaaagccgcaaaaggtagaacatcttgctgggcgagtggtgcttcaagttgcctgtggtgctttccacagcttagcccttgtacaatgcctcccttcccaggatctgaagccagtcccagaacgatgcaaccagtgcagccagctcttgattactatgactgacaaagaagaccatgtgattatatcagacagtcattgttgcccattaggtgtgacactgacagaatctcaggcagaaaaccatgccagcactgctctcagcccctccactgaaacccttgacaggcaggaagaagtatttgagaacactcttgtagcaaatgatcagtctgttgctactgaactgaatgcagtaagtgctcagatcacaagcagcgatgccatgtcctctcaacaaaatgtcatgggaacaactgaaatttcct

SEQ ID NO: 98137 - DNA, 1015 bp, Homo sapiens
ctgccccttggagggtggcttctgccctcttacaatgtcaccacagcagcatgattcactcaggcccttggacccacagggagggccaaggctcagcagtgctttctaagccctataaatcaacaagcacagctgaagccatttagtaggaagcttgttaataagaaaaatatggtttaaatgggtccttttattggagagagggagcagaagatgatggagaacagggcccccctggcaacgaggaggtttgtaagtagtgccaagctctccctcacaggcaagagttggattgcgttaactctatcacgcctcaaaccttttccaggaggatgggaagcccaaggtgggagcaacaggaggggggatgggcccagagaatgtgcagagagagcgccccttgggttatccccgcaccagagatgtgtgggtccttcaaggggcagctgggaattttcaggttcaaggaagaccacagctgggctggagcatggactctcgtgtgtgacccagggcacagaactgaagggagaaagtcagcttgaagttttcaagaagggtaatgagccaaagagataaggaagacctctagagaggtgggacttcaaaggaaaagaacccaagagggagcctgaggaatcaataacgtagtcaaaccaaggtaaggatgactgtgcttgaaatgcactggaaagtgttttttgatgatagttgccttggaggatcatgagacttagctttcttagcccagggactaagaaggtccaagcacctgagtttagggcttgggtaatgacagactaaggaaagaaggctgaactaatctgatttcccattgacgaggatcactgcatgggtcacaggaagaacactgaacttgtcaaaagacccaagttccagtaggctttgccatttcctaatgagggaactgagcaatcaatcccttgaactctttcatcctgagtttccccattgacttagggtgaatgatacctgtttcacaggcttgctgtca

SEQ ID NO: 98138 - DNA, 1545 bp, Homo sapiens
tggcccgagcggctgcgctgcgagaacttcccggtgcacggtgcgggcgagatctgcgtgggccagaacacgtcggacggctccgggggcccaggcggcggccccactgcctaccctaccgcgccctacctgccggacctgcccttcaccgcgctgcccccgggggcctcagatggcagggggcgtcccgccttccccttctcatgcccccgtcagctcaaggtgcccccgtacctgggctaccgcttcctgggtgagcgcgattgtggcgccccgtgcgaaccgggccgtgccaacggcctgatgtactttaaggaggaggagaggcgcttcgcccgcctctgggtgggcgtgtggtccgtgctgtgctgcgcctcgacgctctttaccgttctcacctacctggtggacatgcggcgcttcagctacccagagcggcccatcatcttcctgtcgggctgctacttcatggtggccgtggcgcacgtggccggcttccttctagaggaccgcgccgtgtgcgtggagcgcttctcggacgatggctaccgcacggtggcgcagggcaccaagaaggagggctgcaccatcctcttcatggtgctctacttcttcggcatggccagctccatctggtgggtcattctgtctctcacttggttcctggcggccggcatgaagtggggccacgaggccatcgaggccaactcgcagtacttccacctggccgcgtgggccgtgcccgccgtcaagaccatcactatcctggccatgggccaggtagacggggacctgctgagcggggtgtgctacgttggcctctccagtgtggacgcgctgcggggcttcgtgctggcgcctctgttcgtctacctcttcataggcacgtccttcttgctggccggcttcgtgtccctcttccgtatccgcaccatcatgaaacacgacggcaccaagaccgagaagctggagaagctcatggtgcgcatcggcgtcttcagcgtgctctacacagtgcccgccaccatcgtcctggcctgctacttctacgagcaggccttccgcgagcactgggagcgcacctggctcctgcagacgtgcaagagctatgccgtgccctgcccgcccggccacttcccgcccatgagccccgacttcaccgtcttcatgatcaagtacctgatgaccatgatcgtcggcatcaccactggcttctggatctggtcgggcaagaccctgcagtcgtggcgccgcttctaccacagacttagccacagcagcaagggggagactgcggtatgagccccggcccctccccacctttcccaccccagccctcttgcaagaggagaggcacggtagggaaaagaactgctgggtgggggcctgtttctgtaactttctccccctctactgagaagtgacctggaagtgagaagttctttgcagatttggggcgaggggtgatttggaaaagaagacctgggtggaaagcggtttggatgaaaagatttcaggcaaagacttgcaggaagatgatgataa

SEQ ID NO: 98139 - DNA, 1046 bp, Homo sapiens
cccttcacattgtgctgtgttcttatgcagtcaattcatacctaggaattttagaagcgcagggatttttcttaaggaggcacatctctgcagaaaatatgtgagggagagtgtttgtgaaagagcatgtgtagcatttaagaaaaacattggcaggagtttggtgttaatccccagataaggagtagaaacacttgtgaaaattttctgcagtttataaaacaaaactactctgtacaacaaccccatgcaacacctattctttttaagtaggtatgtgagaaatcttggcaagaaaaaaataaaataaaagtctggacaacatcttaccattaaaatacagagagagaattttaaaatgtgcctaaaataaaataatgatattagaaatcatctgggtagaactctagtagtataacagctgtaggtttgagccctgtaattatactgggaaaatctcttctaactctcccatctttaatttcactgaaaaggcaggtggctatttatagatggtatatttttatatatgcatacgtgaagggtgaataacagcctacggggctccaggaaatcctagaagggtccaaacccacaccaatgtggactgaaataagcaattcataaatctgttctatttttctctgatttacccccctcagtggcattaaaccgaattcataaaacttggttcttcacttctcctcactgtgtgacatttcttacatctgaatctgtgttctttacatttcatgctaaagtaaactagttaaaaagggtacgattaaaatgccagctctttagtaaacacacattgtgtctcttactctctttggttctttaaaaaaaaaaaaaaagatctagtcacttggaattttctcaatttgtggatttgtagtagaaggaaaaaaggaagtttgaccaagacaatagttgtttattataagggacccagttcaacaagtactgatcaagcagccactacactgaaggtactaggaaaaggactggagggacgcagatcaaagtaagacaaagtccacctg

SEQ ID NO: 98140 - DNA, 1062 bp, Homo sapiens
tcttaggtgtgggttgaggttaagcagatgaaatggaactaactaattgggctcagaatggaactttttttttttttttcttaagagacagggtcccactctgtcacccaggctgcagtacagtggcaccgtcatagctcagtgcagcctggaagtcttaggctcaagtgatcctccttcagcctcctgagtagctgggattacaggcacaccccaccatgcctggctaatttaaatgtttttttataaagatgaggtttccactatgttgcctaggatggtctcaaactcctgacctcaagcaagcctcccgcctcagcctctcaaagtgttgggattacatgcatgagccaccgtgcctggcccctagaactttattataaaggggaatttctccttttctttcaccatctcccaacttactttttagttttcttctagccttaaggcctgggtatttgtaggaactggaaataagagtaaacccatggtctggaaatgttctgtgtccactgcaggccactggcttccttatggagttcttgatagaaatgaaaatgtttctccaaagcagctttttgcctaaggagacaaccccacccccaattccaataatgattaaacaccctagaaattgtccttataagccagcaagataactttagatttgaataattatcagttagacttcgggctgttgatcttggatttcagtggaagatcatactcttcatttagtaaatttacatacaaggtttggagtaccatgagcctcctactggaaaagtaaaaagagaggcataattcacagttcttacactgctggaaaggactccctcatttaagagatgaggaaacgggccaggtgcagtggctcatgcctgcaatcgcagcactttgggaggtagaggcaggcagataggccaggtgtttgagatcagcctgagcaacatggtgaaatcccgtctctactaaaaatacaaaaactgcggcggcagcgccactcaggcgttgggtaacgctagacagatggactgtcacgtgacatgaagtggctccgaa

SEQ ID NO: 98141 - DNA, 1288 bp, Homo sapiens
agaaggaaagacacctctatattctttagattaaagaacacaggattcttaatattagaggagtgtaagtatgggtcacatttggatctctttgcacttttaaattagtggccacgtaattgtagtcaatttaaaaactgcttttatagtctaacatttttctttcctcttacagctgggaatggaggaagaagatgtgattgaagtttatcaggaacaaacggggggtcattcaacagtttagatattctttttattttttttcttttccctcaatccttttttatttttaaaaatagttcttttgtaatgtggtgttcaaaacggaattgaaaactggcaccccatctctttgaaacatctggtaatttgaattctagtgctcattattcattattgtttgttttcattgtgctgatttttggtgatcaagcctcagtccccttcatattaccctctcctttttaaaaattacgtgtgcacagagaggtcacctttttcaggacattgcattttcaggcttgtggtgataaataagatcgaccaatgcaagtgttcataatgactttccaattggccctgatgttctagcatgtgattacttcactcctggactgtgactttcagtgggagatggaagtttttcagagaactgaactgtggaaaaatgacctttccttaacttgaagctacttttaaaatttgagggtctggaccaaaagaagaggaatatcaggttgaagtcaagatgacagataaggtgagagtaatgactaactccaaagatggcttcactgaagaaaaggcattttaagattttttaaaaatcttgtcagaagatcccagaaaagttctaattttcattagcaattaataaagctatacatgcagaaatgaatacaacagaacactgctctttttgattttatttgtactttttggcctgggatatgggttttaaatggacattgtctgtaccagcttcattaaaataaacaatatttgtaaaaatcatactaatgcttattttattttaattgtatagaaagaaaaaaatgcctaaaataaggttttcttgcataaatactggaaattgcacatggtacaaattttttcttcattactgtacagtgatgatgttaatgactttgaagcactgaaagttactgaagtgccttctgaatcaaggatttaattaaggccacaatacctttttaatactcagtgttctgtttttttaaaaacttgatattcctgtatggtgcatatatgatacagttacctaatc

SEQ ID NO: 98142 - DNA, 1077 bp, Homo sapiens
cttttctcctaggcgaccaccttcagtgacacttcacttggggggacagactttttgttttgagttgctattgggataaataaaagatgcgatagttcatcttttattttgacaatagaatggcaaatgaaggaatgcatttacttagacttttacttatactgataattttaacactcaagactgattaactttgttttactcggtttcttttgtaatgggtatacagtaactttgaggatgattacactgttttaagaaaacctgttaagaatgctaaaaagaatattgtggtggaaaaatacaggttacaaggtttatgtttctatttgcactatatgtgtaattaaatagtttggttcaagtaaagcaaatgatttatacaaagagggataatttttttcttttttatctccttaggatagcagtgagattcacttcaaagtgaaaatgacaacacatctcaagaaactcaaagaatcatactgtcaaagacaggttcgtccattttggtattaagtacaatgctttgtcgttaatttttttttttttatagaagattgtcagaagaaaaatcctgttttattattttcaccattagcaactcaaggaaaacactctatcatttcttgtaccctgcttaactgctttttttgtcttgtggcccattttaaagtttgaattcgtaagatgggaactagtttgaaaagtaactcagaattgtaaaagcgagctcaaatgaatgtttctgtcttgatggcttaccagtatatatagcaaaaaaggcaagtaattttttggtgattactatggattgtttttgtacttctaatcatgagtgtttagccatatgttaaatttaagtagtagtattattagtatattatctctctttttttttttttttgagatggagtttgctcttgctgcccaggctggagtgcagtggcacgatctctgctcactgcaacctccgcctcccaagttcaagtgattctcctgcctcagcctcccgagtagctgggattacaggcatgcactaccacgcccagctaattttgtatttttagtagagat

SEQ ID NO: 98143 - DNA, 1065 bp, Homo sapiens
ataaaaccacattacagtaggttgacagtgaaagtggggatagcaaaagctgaatactctttacgaagtttgattttgaaaaaaggtgataattggctgggcgtggtggctcacgcctgtaatcccagcactttgggaggccaaggcgggcagatcacaaggtcaggagattgagaccatcctagctaatacagtgaaatcccatctctactaaaaatacaaaatattagctgggcgtggtggcacgcacctgtaatcccagctactcaggaggctgaggcaggagaattgcttgaatctgggaggtagaggttgcagtgagccgagatcgcaccactgcactccagcctgggcagcagagcaagactccgtctcaaaacaacaacaacaacaataaccacaaaaagaaacaaaaaaggggagaaaaacgactagagaagtaaggtcaagggagagtatttttaagttgaaaataaatgccataaaatatatgaataaattgcaagtaggagcattaaaggaagatattaatatcatttggaaggttgggggagtgctgtggttcatagacgagttttaaaaaatcctggacttggccttacatggtggctcacgcctgtaatcccagcactttggtaggccaaggtgggcagatcatttgaggccaggagttcaagaccaacctgggccaatgtgatgaaaccctgtctctactaaaaatacacacacaaaaaattgctgggcatggtggtgcatgcctgtaatcccagctattcaggtggttgagggatgagaaaatcgcttgaacctgaggttgcagtgagccgagattgtgccactgcactccagcctgagtgacagagcgagactctgtcatagaaaagagaaaaaaaaaaaagcaggccgggcgtagtggctcaagcctgtaatcccagcactttgggaggctgaggtgggtggatcacctgaggtcaggagttcgagaccagcctggccaacatagggaaaccccatctttactgaaaatacaaaaattagccgggcgtggtggcacactcctgtaat

SEQ ID NO: 98144 - DNA, 1002 bp, Homo sapiens
cctgaaggaaggaaggaagggtggagttttgtttgctgggctggttgttctcaatatctagggccagttatttttaaaggttttaccaaagagtaatatacatacaaaaaagtgcacaagagtgtttggtttgccgaactttcacaaactgaacacatccatgcaaccagcactcagatgaagaactgctgtattgacttaacaagtagaatagttttgtctgtttttatacagcataacattttataagtgaaatcatacagtatgtatctctgtgtgttggttcttttgcccggcactgtttagaggtttgttcattattattgtatatagttgtatgttattacatctcattgctgtgtggctttccattgtgtggaatgcagtacactcaatttacttattcattctgcttttgatgcccattgaggaattttctagcacctgtttttaatatgagccaaacttataccttttatagcaccttctatttcaggattacttttgggctgaataacagaaagtttgatttattgtaggttaaacaattttttttttctcataaaacaagaaatgtagacaaaagtagctcaaggctgatgtggtagctccacagttccttcatattattttcttctccatccttaacagcagtctttcactctggtgcttgtctacttgtgggcacaaaaaagctactttgtgttccagacaggagaaaagggaaaaagtatgttcactttatatctctttggccaaaatgggtataaaagaagctgggaaatacgttttttatctgggtaaatttaggtttccctttgtaaggaagaaagggaaaatagataccagataggtaattaacaatgtctgtcatacttccaagtctgtttgctagtacttttggatgcaatcaaactggtttgttctaggcttagcataggtctagactcaaagggtaaggtttacacaaccagtaaaatttttagttatagttttgagttc

SEQ ID NO: 98145 - DNA, 1965 bp, Homo sapiens
ggcgtgagccactgcgcccggctaggagaatttcttgaacccgggaggcggaggttgcagtaagccgagatcacaccactgcactccagcctgggttacagagcgagactccgtctccaaaaaagaaaaaaagaaaaaagaaaaaaaggcgcaaaggctccgttcaggccctagatcccgcgatacaaactttctcggcccgccccagcccgctgtggcgggaacattctggaagtgacggcaatctctgcggcagtcttctgtcggaagtgacgttgctatcccagaatcctcagagaaggagtagcgcgttcgtgcgtcctagttccagtacagcgtggagggtttaggcagcgtgttctgattctttgcgggacggcgagcgcatttgtgctttgcccgccgcggcctaggaggccttttgaggccgcgtagtcggtgtttttgaactgactctacagcttctggcaggccgtgcggcgccctgacccggcctcaccatgttggtgctgtttgaaacgtctgtgggttacgccatctttaaggtaggtgggagagcgagccgttaaagggggaaggcggatgctggacagacgaggagagggaaagacttaagcacggaactactcagagtagcgtgggtgcctgttatagcccgggctctgggaggagggagaaggcctttacacctgagagccatgttacgtgtaacacgtggccccgccgtttggggagacccgttctgcattagaggattttatttcctcccgttgaaggggtgggcaggaggcgtgttagaatttaacagattatagggaattcggactttattctagatgttttgaggaatgatcgaaagattttttttttttttgagatggagtttcgctcttgttgcccatgctggagtgcagtggcgcaatcttggctcactgcaacctccgtctcccgggttcaagcgattctcctgccttggcctcccgagtagctgggattacaggcctccatccaccaccacgcctggctagttgtttttgtttgtttgtttgcttttagtagagacggggtttcaccatgttggccaggctggtcttgaactcctgacctcaagcgatccacctgcctcggcctcccaaagtgctgggattacaggcgtgagccaccgtgctcggccaatcgaaaggatttaagcagaggaatgacctgctaatttgtcttaatacggttactctgctgtgtggagattagactcgaggagataagaacggcagcaagaatacttttgcattcatttggacaagatgaaattgcctggtatggagagaaacaaatatcgatagaaattgtgaaggtagaacaggaaggactggctaatagattgaatgtggggttttggtttaaataagatgttaagaaagtttcttggggaaggactaaagatttccggtttgggctgtgcgaagcttgcgttgtctattagacctgataatgcagttgtgtagatcgggcagttcagtatttcagatttgaagcttaggggaaaacatctgggctggtgatgtcagtttgaggtttggttgttttcgtggggaaagtttgacaagttcgtcagcactgaaatggttgaatggtaagacattcgtatcgcaagatgctgttgagatgttaggaagaatgagtgagattgagtgccttttcttgtgcggtgcaactcttctgaggtctgtgaatatagcaatgaaaaataaagtttttatgtatattctacatatatatatgttggtagaaagcaaaaacgctaggtaaaaataaatgtaatacaattttagctatgaaccaaaaaaccatttgtggtgtggatgcaagaaagtctggatgggtgcagagttctccatgtttcacttctgacatttgaaaatacgcagtttgcatttgatacgtcaaatgttatttttaagaaaacca

SEQ ID NO: 98146 - DNA, 1162 bp, Homo sapiens
ttgtaagtaagctccttagtcccctttagagctacgaaacatgtcaattttacttttctccagctttttggaatcttatctaaattaccatgtagagttctgcatagcttcaaattctcttagccaatgtggtctgtaagtgtctatcgatgaatttcaccgttaattgccgtagtatactgtcctgtaccggatgtgaagaggagcaactctgcacagtgcactggttgtctcccatggtaggaaggaattggcttatcaatggtcggatttctagacctgggtcctaaaatactcaaccgtgtctcgatgaattactgatttctattaatgaaaagtgtcctcctccatgaaaatgtctttgagtattccgttggagtttgcagtgctatttatctgcaagttactgttcaaaatgattaaattgtggtttatgtaacctagtactaaagaaataactagttaagctcgaatatgttgacattgattagtttgtaattattggaattaacattgatcgtttctgagtataaaagacatacaaacgttctggaactagtgatggctgcacatttttgtgaaaatgcactactaaaaagtgaattgtacactttaaaagggcaaatattaagatacatgtaaaattaatatgatatatggtgaattttatctcctaaaaaagtagacatacggttcaaagttattagtttcctttcccataatctttcaaaatgctagggtataaaattatgttggttgccaggcatggtggctcatgcctgtaatcccagcactttgggaggccgaggccggcggatcacaaggtcaggagtttgagaccagcctaaccaacatggtgaaaccccgtctctactaaaaaaatagaaaaattagctgggcgtggtggtgtgcgcctgtaatctcagctacttgggaggctgaggcgggagcattgcttgaacccgggaggcggaggttgtggtgagctgagatcgtgccattgcactccagcctgggcaataagagcacaactccgtctcaaaaaaaaaaattatattggatgcatataattcatgctttgatgagaatgctttaggaagttttttgaagttttttgtttttttgttttttttgagacggagtttcactcttgttgcccagg

SEQ ID NO: 98147 - DNA, 2357 bp, Homo sapiens
gaggccgaggcactagaatctcataaacccaggaggtgaaggttgcagtgagccaggattgctccactgcactccaggctgggctacagagcgagactccatctcaaaaaaataaaaagaaaggttccctgccctaccccctaggaccccatagctccagctacggcccaaggctggggcaggaatatctcttgaggccaggtagattctagactgaatagccactgtactacagctgactggactagatctgaattccatttagctgttaaatgggcaattcgaactagtaatttgaccaaaattacatgcagggtaagaaaactagttcattatcttagtgaaagaaatagcttctacaccttcattttacatgtaaaattgtatttgaagaatgcagctgtatatgcctcacctgtaccatttaaataaaactatttaaacattttattacaggttctaaatgagaagaaacttcaagaggttgatagtttatggaaagaatttgaaactccagagaaagcaaacaaaatgtaagtactcttgaaatcaataatttagcagttaacatttagggcttgttttattttttacatttttccctgatttatataatgttacattcgtagttttctgttttgaaatctgtttcaggaataattttggtatgaacctaattattacaaatgttttacttggaatataggccatctcaattaatttgaaggcagtagtctcccccttacccacagggattatgttccagaagaccctgtggatactttaaacctcggatagtaccaaatgtgattgctgtcagtaggaacacatttgtcttcgtgtcttccacacacaaatgtaataccttttttatcttaactaagcacttaccgcacacaggggttgtaacctgctttttgagttttgcaacatcaaaactagcatgaactactttttctttcatcacaatttcatggaagattcattcttagtgtagatgttaaatctttggtttttttgtttgttttttgagacagagtcttgttctgtcacctaggctggagtacaatggcgcaatctctgctcactgcaacctccgcctcctgggttcaagctattcttctgcctcagtcccccaagtagttgggattacaggtgcccaccaccatgcccagctaatttttgtatttttagtagagacagggtttcgccatgttggtcaggcaggtctcaaactcctgacctcaggcgatccgcctgcctcggcctcacaaagtgctgggagtacaggcgtgagccaccacacctggcctaaatcttcgtatttgtatgtatatttaagggaccacactagtatgttcccttaccagataagaaaaccttgcttaagatgacactgttgcctggtgtggtggctcatgtctgtaatcctagtactttgggataccaaggtgggtggatcatttgaggtcaggagctcgagaccagcctggccaacatggtgaaaccccctctctcctaaaaacacaaaattagccgggcgtggtggcacatgcctgtaatcccagctactgggaggaagctgaggcaggaaaatcccttgagcctgggaggcggaagttgcagtgagccgagattgcgccactgcactccagtctgggtgtcagagtgagaccctgtctccaaaaaaaaaaaaaaagatgacactgttttaggcaactagaagactagttttccttcttaaagggttatatgctttgttgggttaatctgattcgttgttgtcaatgatgtattcttcttggaactgaatctaagtgatctgactcaatattcgtcactaccactgagacaacgatgaatcaactatatgtttctttctggataaaatactaccctgaggctgggcgtgatggctcacacctgtaatcccagcattttgggaggccaaggcaggcggatcagttgagcccaggagttcaagaccagcctgggcaatataggaaaaccccatctctaccaaaaacaaaaattagctgggtgtggtggtgcacacctatagtcctagctgcttgggagactgaggctggaagatcctttgagctcgggaagtcagggctgcagtgagctgtgattgcaccactgcattccagcctgggtgacagagtgaagtgagaccctgtctcaaaaacataaagggggccgggcacggtggctcacgcttgtaatcccagcactttgggaggtcgaggtgggtggatcacaaggtcaggagtttgagaccagcctggccaatatggtgaaacctcttctctactaaaaaatacaaaaaaattagccagccatgggggctgggc

SEQ ID NO: 98148 - DNA, 1788 bp, Homo sapiens
ttctgtctcaaaaaaaaaaacaaaaaaccataaagggttaggatgtaacaagaatgagacctgacaataagctattttttttaatggcatttgtacaggatagacaaatgaatatcatgagattcctaaaaaggactcacgtacgttttcttgagtcaattctatgctgtataataaagtcatctctgtacagctttatgcaacaggggtttgtattaaagcttcaacatctttactcttggccaaaatttcctccaaagcctacaactttcttttaataatccaagcattactagcctaacatttagaaaaactagtaattgtatgaagaatatctaacttcacaccctgatacacaatggtaggcatgttttattggtgtgtgctttggaaacagtcaagcacttctttccaagttatgtggcttttgaatcaacgcactgcccccaataacatgtttatctcttttttttttaattctagagtaaagctaaaacattttgagaaatttcaggatacagcagaagcattagcaggtaaagtaaaaaattagaagcttgcttttttgaaaaaattaagtcttagccgtttgtttttcttgtttaaaaggttgtttgcttcagttgcctgtgttaaccttattcaatgttgtcaatgatgcattcttattggaactgaatttaagtgatctgactcattcgtcactaccactgagacaacattgagttagcttttttcaccatagggctggttttccccatgtgtgaggagaggtgagaagtggttaagttgatctccctgtggaaaccagcaacataatgctgaagcacaattcagtaaaaggtgttctacaagggaccaaggtaatgtggtcaagtatacagctctctcctcattttaatccaagggtagagttgtaatcctgagaacagccaggattcacagttgaaaaataatttaaaaagctcttctgggggtatagatttttagttcaaaaaaacatatcaatattcagagttatacagaaactgacagaggtgttatttttaaaagattcagaagaatggatgactcatactcttcaactagatttcatcacgggacaacagagtgatcgggtttatttactgtaattgactgcagtaggtcttacagttttgtttttttaagtgttagggaaaacaggaagagcagatataaagcccaaatcattaaattttcaactgcctgaattctttatcacaaatcagccaactatttggcggtgtagtttgaaaatgaaggaccgtgaggaagaatatggcttaaagctgggcaagaatatgacagatgcaaaaaattttgttaaataaccacaggagaaaggtacagtttttgtctgaaaatttggaatccaactaaacatgctggaacataacagaccaccctaaccttggcagaggggtaggctgaaggaagacccatagggccagtttctttgttttataaacatagttctagggctgcttcaccaactcttcagtaattagagttatatacagccataaaaaaaactgtggtaatattaacttggagaatttttaaaaagatagcctgttcatcacagcttttaagtatgggtaaacatttggtaagattccaagcaagattgtgttagctgtattcaaactctagggggtgttgttgacatagactgggatatgaacagttcctagtcctgatctcaagtagcctcttctgaattcctttttgcatacgatctttaatctgcttgggatatatctggcc

SEQ ID NO: 98149 - DNA, 1198 bp, Homo sapiens
aataggcagcctttgctactaagttttacattgctggaggtgtacaagtggagatacaagcaaagctaaggccttcactcaaacatgtttatattatggcagaactttgaaaatgattacactcatttttactagttttgatgtgattttaggatatttcaggacagtctatttgaaatgacaaaggaaagtgagtctgttttgtcttcccaaaaagattgtttctaagatttcatgattctcccttgagttcatgagaagattcttgtgagaaggaaagaaaccctggacctgattttacccctggctctgtagcaaaaatgagggtgggaagatcaaatgaaattgtgaaacatgtaacttataaaacatatatcatttcatttcagaagtaacattaaattcaagccctttgaaaggcctattttatttttttaagtgtcaactagggcaaggtctcaaagttaaaaatttgagagttaatgcttttgtttttctttttcttgaaaagcattcacagctctgatggagggcaaaatcaataagcagctgaaaaaagttctgaagaaaatagtaaaagaagcccatgaaccgctggcagtagctgatgctaaactaggaggggtcataaaggtaaagtcacgatatttttggtcatgcctgctagtcagatctcacagcataccaactacaaagcctagcctttgcaataagttgcttatcataaattctcaatacatttttttcttttctctaagctacatgataatggatttcccctaacatcagctgaactgagcaaataagtaatacctatttgttctagaagatatagaagaacaaaaaatgataaaaattgactttaacaaatctgctacccatatataatgttaatgttctatgtatatcatgccatatttttgtctagccacatttttttccaacgaaaatggggtccttatattttttagaaatatatttattagaaaacttttagtaggggtgtattgctggagatgaaataaaatgtgagagtggaaagaaagactaggaaaatagcctcccaaatacagaaagcagaacaattcgggcggggcgcggtggctcacacctataataatcccagcattttgggaggccaaggtaggagtatcacgaggtcagcagatcgagaccatcctggctaacacagtgaaac

SEQ ID NO: 98150 - DNA, 1050 bp, Homo sapiens
cagtcaagtattctacaaacacactggaaattatgcttcttgtccaactgagaaatgcgtatatttaaattagtgccactttaatatttaggaaataatttcaggctgggcgcggtggctcatgcctgtaatcccagcactttgggaagatgaggcgggcggatcacttgaggtcaggagtttgagaccagcctgtacaacatggtgaaaccccgtctctactaaaaatacaaaattagctgggcatggtggctcatgcctgcaataatcccaggccgagacaggagaatctcttgaacccaggaggcggaggttgtagtgagccaagattgcgccactgcactccagcctgggcgacagagtgatactgtgtctcaaaaaataataataacaacttcaggaaagtctttttttttttaatttaatatagatgttcatgttcttgtaggaaaagctgaatctcagttgtatccatagtcctgttgttaatgaacttatgagaggaattcgttcacaaatggatggattaatccctggggtagaaccacgtgaaatggcagctatgtgtcttggattggctcacaggtgagaattactggaaaataaagtcaacttacttttatttgataagcgcttaacatagatctgttctaagaatgttacaaatgctcatttgaaccacatcagaaccttatgaagaagatgatagtaatatcctcatttacagatgaaactgaagcccaaggtcaatacagctggtaagtggtaaagccaggatttgaacccaggcagtctggctctattgtctggattcttaaaaccttaaaacctcatcaaaggaattctctactactctgatcttggatgccctgtttcttgggctttccctcctttatctctgctaagtcatgccactcctccatctacttagtattcccccaaattctctcatctgctatggtcttatgggataggtgtgtatttgtgttttcattgctttactctgatttttaataaggcaaagaggactaggtgcagtggctcacccct

SEQ ID NO: 98151 - DNA, 1052 bp, Homo sapiens
tgagattcaggcgtgccccaccatgcctggctaatttttatatttttagtagagacagggtttcgccatgttggccaggttggtctcgaactcctaacaggtgatctgcccacctcggcctcccaaagtgctaggattacaagcgtgagccaccacgcccagtccaatatgacttttgtattacacagcttatcctatttgtcattcatacataaactcattcatgttacagaaataaaggtcgtagcagcacatatagtttttttttttaatgtgtattttctgttctcgtatggtgcatttctacttagctgatttttcttcttagaaaaaccaattacagctctgactacaggctgatttgagtaaaaacaaaaacaaaaaaaaactttaaggtgttaatttaaatgcttttcctagatgctatcttgctaatttattttcccctttcttcccagcctgtctcgatatagattgaagtttagcgctgataaagtagacacaatgattgttcaggcaatttgtaagtatagtacatgcaaagtccgatttgttgctctgtccttcatgcgttttcatactgttgaaactatcttttatgattctgtctgttgagaaagagaaaggaggccaggtgtggtggctcaagcctttaatcccagcacttgggaggctgaggcaggcggatcacctgaggtcaggagttcaagaccagcttggccaacatgacaaaactctgtctttactaaaaatacaaaaaaaattaaatgtgcatggtggcgtgtacctataatcccagctactcaggaggctgaggcaggataattgcttgaacccaggaggcggaggttgactatttggagattatatgaatcacagaattaacattacgttaattaattcatttgtatttttccatgaaaatgttaaaaacataagtgcaatctttgtagttgtgtattctgctgtgtcattaaatggtttttagaaagctcaaaagctgccaggcacagtggctcatgcctgtaatcccagcactttgagaggctgag

SEQ ID NO: 98152 - DNA, 2091 bp, Homo sapiens
tttttcagtttctgatgataaaattgctctggcaatagatcctggtaatggttgcataacatcataagaatacttaatgctactgaatagtacacttgaaaatggttgaagtgttattttttattcttttttttttaaattttttgcgacggaatcttgctctgtcacccaggctggaatgcagtagcacgatctcggctcactacaacctccacctcctgtgttcaagtgattcttctgcctcagccctccagagtagctgggactacaggtgtgcaccaccatgcctggctaatttttgtatttttaatagagatggggtttcaccatgttggccaggctggtcttgaacttctgacttcgtgatatgcctgtctgctgggattacagacatgagccaccgtgcccagcctgaagtgttaaattttatgttgtgtatgttttaccacaataaatccctttaagttttgtttgtttgtttttaatctactacagccttgttagatgacttggataaagaactaaacaactacattatgcgatgtagagaatggtatggctggcatttccctgaattaggaaaaattatttcagataatttaacatactgcaagtgtttacagaaagttggtgagtaatttgttcatcctttaaggcattgaaagtaaatgaatttgattgcatcctaaaacatgacgtatagcattttgttaagcaagattcccagggtttttgcaatttctgtgtatttgggaagtgtagcagtttagtgtcttaaatttaagaaacaaaatgaattttaacttagattttgatggcctataacatgatattagtacctaatgctaaatagcagtattgccgtctgtactgttaatatacagaggaacttgattgttgattgtcgttaacgtacagaggaacttgattgattgatggtttacttgccttacgaattactggccccagcttcagtataaaattgtctgtgacattattattagtcctgtcttttttaaatttttgccacttatattctgtaataagtgttgtggcatattttgtcctctttttactctgattattttttggaagaaggtggtggggagacatttaatgtctaaacttaaacccttaaatgaggaaaactgttatactaggtcaaacttcttcattttttttgttttgtttaggcatccttttcattggctttctactttttcttttgactatttgctggattttatataatttgttgaagagtgattctccctcatcctctgcaaacattccataggcgataggaagaactatgcctctgccaagctttctgagttgctgccagaagaagttgaagcagaagtgaaagcagctgcagagatatcaatgggaacagaggtttcagaagaagatatttgcaatattctgcatctttgcacccaggtaaattttactcctggagaatctagttgtggtgttaccagctctatagtactaatttttctgatggcaatgatgatttttacacttattgttgttcacctgataacataaatatgagggtgttcagtcactacctcatctgatgccatcatgatttgtatacttaaaagggggaaatacatattaaaaggaagtaatttacaatcatcgtctgaataatgaattaaccaaaaatcaattaagatggcagagaaggccaggcgcgttggctcacgcctgtaatccccgcactttggaaggccgagtcagggattgacctgaggtcaggagttcgagaccagcctgaccaatatgatgaaacccccatctctactaaaaatgcaaaaattagctgcgcgtggtggcgtacacctgtaatcccagctactcgggaggctgagacaggagaatcgcttgaaccagggagggggaggttgcagtgagccgagatggcaccattgcatccagcctgggcaacaagagcaaaactccatctcaaaaaaaaaaaaaaaaaaaaaaaggatggcagacaattatggattgagccttttaattctgagtcttatgtctatatcttgtgatttttttttctttcagatttgaaggtag

SEQ ID NO: 98153 - DNA, 1369 bp, Homo sapiens
acaggtgtgagtcactgtgcctgggctgcttagaatcttttaaaaatacagttacgctgactaagattttcaggcagtggaccaagtagtttacatacattatataacgaagtcctcattacagccatcttatagaaaactgatgttaggatcatgaggtcaagagatagagaccatactggccaacatggtgaaaccctgtctctactaaaaatacaaaaaattagctgggcgtggtggcgggcccctgtagtcccagctactccagaggctgaggcaggagaatcacttgagcccgggaggcggagattgctgtgagctgagattgcgccactgcgctccagcctgggaaaaaaaaaaaagaaaactgatgttaggcataggtgatgtacccagtacccagggttgtgtagctgctctttcataattgagggctccagtgttttagacaggaatttttactgtttttactcatatgatatttgtgacttaactttattccttatactaggtgattgaaatctctgaatatcgaacccagctctatgaatatctacaaaatcgaatgatggccattgcacccaatgttacagtcatggttggggaattagttggagcacggcttattgctcatgcaggtgatggttttaatgtaatttgtaaatatgagtgtttgaagtattttctggttaggattttgtttacatctttaaactacagctgttaaagaaattttagctgataacacaaaagtagatgatatgtgggagatcactaagggccaagtgttcaatgatgatttctatttgtttgcctgatttccttttggataatgaaggcatctttagtcactacctcttctgagacacttgtggtccattgttagaagtttgttagggttaattagaacaatcggatgaatgcaggaggataaaacagttaacattttcataataaaaactcactagacctagatttgaatacagttttaagaaatcactgtagagaaagaaaaaaaaaagaaatcactgtagaggatttgtgcccttgattgattaccttagtttcactattgagtgtgaggatgtaatatatttgactttcaaaaatattttcaacaactgatttataataaaactttgtatatgtgtatggcagtattataaggatgatatgctataattaaaatgctatgtaattgaatacctacaaatacaatgaagtactgattcatcatttttatgttacttggagacattgttataattcatcaaaaaagattatatcatctgcatcagagtgtttaaaatggcataactcctttttttttgtttgagacagagtttcactctgttgcactggctggagt

SEQ ID NO: 98154 - DNA, 1740 bp, Homo sapiens
aataaagcgttcaataaaataaaatgttaattagattgaaaaagaacccacgcttttttttgtttgtttgtttgtttgtttgtttgttttttgagatggagtctcactctgtcgcccagactggagtgcagtggtgccatcccggctcactgcaagctctgcctcccaggttcacgccattctcctgcctcagcctccagtgtagctgggactacaggcgcccggcaccacacctggctaattttttgtatttttagtagagacagggtttcaccgtgttagccaggatggtctcgatctcctgacctcgtgatccactcgcctcggcctcccaaagtgctgggattacaggcgtgagccaccgcgctcggccagaacccgcacatatttaagattgttacgaggaaaaagatgcacttcttttcagtgacctcatagcacagaactaatgtcactgagtagaaactaaagtttaaaaatattttttaaaaaaacctagtttgagctaatatttgacatgaattgctgtaaaatcttttcagccacagaagtgttggtggtgatatatggccattagattgtggcaaaggttgaaatacgatggatgatttgaattgtatgattcataatagttttataactcctgattttaaaacatccaagttattgaggattttacatctgaacatggaatatagttcttcatgtttttctattagatttctcgaatgctggcagccaaaaccgttttggctatccgttatgatgcttttggtgaggattcaagttctgcaatgggagttgagaacagagccaaattagaggccaggttgagaactttggaagacagaggggtaagaactacatcatgcctattccagaagtattacttgtcaaaagttaataaactgagtaaatttattaacttcatctgctaaacagttttatgatacttattagtatgtctaaagtattctttttgtgcctactgttaacaattgctattatttaccaagaattgatgtatccaactgcatttgccattaggatatgctattcaaaataacaaaacaaaaaatagcagaaattgctgtttgctggcccactgattcactagactgtatagtgtattataaagagattatgacttagaagtgtatttgtaatttttcgttttcttcttagataagaaaaataagtggaacaggaaaagcattagcaaaaacagaaaaatatgaacacaaaaggtgagtacatttaagtgaggatggggtgaatagtttttttaaatgttaattattgacagtaattttttattgtaaacttcaccttgatgtgcccatagttttttcaaatttatttatttgaccaaaattgtgtatgtttattgtgtgtatgttgttttggaaaatgtgcacattgaggaatgattaagtcaagctcattaacatgcattgtcttatgtactttttttgtggtgaggacaccttaaaatctacttagcaattttcaagaatataatacattgttagctgtagttaaccatgttgtgcacccctaatttttttccatgccatttagttttccgcattaacttctactagttttcattcatatacatatttaatttattcatttccagatattgatagtaaatttttttaatctaaagttcctctataatatgttctttatcaaaaagttcactcagccgggcacagtggctcatgcctgtaatcc

SEQ ID NO: 98155 - DNA, 1778 bp, Homo sapiens
atagaacattaccaattataaatacatatttaagtataatttagtgttttctggaaagaaatcaaatgtgtttctgtgggcattcacattttcttttttgtgaattttccaagctttctacaatagccatacattctgcaatatttatagtctataacttattatctctagttgacaaacatggttctttgtttcttaaattataaatgtctttaacctaaaaaaattaaatagtcattcagcttacaggtctgcttaaaaaacagaacattttttagcttgttttgaaccaatttttttaatgttcctgtgcaattagtactttttactttaaacatatgcacttaaagcatccattcacattttaggcactcatttcagtattttctttctgcttacattagaacaaaagcaaatgttgggttctatggaatcttttccatgtgcatgtatttgtatcctttcttgttcttgtgatcttgtgatgaagacttctatactaagcttggtttagattttttgttctgcttttttttttttttttttcccccattgagcagtgttctgaaagttggatggttcagttttcactttctagttaggtgtgaagacgttttctcctttcatttcccccatgctgattgagtgttttcctgtaccatagtaactacattgattactaaatcagaattcatttagctcaccacatctcttgaatgtgattgacctacttgaaaaatattaatacctttaacttttggaaactattagtcttcataaactaccccaaagccactaaaatgaaacaacattgtgtgcttatgtaagtattatctaatggcattttctttatctcttgagaattatttcaattccagatacttgttagagattttctaaaactttttgggtctttcagtgaagtgaagacttacgatccttctggtgactccacacttccaacctgttctaaaaaacgcaaaatagaacaggtagataaagaggatgaaattactgaaaagaaagccaaaaaagccaagattaaagttaaaggttagtttgaattttttttttaacacaacttatactcacttctttagaactgtggattttgtgagtcttaaaagtacatgccatcccactttattataaaactgctcattgaacgctaatggtgttttaataatgccattatgttctctgggaatatgatattgttaaatttatcagactgcacagaggaaatgtgagaagtttagtcaaattaggtattttactaagagttccaaaacttcatttctcctacatgaactatttggagaattaagagaaaaaaggaacgtgttttctaaattggttgttgaaaattttttgttttatagttaagaatgaatacagaattgatggaacagtgattttcttcattgtttctcttacacggagcggactggaaggaatacatactggtagcctgccgtcatagttacaatatctaacaggtgctcaccagttaactaggctgtcttgtgaagttgataagcaggcgccccattattagttacacctgggtttattgaacacctactagcaagtctagcagaagagtaaagcattaacacaatgattgctttaacttggtttctaagtagcttagtggtcaaaagtatatgatctacaaatgtggatagtatacttgatagagaaaacaaacaatttatttaacttttatgcttctttttattgaaaagtaaggagatccctaaacccactagtagcat

SEQ ID NO: 98156 - DNA, 1689 bp, Homo sapiens
atacttagtgctttctatgcatcatctttttaaatcagtaacagtccagtaagataagacattcttaagttttatagatagggagcttcaccaagggtaaatacaatttttcagggttgcagcaggtagattaaacccaggccgtctgacttcagagtgcaagctcttaaccatttctaatataattgactttcttcccaataatgattggagatcagatgacctttgttttaatcctgatttttatacatgacttcatgatcgtgagaagattgctctgagctctatctatatcattcgttaaagttagtggtaggccttggagaaccttcccaattataaaataaacaaaacaaacattgggtagttgatgagaatgacagaaaaaaactaggactcaaacgtttttggaaggaatgagatctgatacagtgttaatttgttgtgcctttacacttaccctattcagttgaagaagaggaagaagaaaaagtggcagaagaagaagaaacatctgtgaagaagaagaagaaaaggggtaaaaagaaacacattaaggaagaaccactttctgaggaagaaccatgtaccagcacagcaattgctgtatgtttgtttttaattatcggttttcacttggaggggccagttctctatatttcaatctattttctatatcagaaatgagcaggcattttaaaaaatggttttcattgatggagaggtaaaagtgaaatggctttgttgtatttatattataaaaggccatttcccaaatctagaatttattactaaaaatcaagtttgcattgaggggaggagtatgatttgctcaagcttactttttttataggtggggtttttatattttcaatgtgattactcacccatacaatttcagctctttcaaagcattcttgttggctattttcagagtccagagaaaaagaagaaaaagaaaaaaaagagagagaacgaggattaacagaaaggaattacgattatatcacccggacacacatcatgcttaagattcaactgggagcataccagggatgctctctaacgtaatcaagggaaggttcagtaagacaaagtgatttatcatctataacttcaaacctatttgtcttgacatcaactctgttaaccttatgtcatcatttcttagagtctttgatatacaaataaaattttctttgtattttaagacaattttgtgatctctttatatcttaggtagagaatctttggctctttctgtagtttgccatgtgatgattattgttttgataattataactgaaaagtgagagttgttttgaaatttaatcttttggaagtcagtgattaagtggaccaattcaagaccccactctaatgtgtttcttttgcctttttggactactttttattttccacctataatctttctacctctttatttaaataaatatttgtttcttattcaaatttttaaattaggtgagcaaaactttttagttcaaaagggtgggagacagtatccctccctttactgtttgcaattctaaaaggcataccaaaataattcttaaaaccctgatttgtttttaaagtagtcagcctgaagtgacttttttaaaggttgtacaaagtgatcataaagaatggagaatagggaaaaaataagaaaaaaaaaagtgccag

SEQ ID NO: 98157 - DNA, 1102 bp, Homo sapiens
aaattttgcgtatgacttaatgattcccccaaaacttaactgctaacagcctactgttgaccagaagccttaccaataacaaactcaaaacacattatgttatgtattactgtattcttaccataagctagagaaaaaagtgttgagaaaatactgttcattcagtggaagtggatgatcataaagatcttcatacttgttttcagttgagtaggctgagaagaggaggtgttactcatgctgtctcaggggtggcagaggcagaagaaaatctgtatgtgtcaagggtcaactgtaaattacaatagttcctaaaacatctggagaactttttaaacagtaaatttctgatttactgggtatcgggtagagcccaagaatttccatttgttacagattccagttgatggttgggggacagcacctggaccactgtactgcaaggactcccttgcctaaccctatagttctccaaactaaaaccaaacttaaattgatggtcaagaagtcaggcctgcccattttggcaacatgaaaagcaccagaaagccagcgtcaggcctcagttgtgctgttgcactgtaggtaattgaggagccccagagggctagacaatcaggtcaatgctctccctacatagataatgcaagcttgaatgggtacaagaaaaaattagtagcattgtttcctggccgtaagaatttgcttttgaagggacaaacttaattgctgatactgcaagtgttctatgtataattagtattaaataaaagggaaaaaacttaggcattttttttcttctttttttgaaatggagtttcgctcttgttgcccaggctggagtgcaatggcgcgatctcggctcactgcaacctctgcctcccgggttcaagcaattctcctgcctcggcctcctgagtagctgggattacaggcatgcacaaccacgcctggctaattttgtgtttttaggagagatggggtttcaccatgttggtcaggctggtctcaaactccttacctgaggtgatccacctgcctcagcctcccaaagtgctgggattacagccgtgagccactgcgcctggccccattgtgttgt

SEQ ID NO: 98158 - DNA, 2961 bp, Homo sapiens
accatcctggctaacacggtgaaacctcgtctctactaaaaatacaaaaaattagccgggcgtggtggcgggcgcctgtagtcccagctactcgggaggctgaggcaggagaatggcgtgaacctgggaggcggagcttgcagtgagccaagatcatgccactgtactccagcctgggcgacagagcgagactccgtctcaaaaaatatataaaatatatatataattcttaaaaaaattattcttaaacatgggtatgaggaagaggggctgtttagatcagaggtgggcaaaggacagcctgaggttcaaatccagcccatagcctgtttttgcaagtaaagttttattggaacacagccatgcccattcctttaagctctgtctgtgtccgtactgtttatggctatatgctccaacagcacaattatgtgttaaaaaggacaatggcctgcaaagcctgaaatatttactatctagtcctttactggaaaaattttctgaccactgttttggattaaaaggaacttaaagggtcaaatgcgatgtataaaccttgatttcaaacctgatttcaaaacatgaaagacataaaagatgttctgggaacagttagggaagttctaatataaactggatattacatgactttagtgaactataattacctttagatgtgattaggctgctagggtcatgtaggataatgtccttagttttctttttgtttttttttttgagatggagtctcactctgtcgcccaggctagagtgcagtggtgcgaccttggctcactgcaacctcagcctcctgagtagctgggattacaggtgtgcgccaccatgccctaatttttgtatttttactagtgatgggttttcaccatgttggtcaggctggtctcaaactcctgacctcgtgatccgccctcctcggcctcccaaagtgctgggattacaggcgtgagccactgcggcggctgtccttaggttttgttttgttttgttttgtttgagatggagtttcacttttgttacccaggctggagtgcaatgacgccatctcagctctccacaaccttcgtctcccggcttcaagcgattctcctgcctcagcctcctgagtagctggaactacaggtgcccaccatcatgcccagttaattttgtattttttagtagagacggggtttctccatgttggtcaggctggtcttgaacttccgacctcaggtaatccacccaccgtggcctcccaaagtgctgggattacaggcatgagccaccgcgcccggtctgtccttagtttttaaagatgcaagctgctgggaggaagtatcctgatgtctataatttgttttgcagtgcttcggcagagattatgaatataaatagatgaagcaaatacagcaaaatgttaatagttgttgaaatatgttgtgggggtatatgaatgatcatcatactattttctccctttttattcctgaatgcttgaaatgatcataaagtcttattttttaaagcagaaacatgctatttattttgctttaattctgagttctttctctctgaaaacttccaagatccttgcaaagttcttgccagcaagtatttgggacacccactatgggccaggcacttgtgagcagggaaagctcaaaagaaaaagatgcagtagctgatgacctcagagaattcacaaagtgaacctcagacctcaaacgctcctgatgaagaaggcatgttctcatttaaataaatgactgaggaggggggaatgtggggaagcagcagttagagattgccatagaagatgagaattatggaaattaggaacacagaagctgtgaagttgaatttgagtttatgaaacagaaatcattcctctccctttctctactaaccaccaaatactacacatttgaagaaaatagaaaacagccgaaagagctgagtggcgtggtacttgcctatagtttcagctgctcaggagggtgaggtaggagggtcacttacgcccaggggttcgggtctagcctgggcaacctagcaaaaccctgtctctggaaaacaaaaaacaaaaaagcagcaaagccccaccccttggcaggtaatagagttgggactacagctgcatccccttgtaaccccgtctccccaccccaaaattgcccttccacatcctttaagctttggcaatttagtactcacctggagagctcttctgtgccacacaagtgtaaggaggtagccatgtgccttctcagggcctcataaaactgcctcttaacctgagccaggaagcagggagggcttggtttctagcaagggtaaatgtgcctgactccaggaaaagaatcagtcagacaacaaatacatctatttgtagcctaaaatctgctgggccagcaacatgctaataaccagctgggcatgatggagaggccacaagccgactgtcaggatgggaagagccctgcactactggtcagagaaaatatacgtgaaagtgctgcataagccaaatggcactatttaaaatatgcttgctgttataagctgatttcactacttactagttcatgtccttagacaagtcaaccttgccttttcggtctcagtttctgcagctataaaatggtaataattttttgtttatcttgtagagctcttagaaactcagatttaaaaaatgcacaggccaagcgcagtggctcatgcctgtaatcccagcactctacgaggccgaggcgagtggatcacttgaggtcaggagttcaaaaccagcctggccaacatggtgaaactctgtctctactaaaaatacaaaaatcagccaggtgtggtggcacagccctgtaatcccagctactcaagaggctgaggcaggagaatcgcttgaacctgggaggcaggggttgcagtgagccgagatggcgccactgcactccagcctgg

SEQ ID NO: 98159 - DNA, 1353 bp, Homo sapiens
gtgtctggtctgctcggagccactggaagtgcctcccggagggacgcagggtgtctcgccgcctccctgcccacccccttccccggctaccttcatccgccctcccgccgccccccgccctcggtccgcgacgcccgagttccgtcaggagcccagagctgcgggagaacgaggcggcggcggcggcggcggcggcggcggcggcggcagcagcagcggcttcctcggggggttgtgattcgctcacaggagccattgacgggagaagaggaggctttcttggtggaatttacctcaggcaagatcgagccgcaggaataaaaagcgaggaagggaagggagcgccgccgggaggactagaaggggcagcctctcacacccactccgcctgccgtctcggggagcccggaccggggccgcgaccgcgacccctcccctcccccgctcctacctctcctcagccttcgccagggcctccccaaccctctcacggttgttctgcgaaggcgtggggactgtgagcttgtccatggaggcaggcaccttttttgatccagtcaaggaagaggatttgttgttttcgaaatcagagtgaaggaagcaccgaagcgaaacttaaggaatcctgccttcccggagccgcgggcgatgcgactagggctgccgggcgccgccgccgcccgtccggcttcgtccttcccggcagtcgggaactagttctgaccctcgccccccgaccccggatcgaatccccgccctccgcaccctggatatgttttctcccagacctggatatttttttgatatcgtgaaactacgagggaaataatttgggggatttcttcttggctccctgctttccccacagacatgccttccgtttggagggccgcggcaccccgtccgaggcgaaggaacccccccagccgcgagggagagaaatgaagggaatttctgcagcggcatgaaagctctgcagctaggtcctctcatcagccatttgtcctttcaaactgtattgtgatacgggcaggatcagtccacgggagagaagacgagcctcccggctgtttctccgccggtctacttcccatatttcttttctttgccctcctgattcttggctggcccagggatgacttcctcgctgcagcggccctggcgggtgccctggctaccatggaccatcctgctggtcagcactgcggctggtgagtagctccggccggcacgtcccggccactgcccctgcgggtggcgagggagggagcccgcagaggccgaggcctgtgcttgcccttcgccatgcgtccccccgatcgcggtgcagcggagctgcgacccggtgcctgc

SEQ ID NO: 98160 - DNA, 1188 bp, Homo sapiens
tctcagaacataggcttttcaatgttatttgttattcttaacctttttagaatatagattctcatttatgatgacgtgctcataatattgtgatcagaactgataaaagtaagagaaaaagcatttatttaaaaataaacttaatttttgtttggtaatacaatcatcttagaatagtgtctcttaaaagggagagagtaaaagaatcactgcttaaaagtggttgtagtcttttttttctttggtattgcatagcaccagatgacaaaatttgtgaagctggatttcagacctgtaacagtaatgataatagctagtatttattaagtgcctgccatgcaccatcagctattcaaataactttacatatattttttcatttcgtcttcatgacaattctatgttgtaggttattatcattccccttttccatagagggagagtaaagtacagagaatttgaataactcaccacacagtcagtaaattatggagccaggattatagtgtgcgccctcacataccacattaatggtaacagcagcactagcagcaacaacttctcatcttattggatatatgagatggagtaattagccttcaccagatcaacctttgtaaagaagcagggacacttacaaggtgttagtgcagcagtggttatgcaaatgtcgtagttctgaacatgtaaaactttgcttggcctaatattgaagtggctagtgcagcttcattaagtgcaagctgattagagagggcctgtgtggatttgggttacacagatgcagtgatgttaactcgacaggcgcaaatggtgcagctgaacaggaaaataaatcctagaagactgattgatagcacatcctttttcggggtcatggataaatcatttcttttgattccctctttctcacttattgagttcttggactccttaattcttagaacattttctttctttctttctttctttctttcttttttgttcagacagagtatcactctgtcgcccaggctggagtgcagtggcacgaccctggctcaccacaacttccgcctcccaggcgcaagtggttctcctgcctcagcctccagactagctgagattacgggagcccaccaccatgcccagctaatttatttttattttttgtatttttagtggagacggggtttcaccattttggca

SEQ ID NO: 98161 - DNA, 1047 bp, Homo sapiens
ttgaaaagggcaattttttccccattgaattgtcttggcacccttgtcaaaaatcagttcaccatatatataagggtttatctctgaactctcaattccattccattgatgtgcatgtctgtctttatttcagtaccacactgtgctacagtctttatttgttgctttgtattacgttttgaaatcaggaaatgtgaatcctctgactttgttcttctgtttcaagattgttttggctattctgggtcctttgcatttccatataaagcagcagcttgtcaatttctactcgaaaggcagctggtgtttgaaagagattgcattgaatatgtagataaatttggggagtattgacatcttaataaatattaagtcttataatcagtgagcatgggatgtctcttcatttgtttagataagattactttttttcagtgatgttttgccattttcattgtgtaaatcttgcacttcttctgttacatttattcctaataattttgttcttttgatgctattatgaatgggctcattttcttaatttcgcatttggattgctcattgctagtgtacagaaatacaattgatttttatatattgatgtattctgcaatgttgttgaacttttattagctctagtaatttttttgtaggttccttaggatttgcttatatacaagcaaatttggattttgtagattccttaggatttgtttatatgcaaatcctaaggaacctacaaaaaattactagagctaataaaagttcaacaacattgcagaatacaagaccatgccatcttcaaacagagatgacttgacttcttcctttctaatctgtatgtctttttatttcattgttctttttctttcttctttatttttactttttgtctcctttccctggctaggggaatctccagtacaagtttggataggtttggggaagccaacatttttgtctcgttcctgatcttcgaaggaaagtttttagtttttcaccattaagtatgctgttagttgtgggtttttcttttttcttttttct

SEQ ID NO: 98162 - DNA, 1022 bp, Homo sapiens
ccttctaggtttgttttgaagacttggtaattttgaacatggacattttctttgatgatattttttatttggacaccaaaattatttaatagaagcaagagtggtgagaataatttgagtacgaggggattgcttttgggaaatgagaattttaaaatttccttcttgtttggagtttacaaatgaattcatgaacagaagaacgtcattgaatgtaaaattagaaatttatgtaaagatttcagttcaaataatttagtagggaaatttatgaagtcattcggataagacaaagattttatataatattttgaaaacattaaataatttgtcattcctttatttcctttattttagcttcgcagaatcaagaacggctatgtgcgtttaaagatccgtatcagcaagaccttgggataggtgagagtagaatctctcatgaaaatgggacaatattatgctcgaaaggtagcacctgctatggcctttgggagaaatcaaaaggggacataaatcttgtaaaacaaggcaagtgatactttccttacctgaaatgactgtgttttatacaattgatatttatctaaaaaggacatgggagtatgttaaaatcctgttcagaaaaacagtgaatttaaaagtgtatatataaagccaggtgtggtggctcatgcctgtaattccagcacttttcgaggctgaggtgggcggatcacttgaggccaggagtttgagaccagcctgggtaataacatggtgaaaccccgtctctactaaaaatacaaaaattagtcgggtatggtggtgtgcgcctgtggtcccagctactcagtaggctgaggcaggagaatcactgaacctggaaggcagaggttgtagtgagctgagatgtcaccagtgcactccagtctgggcaacagagcaagactccatctcaaagaaaaaaaaagtgtgtgtatatctccacaagccccaaatttataaaaggctatttatttttagattatttttaaaacatcttt

SEQ ID NO: 98163 - DNA, 1058 bp, Homo sapiens
gcacatgcctgtaatcccagctactcgggaggctaaggtaggagaatcgcttgaacccgggaggtggagattgcagtgagctgagatcgtgccattgcactctagcctgggcaacaagagtgaaactccgcctcaataaataaataaataattcttagattaatcatgcagttaaaccttttttggtggccttttcccccccatgaaatgtctttggtatcctttaccatttttctgtttcttaaaaatatgtttcctgttgatttgcaaaactgtttcatagcttacacgtactctcacatttattgaaattactgcttagtttgttgtttttctcttagttttctttatcatattgtctccttttttgtattcatattgatttataggatgttggtctcacattggagatccccaagagtgtcactatgaagaatgtgtagtaactaccactcctccctcaattcagaatggaacataccgtttctgctgttgtagcacagatttatgtaatgtcaactttactgagaattttccacctcctgacacaacaccactcagtaagtaaagtaaccaacttttctttgtatttcctttctccaaagatttgcaaaatataaaaaaacttaaaaaacattcaaggttgaagccaggcgtgatggctcatgcctgtaatgccagcactttgggaggccgaggtggatggatcacctgaggtcagagtttgagaccagcctggtgaaatcccgtctctgccaaaagtaaaaaattagccgggcgtagtggtaggcgcctgtaatcccgctactcaggaggctgagacaggagaattgattgaacccgggaggcagaggttgcagtgagccaagattgcaccattgcactccagcctgggcaacaagagtgaacctaaaagaaaaaaaaaattcaaagttgttgggagtgagaggtagagttccagcatcataagattacatctggcaaacacctgaaatccgaaagcgatgcaccaggacttccaaggcatcaatatattactaaataactttggtaaaata

SEQ ID NO: 98164 - DNA, 1057 bp, Homo sapiens
aaaattgtaaatacttatggagctaaaagttaaggaggaggggcactgaatgtttttcccattttttcatgtcttttctaaccttttggcgggggtggaatttaactttagactgttatttctctctcttcttcagtttttcactgtttctttcataattcactcatcgaatgccttgattcaattagccaagtatgggctattttttttgttgttattttttgctttttcttccaagctagatctattcaaaatgattaacaagttaaatttaaaccagtctttcatattcagtattaactacttgtttgaaaaaacaagaaatctgccccctctcaattttttagggcattaaatgtaaacattagtctgattatgattactgccattccaaacatattaattaaaagcaacgtttatttcctataaaaacatttgttcaaaacattgagctccacaataaatcatagtacagaaacaatatcataacaatttggattattttgctaatgaattcacttaactgatcacatcgttttggatttaaatgtttttctctacttgtatgaaagctacattgcttgaaaactacaaaaactaatccccaatttgcctttctacacagtggtaaaagattaaggagctgacataaccactagtgtgttatatttaagcttccctttgctgcttgctgcacatgttacaatgttgttctttctttgacacagacccagacaaaagctgagtgtagcaaggaaacagacagaacgcctccagtagtggcccccgcctggctccaggatttgtaaacagaaacatcccaggctccaatgagacagacagaggttccctgtctgttctgcattcaggaagtgtttgcttgtataagcccaactattgcacaggcatacatagtagtgtttacatttggctgagtatttaactgagaaaacttaatagggaagaaaaagagggtttattagaggtaggagaacaagacaattcaggtataacatagatgtagcatatgttatgtaaaaaggtttttttattttga

SEQ ID NO: 98165 - DNA, 1050 bp, Homo sapiens
actgcgtccggccaatacaagagctttaagaatacatatccataataccattttcacatctgaaaaaataacagtaattcctcagtatcatcaaatgtcaagttggttctaatatactttaggtttgatggactgtttaggaaatcagcgttcattgattcatttgaataacttctatacaatcttctttaaagtttttataatattgcttagggttttaaacttttaaagtaagtcatcatgggagtgtctcccagaatttggctttcatgctattctgcattcatcttaatttataggtattacctagtttagtaaatagctttactcctattgacattaggcataaatcttgctgctaatctttctgcagctcttctttttaagtgtaatattataaaaagtgtaaaaagatattcattttaagaaaaccatatattagtaacctgtttcctgttcttataggagaccgtaaacaaggtcttcacagtatgaacatgatggaggcagcagcatccgaaccctctcttgatctagataatctgaaactgttggaggtaagtttgccgttagattatggactgttgtttctactgtgatactagacctggaacagtgacttcattcaatcattaagacattcattcatttatttaaccctatttactaaattacaattttttgtcaaggcctattctaggcactaggaacataggtgaacaatgtctcctggggcttctatttgaattggggagtctacagacaggtacaggaatgtataatataattgcaagtagtagtaagtgctatgaagaaaagtacagtggataagaaagtgatgaaaagggggttattaaagaaaatatgggccaggcgcagtggctcatgcctgtaatcccagtactttgggaggttgaagctggtggatcacctgagatcaggagttcaagaccagcctgaccaacatgaagaaaccctgtctctgctaaaaatacaaaattagccaggcatggtggttcatgcctgtaatcccagctactcaggaggctg

SEQ ID NO: 98166 - DNA, 1211 bp, Homo sapiens
ttgttgtttcctgcttgtattgctgcctcaaataatattgggttctgttactaggtaggaagagaagaatacattgtggggatcagcctttgctcgtgtttcagagctatgtagttatattccctgttgtaactgtggtcttcctcacctttcatgcatatttttgctagttgttcagagcatctttttttttttttttttttttttttgagacggagtttagctcttgctgctcaggctggagtgcaatggtgcgatctcagctcactgcaacctccgcctcccgggttcaagcaattctcctgcctcagcctcccgagtagctgggattacaggcatgcaccaccacgcccagctaattttgtatttttagtagagatggggtttctccatgttgactcaggctggtcttgaactcctgacctcaggtgatctgcccacctcagcctcccaaagtgctaggattacaggtgtgagccacagcacccagcctggagcatctctttaatacgtttgctttctcactttgtttcaatatacacctcacctcatagataccccaaagttacctttgctataattgtgtctttgtgctttcttctaccctcatcccttgctacatttccttgtcatattatagccctgacattattttttcagtctctctgacatctttagtgaagagaactttaatatatcagttttcttagatctttgtttcattgtatattagcatggatcatcttttctagctgatgcttcatgtataaataatttctcctgaataatttatccgttcatttatcttgacatcttgcttctcctaaatacagaattgtccaaagtattgcctgtgtcagcaacttgatgcacttgctgtagtgctttagcacattaaccattggactgtgtccacttagctcttcaatattatactgcctttaaaaagttggcttagcacagaacttaaaataccatcctaatctcccttttcaagacttgcataatttagcaaggtttcaagtcaaatgtaggctgaaaagaatgattgccatcagatataagttttatttaaacagagctgttactctgaaacattagctaatgttaccactaaataagggtaatacctttttaaaaactaagtacatagatgctgctattgcatataaatatagtagctatttgaatttatgggatttttctttttt

SEQ ID NO: 98167 - DNA, 1127 bp, Homo sapiens
ttttttttagtagagacggggtttcactgtgttagccaggatggtctcgatctcctgaccttgagatccacccgccttggcctcccaaagtgctaggattacaggcatgagccactgcacccggccacccagctgtatttttgtgaattttaaaaaatattaagttgtatacatattgttttgcaattttctcactgtatcttacagattatttatattgatatacataggaaagtctagctcattctttttgattgattaatagtattcactaaaatggatttaccacagtttacttattcaggaagggcattttataggtaaaaaataagttatagaaaggtttaatgacatggttagggtcaaataacattgacatgactaagatttatatataacttctggtctaatgtctgttcttcagaatatgctacgttctctctctaaaaaatatcactctaatttatcaggttggcactatcagatatatggcaccagaagtgctagaaggagctgtgaacttgagggactgtgaatcagctttgaaacaagtagacatgtatgctcttggactaatctattgggagatatttatgagatgtacagacctcttcccaggtaaaaactactgtcaaaagttgatattttttgaagtgaagcagttatatcttctttctctacctatagtacctaactcaacttttatgtaagaatctttttactttcatttaaacctttagttcattgctatctagtgtttagaaacattattagcagcaggatgcaaattaggaatttttttttttagagtactccaggttttcatctgagtgaaatttaattaattgccagtaatagcttatctaactgtattttgtttggtctctgattgctttagcagtaaacattttccttatgcaccatctgagtgtttgagacaaggtacacttacgatgtttactgagttgaacccagaaggaattagaagcaatgaattatttgtaaacactttttccttttctttttttttcatgctccctttctccctccttccttctttccttctttcttccttccttcctcttctctcaccttatctccttcccttcctcctcttttctcttctt

SEQ ID NO: 98168 - DNA, 1048 bp, Homo sapiens
actgggcatggtggctcacgcctgtaatcccagcactttaggaggccgaggctggtggatcacctgaggtcaggagttcaagaccagcctggccaacatggtgaaaccctatctctactaaaatatgaaaattagctggacgtggtggtgtgcgcctgtaatccaagctactcgggaggctgaggcgagagaatcacttgaacccgggaggcagaggttgcagtgagccgagatcatgccactgcactccagcctgggcaacagagtaagactccgtctaaaaaaaaaaaaagaaaaaaaaatcattaaacctacagcaaggtctctttaggatttccaaatgtgcctgaaggggatgaaaaaataaaaagattgtgacacaattttttttgcttacttggtatcagaaatacccctgttattctatcatttatgatagttagaaattttattctgtcattcttttctacaaatccacaggggaatccgtaccagagtaccagatggcttttcagacagaggttggaaaccatcccacttttgaggatatgcaggttctcgtgtctagggaaaaacagagacccaagttcccagaagcctggaaagaaaatagcctggtaagaaaaaactaagttattaaagagaggacttatgactgaatatgttttaatgttgtttgaaacaaaaatagactgttaataacgttaatagtttttggagttgcctaatgccacaaatcaaacttgatttttatgatgttttcaaatttttcaatatgaaaaaaagtcagttttagttccattttgtttttttccaagcttaaaatactatttagagagaataactaatgtgtcataagtttgccagattaggtaacagctggataaattaacatattaatattttaaatattattgaaattctatcttactctcttgagaatagtaccaaaactgttaagtagtgcaggcttacataaccaatggctaatgaaaatttaggctagacctgaaaaaaaccaaggcgcagcctatgaattctgctaatt

SEQ ID NO: 98169 - DNA, 1029 bp, Homo sapiens
attataggcgtgagccactgcgcccaaccaagtatccttaactgggggtaaaggagaaaagctcacctagagatagaagacagccaaatgtccccaagttccatcaaactcaaaacttatttttgaagcagaattagtggctattgattgacataacgtaactgaattagcaacaatgacctaaacctgtggccttgaagaaacatctacgacttattgttgcttttacttttatgaataattcttcaaggagttaaggtaaatcttgcttgcttacttgttcatcaccttttgagcatgttccgtaatccttgaagcctaaaatatgttattagagctatgtaaaatactggttaaggtaattgatttttcttttacctcatgtggtaaactgaaaagctcaatacatttttttttttaaagacacatggtttgacatgtactttgtcttacaggcagtgaggtcactcaaggagacaatcgaagactgttgggaccaggatgcagaggctcggcttactgcacagtgtgctgaggaaaggatggctgaacttatgatgatttgggaaagaaacaaatctgtgagcccaacagtcaatccaatgtctactgctatgcagaatgaacggtaagaccctaaggggtgtggcatctatcaatcagtattagaaactgagacccaacaaagaatagaaaataaatacttttaaaccagcctaatagttcaatgattacctcatacaatctaaagttatcatttttctttcaatattcctattcttctattgaacatttttgtttggtacaagtgcaagatgaaatctgcattttttaatatgtaaaggtatagtgaaagaagttagtctttctctatttatggtccaactttcctgcaataataaaggtaaaatgtttttataactccaaaagttcataagcacttctatataaattgtctcatttatcctttgttgttattccttcttcctctgcttttttttttaagtaaatggaactatgaacttgcct

SEQ ID NO: 98170 - DNA, 1901 bp, Homo sapiens
tcaaggacttttactgatatgactcagactaccccagaaagatatgtgccattactagggcatgcctcttaatggaggcctttggaacaacctaaaagcttatattctttttactatttggccattggaacttaattgataacataccttttgagtaggcactatgcatctagaattatggaaatacagaaaacatataccatggttcttcctctcataaaacataacgtctggttgtatgaatatacattccataaatatatatttcatgatgttataaaactataggggagattttttaattaacttataaaccaaaataatgaacatttataaaaattatatctcatccacatacatttttcagtaggcttaattcacataaaactaacacttatcaagttattaattgacacttgattatttgattagactttttaacctttagaaaaatgtacgtttggaagaaaatgaaaaacaactcagactttaaaatcagaggtgttaaatttggagagacagtttgtcataaatgtacgttctcaatgtgatactttttttctttctttaagcaacctgtcacataataggcgtgtgccaaaaattggtccttatccagattattcttcctcctcatacattgaagactctatccatcatactgacagcatcgtgaagaatatttcctctgagcattctatgtccagcacacctttgactataggggaaaaaaaccgaaattcaattaactatgaacgacagcaagcacaagctcgaatccccagccctgaaacaagtgtcaccagcctctccaccaacacaacaaccacaaacaccacaggactcacgccaagtactggcatgactactatatctgagatgccatacccagatgaaacaaatctgcataccacaaatgttgcacagtcaattgggccaacccctgtctgcttacagctgacagaagaagacttggaaaccaacaagctagacccaaaagaagttgataagaacctcaaggaaagctctgatgagaatctcatggagcactctcttaaacagttcagtggcccagacccactgagcagtactagttctagcttgctttacccactcataaaacttgcagtagaagcaactggacagcaggacttcacacagactgcaaatggccaagcatgtttgattcctgatgttctgcctactcagatctatcctctccccaagcagcagaaccttcccaagagacctactagtttgcctttgaacaccaaaaattcaacaaaagagccccggctaaaatttggcagcaagcacaaatcaaacttgaaacaagtcgaaactggagttgccaagatgaatacaatcaatgcagcagaacctcatgtggtgacagtcaccatgaatggtgtggcaggtagaaaccacagtgttaactcccatgctgccacaacccaatatgccaatgggacagtactatctggccaaacaaccaacatagtgacacatagggcccaagaaatgttgcagaatcagtttattggtgaggacacccggctgaatattaattccagtcctgatgagcatgagcctttactgagacgagagcaacaagctggccatgatgaaggtgttctggatcgtcttgtggacaggagggaacggccactagaaggtggccgaactaattccaataacaacaacagcaatccatgttcagaacaagatgttcttgcacagggtgttccaagcacagcagcagatcctgggccatcaaagcccagaagagcacagaggcctaattctctggatctttcagccacaaatgtcctggatggcagcagtatacagagtaagtggagggatcatataatctctcctgtgtgtcttttggggccatt

SEQ ID NO: 98171 - DNA, 3163 bp, Homo sapiens
cagaggttgcagtgagtcaagatcatgccactgcactccagcctgggctacagagtgagactccatcccccaaaaaaaaaaaaaaaatttgatccaccttgagcattaaatacaattaaatacaataattaagtacattttaccaagttaagatcgctaccaaaaccagaagatttgagaatacagctgagaagtttaaatgttctcctgtgttttgtgtgtgtgtgttttcccttgccttataaaataagtcaatcagttattaaaacatttgggttaaagagtctcaaaaataagttggttaagcttttcctggaaaaacattgtctggcattatgaatttcaagaaatgttcattagcaccctcctgagacattggtttgaccttttcttgagttacatcccttacccgttatttcttaagtttgttaaatagctcatttttctgcacttttattttcagtaggtgagtcaacacaagatggcaaatcaggatcaggtgaaaagatcaagaaacgtgtgaaaactccctattctcttaagcggtggcgcccctccacctgggtcatctccactgaatcgctggactgtgaagtcaacaataatggcagtaacagggcagttcattccaaatccagcactgctgtttaccttgcagaaggaggcactgctacaaccatggtgtctaaagatataggaatgaactgtctgtgaaatgttttcaagcctatggagtgaaattattttttgcatcatttaaacatgcagaagatgtttaaaaataaaaaaaaaactgctttatcctcctgtcagcaccccctcccacccctgcaacaaagacttgctttaaatagatttcagctatgcagaaaaatttagcttatgcttccatatttttaaattttgttttttaagttttgcacttttgtttagtctcgctaaagttatatttgtctgttatgaccacagagttatatgtgtgtgtatcaaaagtggtctcaaaatatttttttaagaaaaaaagcaaaaacaatgtattgctgataatcagtttggaccagtttcttaaggtcattaaaacagaagcaaattaagacaggtttgactgcagtggtgtctggtatccatgttttatttctgggcacaagctagtttttatgttgatacgttcctgaacatattatcttgttggacatcttttctcttgtgttttgtttgaatgtgcaatagtttataggccacaaataagctttcttgtaagctctcttcctaacagggcacatattcttccataatataaacacttttctgccccatctcccatacttttgaaggtcagttctatgacagtgaattttgcacaggagaagcagctacctgatttcttactttctctctccttatcatggagaatacagaaacattgtctgaaagggctctaaagaaggaactaccaaaacctgacttgaaatgccatttcttttaaccttccaaatcctaaatgtttccttcaaggcatcttaataaacttatttgcttctggttttgggagttcataagagagaatagaacaaaatacaggacatcaaatattagccatttcccattttattttatttttctatgtaggttcatgttccatgttcatttatttaagaaatacatttttattggtaagcttatagagctacacttatggaatttttaagtaggtaaataaatggttaagacaaaatagtgttatagccttcattctctgaataggccatctttgactcataaaattacccttactgtttattataacttcagaagtaatttatagttctgaacctatagtatcttttaccctgttcccaagcaaagactggtgactttatctgaaaatgattcctcttcccatgacctaaaacactgtgaggaaaaatcattcaagtggcatgccaagtccctatgaaggaagggctgctatcaaacctaccttttttgagcaaactgagactaaacttctctcttttcaaaattgtgttatcttccttaatcctattttcataatttttccttttgccagtttttcacattatctttgatatgtgagcaacatttattatttacattagagtataccttttagtaataaaatgacttgaaatcatattatttttaaaagccctttgcttctttcattacttataatctcctctaaaacaacctctgcatgttttttttaaataaagcactttctgtcaaataatggacttttttctaaacagaaattattttctattaatttgcaaactgatgatttcacttttttttacttttttttcgattatcagagtacttagtaaatgttatatagtttagttctaagatagttccagggattaaaaggttaagaggaaaacacaaatcaccaaatttctgatttatgtttttatctcctgaacaatattttctcactcatattcctctatcttatcacttagctaaagacagcctaaatttcccaattttctgtccaaaatatttgtgatttacttgtatataagccttctcatttgccatgtgctgtgatcttacaagttagatgttactatacctaccatttattcagctggattgctgaacacagttctggattcatagaattaagaatatcttgttagtgcccaggatttccacgttttgtgttttattggcccttttctttattcagccccttaatctattttcagtcttctggcacgtaatttttttcacagttattattcttctattaacaaattatttttatctttcctagtacattttcacttagttctcttgcccttaaatatctttcacatgcattttaggatattcttttcaaatatttgtaggacaactttgaatcaaaataaattatgttccttctccaatttgaagcattgaggataaatgaccatttgaggtctaactgatcttttcctgccagaagagttatcttacgttctgctatatttgtatttgggccagttgattgtaggttgtccaacattttttaatattgggaaaattatgataaaatgctttaaaaattaatatgccagattaaaataactgaatagtttactatttcattcaagcatgtttaaaacaaataatttcctttcaccagttt

SEQ ID NO: 98172 - DNA, 2679 bp, Homo sapiens
ggaaagtatatatcatttttataaattttaaattgtacatcagacttttaaaatctgtaatatacaagcaagcaaaattattttaaatgacttaattgtatgctaatactcatctgataataaatgcttcttaaagttgacatttaactgctatcacaaagttttatatgtagaaaagtggggtccttttgaataaaagatcattcaactaaaaatattaaaatttatttcactggatggtaatgtaaccttaaaagcatcataataggtaaagtctaatattagttcccttaacaaaatcctaactgtataccagaattaggtcactgaaagaacttgatttgaattacgtttagacaaaaatgatttaattgtaaattcttaaaactttctaaatgcataattggcaaaaaaaaaaacccactgttaccagtgtaggaagttacaagaaggcacatactgaatgctgaagtatacatatgctatttctcttaaacctcagagcaaccatatgagcattgtaattaatattcccattttacagatgaggaaactgaagctaagagaagctaagtaatatgcccaaggtccacatctagtaacagacaaagctgggatttcagtctatgtctgcctctctccacatctctttcatccataccacactgcctacatgccatatgacaggatgtgtaatgggctaacgtttatttaaaaagttcaggccaggtgcagtggcttatgcctataatccccgcactttgggaggccgagccgggtggatcatgaggtcagacgttcaacaccagcctggccaagatggtgaaaccccgtctctattaaaaatattttttaaaaattaactgagcgtggtggtgggcgcctgtagtcccagctactcaggaggctaaggcaggagaatctcttgaacccgagaggtggaggttgcagtgagctgagatcgcgccactgcactgcagcctaggcgacagagcaagactgcctcaaaaaaaaaacataaaaattcagtcactatactctggcacaattttcatttgtatatgagccaaaccacataccttaatgatttgggaagttaggcaaatatgagatatgtagacatatctatgctgattgttgcttgagaaataattactaattctagacaaaactcaatcctgtatcttccatcatgaatcttaaaatcatttcacttcactcctaacatttcttacattgcagaactaatggtaaagtaaattttacggaaaaagttaagatagctttgggaacagagacctttccctaaattgattccatagcagatttgggggaattaacaaagaatttcagtctcatcaatcctttgaatccatcttcaaaacttctgcttttaataactttagaaaatttactaatctatagaactaattgagtaggatataggaaggatacaaggatataatgtcctttttataaaagtttagtatagcttctttacatgtatccacttgttccagaaaatgtgcattggttctgaatgtgaaaatatttaaagagagaaaggaacactcaagtaagtgtgggcttcagtgggaattatcacaaaacattggcaagtatttttatttaaattattttcaaatttgacttctacagccaagtggaattggtaggctgtagctgttacactgaaatttctagtctttgtaagtgcctcctgaaagtcatttaaaatggaaaaatatttcaatgagcttttccttttttcatatttatggacatgaatattttattggagatcattaactcctagaatttgagattatatttccatacaacattttataaagttatgttgaacttactacctgttatgtgcaggttattatgtaactattcacagattgcttcatatattgctttatcttcccatctaacttcttaaagttaaaatccggacacacatgttgattatctagaccagtcattctggaaattgtaacactcccacataaaccccaggagactttttcagaatgcaatgtttctaaatgtactgttactggcagtttactctccagcatataaggttgcattttaacttttagattatgaactgtgcaaactttacccaaaactatcttgcatgattccctcctaaatatattccttgattaagtaaatctggcaaatcactgtttgagctagttacataaaatttgttatcaagagaaggcttttctacaagtttccagattaacataaagaaaagagggaatcacagggcatttaagtgcaccttcccattactttccttaaatcacctcatagttaggctgggcgcggtggctcacgcctgtaatcccagcactttgggaggccgagacggtggatcacgaggtcaggggactgagatcatcctggctaacacgatgaaacctcatctctactaaaaatacaaataattagccaggcatggtggcacgcgcctgtagtcccagctactcgggaggcagagacaggagaatcgtttgcacccgggaggcggaggttgttgcagtgagccgagatcgcgccaatgcactccagcctgggctacagagtgagactccatctcaaaaaaaaacaaaaaaaatcacctcatagtttatgtctgacttactccaaacctcagtt

SEQ ID NO: 98173 - DNA, 2434 bp, Homo sapiens
acagaattgtatatcattttgccattaaaattttttaacatattgcagcaagcttagttttatgattgagccacaaccttttacatattttttgtatgaaatattaaacactaaatgcaagattaactttcaaaagcaaaccctacattaatcaggtattatctatggacatttttgtagaccacttttgaaatacttattattttgcaacatagactggactatacaactttcatttaacttttaggtgactgatttaagttgagtgtgcatatagagaaaaacctagaaatttatctcatggcagatacatttgaaagtacttcagaagaatttatgctgtatattaaaactaggctcaaaataaatctatcgtatctttaaaagtccaattctgttattactgtgatgtttgtagtgttactattaaacattgtgaacatacacatttttaaaacaacttgaaacccattttaaaatctgggtaagagagaaggaatcttcagaacaaaatcacatcattagggtgtccagtttatgattgaatttttaagcaaattactgtatttgaaactacaacttgatttggttttcagttttaaaaggcaacatgtgggttttatccattttatttatacctttagatttcagaaacatcttcatgttttagatgcattctacagacatcatgttacttaaaaactcagggcccctttcatccctttgtacactgaaaaagttcaattgttagcaagtaagcaattagatccagttgaatatttaaagtgtttgttgcacagttcatttaatgtttcatcttatttgactttttcacatagatataatatcagatttcattaattataaaaagttgcccagttctgtaattactgaacagagggaatgactcaactaattggctacatgttgcaacaaatttaggcctttagagttgaagcactgacttaaaacgacttacatttctgttctttggtcaaatgaccatacatgatatgggacaaattgtttcattttgtttgttttttaataagggaacttggtaaagtagttcctgtcagataggattttctcaagagacaatttaacgttataaagccttctaaaagtgaactaaatattttataactttagtaatagcttggatggttttgagaaaataacctgtatttatcacattgtcaaacagaatttttctttgaatcagacaagttcaagctctaaattgatgtgctatatacttaaaatcctaggaagttatctgtaaccagtctcttgtctcaggctcttcaccttgttaccaatcctcgtaagtatgtaaaggaaacatatttttaaagaagcttaacagtaagaaaaaattactaaaagatgcaattcaaagataggtcccagtttaacactgaattgcttgacttctgtggcttttctttttctggccacatttatttatttaagcaatttttgtatgccttgttatttcatttccatagagattatattgtatcagtgtttatgtaagctggaatcatcctcagttttttgctgataatttttcaaataaagatacatggataattgtaaaatacactaactcttagggtgttgtagtagctgaaacatggagatgcgtagctgtcatgctttttctgaatggacaggagaaacataagctacggagtattcacttctgaggatgcttttccggaaaaagaaaggctagaaaatactcgcacttcctcagaaccctctttcttgttaacgggtatcttttgttggtgtgttttgctcttacattacagatagactatcatatatgactttatgaataatttcagttattttgcttttgtataagctgtctgaagccttgctatgctgtataagttgtgtttgatggatcagtgtgagtataaaataaagcaaatcacttttcttttgtattatctatggatgccactatgaaagctgacattaagccactaaagagttttctatgaataagtgtaagtaaatgctttgatatatataaacctaaataaaaagattgtattgatacagagacattggagaaggagattttaaggcagttctttaggtttaaaaaggcttgctgtaaaatggtgcgttattccgtttattaaagatcatattaatgacaatagtaattgtgtttttttattttaagaggtcaccagaaattgttagtatgataattagggagtttgcactagaatagtaaatgttctatctaatatgactttcataactcagtatgatacatcaaaaaataaaaaataaaaaaaaataaataggccgggcgtggtggctcacgcctgtaatcccagcactttgggaggccgaggtgggtggatcacgaggtcaggagatcgagaccatcctggctagcacggtg

SEQ ID NO: 98174 - DNA, 1045 bp, Homo sapiens
tctaagcagagttacagtatccacaaagccctagaaagcttgagagggtagagttttttcagggggatgagaggacattcaatgagagtaggatatgagatgttatatggaaggatggagagagatgactacacacacagctattacagagggttagcatgctgttcttagagtttgaacttaacctagaagtcatggaagaatttaaacaatggggtttcaaaataggtaactcagttggtagtatataggatgaattgagaggaagggagaaacatagaaatacatatacctggccgggcctggtggctcacacctgtaatcctagcactttgggaggccaaggcaggaagattgcttaaggccaagagttcaacaccaacctggccaacaaagcaagaccctgtctctattaaaaaataaataaaaaagaaagaaatacatagaacggtatggtgctggtgagagataatgaaagccttaaaccaaggtagagtcagtgatggcagagaagagggagcagattgggtctgggttaaagagaatcagtaggacccagtgaaccattaagatgagcattggagagagaaagactgttaacttcagggttctaatttggaaagggaggttaatgaaaaatctcagggaatgtgcagctgacaaagggtcctgcctttataagttttaaaaatagaaaaatttttatatattgtcttgttattatatcatgtgttcaaatttttggttccgaaaatataggtagacaactttcacctatggtctctgcagaaatgcttcaagaattgagccttccctgggtaagtcactcagaaattcagttcaatctttttaaatgaatgtgttatgagaccaacttgttgcacacagcatttgtactaggaaattttgatgaagtggccctgtgcctgtactgtaaaatgagcatggaagctgggtgcggtggctcacgcctgtaatcccagcactttgggaggccgaggtgggcggatcacctgaggttgggagtttgcgaccagactgacca

SEQ ID NO: 98175 - DNA, 1044 bp, Homo sapiens
ccgaagctcgccggagaagaggagccccagcgccccggtttgcaaagcaggtaagtgctgggggtcgcgcagcaagggggaggcggctgcgggaaggggtcccgggcgcgcgctgcaatcgcgcggggactgcagagctgccgcggagcccgggtggctgggggcggggctgggggcggtgccgggcggtgggggacccggcagtgcggccccgcctttcccgggcctaccctacgccccgcccgcccgcccgcctcattcacccctctgcccgccccgcacggctccctggtggtggaggtgcagcggctaaaccttgggcttgagctgatgagtgttaatgataaacctggcttcctggccttactcctggaggagtcgttactgcttaccctcccttgagggtgaggctaggagtggtttgtcactttgttttagggacaaggttaatgttggcatagcccatatctgctgctgctaagtatttctgttcacaaaacagtttcagatctggggtactgaatgcattagcagtggcagatttggatcactgaacagaggaggctgagaaccgtgttttagcatttcctaagacttgataaatgggtagcaagaagtgaaaattaaacaagattccttaggaaggtttatgggttttgtctgaggctctgggtgtatttctgattttgtgtactgattctgtgttttgaatgtagaaaaacagaatccagtgttttgtctccatcttgttattgttttagggagctaacattcgttgtttttctgtttacctggaagctttcttggggaaggtcctgaatggagctgttgggtgccaatggagtcattcataaagagtaactcaaaagagaaattcaaattgtgggaagtggaaaggaataaaatttataatcttgttgccttaaggaaagaaatgggtggtttttacttacgtattcatttttgtcaacatatatctttgtctttccttgtctggggaacttctgttagaattttccaggcagaatggttgggaatttcagg

SEQ ID NO: 98176 - DNA, 1041 bp, Homo sapiens
ttttatctgactaaatctggaaggaaagtctttgtaaacgtcagagtccctttttcattaaagggaggctaccaccagtttgcagctgtgatgaatgtaaaaatccctaccgtaaagggtaagggtctaccccatataattctataaacctcataggactcaaatttcagggtccatctagatcaggctgttgacttctaggtgtcttatcagatgaactggatgctgtaacctttgttagggatccggtatctcagagtccctaagttgaaggtatcaagatccctatccagttgctttattcttctagggttagagctaattggctggtgtagaacttcctactcttgactactataaagtaatccaagcacccatccctgacagatattttaaacttcccaccttcagtgactgtcatctccatagcaaagccgtttgtcattaggaactgaggtatgtttagaaaaggtacctaggcaacagtgttaaccagaaagtttatttttgtgccttctctccttttacccaacttcattttacttattaaaatgtcaaatagattacaaatggagagatggtataacatcgaggtgaggaggatatactttgggtagacagtttgagtttaatacctgtgttctgccaactagaagccatgtgatatggaaagttatttttcttatctgtgaaatgggtggtgaaatctacttcatatgatagtagggattaaataagggaaaactgaaaaacagcacagtacctcagtataaaagttagctgttgtgtatcatattagttttgcttctagttttagtgtatttaacataaattaccagtgtaggttcagttttcatggttgtatgaagtttcaaattggtgataacattgcctgtgaacatccagaatggtgtttctcaaagtgtagtctgtggttcatctgtatcagaattacttagggtgtgtggtataataaaaaaaatttggtcgggcacggtggcttatacctgtaatcccagcattttgggaggccaaggtggg

SEQ ID NO: 98177 - DNA, 1051 bp, Homo sapiens
gtggacttaaagctttttcagtatttattcttttcccaagataggtttttatattatttgattaggaagcttgagtatttgggggattctttgtgtgtttttctgagactttttacaagttattacagtattttgtttgtatttcacgatatgcagaagatgatttttactaggaaattaatctcttaacattgaagggacagtattgctgttaggatagtggtgtagtctacagctactagttaacaaaagatagtttttcttgggcttacagttagaaaagaattctcacatacttttctgcatgtttttttcccctggaaattcaggggagattattcattaggaagaataaatactgccaggtttcttagagctagagtctttcacatttcaaaggtttccccaaatgacaaaaccgtcagatgtttaaatgaaattgtctcattagaaaatatagccaacacatttcagaattatttgattgagtgttagagtctgatgttagtaacaagagtgggagatgccagcatcttcacagtcacataaactaattttgaggtaagaattttatttttttattattttttacagtagttatgttttttttattatactttaagttttagggtacatgtgcacaacgtgcaggtttgttacatatatatacatgtgtcatgttggtgtgctgcacccattaactcatcatttaacattagatatatctcctaatgctatccctacccccgaggtaagaattttaaaagtgtgtgggtgttttgtggctgttactatagcctcaagcaagaaagcccttccataggattttcttatttcttcatctgggctgaagacgcttactagcctaggagggtttgagagccaagagacagtgaggtagaaaaagaaacttacttttctctgaggaatggaaggtgcattgtaatttgaaaatgaaaattactgccctacactaaaatcttgggatgtcagtccaaaacagagcatgaatgttatttaatttttaaaagttttttgccgtttcaaaatt

SEQ ID NO: 98178 - DNA, 1285 bp, Homo sapiens
tgagccgagatcacatcactgtgctccaacctgggtgacagagtgagattcgtctcaaaaaaaaaaaaaaaaaaagaggcttaattgactaacagttctgcaggctgtacaggaagcatgacgctggcatttacttggtgtccggggaggcctcaggaaacttaaatcatggtggaaggcaaagggggaaagacacaggtcacatggccaagcaggagcaagagagagaagtgggaggcgctacacacctttaaacaaccagatttcgtaagaactcacagtactaagagggactgtgctaaaccattcatgagagatccacccccatgatttgggtgagacatccaaactgtatcattgtggcactaggagagtttaaagttatattctgaaatctgagctctgttacagtcgtaaaagaatttctgaggttgacattcttttactatatttatttatccctgttccctttgcagtcgttcacagatgtgaataaatgttcaaaatcctaccttcattgtgtgggatttgggttttaaattatatttcatacatgctaaggagcaggtttggtcactcacactttttgtgaggcctgtaaactttgatttatttttgagttacttatgtctgttggaattacgcttcagcctagaaaattaaaaggtaatgttaagcctctcttctccatcccattttcttaaggctcctgttccaaagagtgcacttattcctgtaattcccatcaccaaatcaacaggctcccggttccggaatagcgtggaaggattgaatcaggagattgaaataataattaaagagactggggaaaaggaagagcaacttatagtaagtgatcttgtatcttaaaatcattcttgaactcttataattattaaaaatgcacagtttgggtttccatatttacttgggtttcttccttctcattgagagagcaaaaatttatctcttttgaaaaatctttgacctgggtgagtgaatgaaaagttttcattttgttgcatgtcatagaggcaactgatctgacttgaatttggattactgaacagaaactattttttgtttgtctgtatttagaaaccattaggtgatatacttcttatttgctgtaactccagttaacaaaagtttagcttactaattatggggggcagaagtttacatgacattgaataccttctaagcatgaatctgtctgctccttttttgaatgtcagtgactatttggttttggttgacatgctaggctatgtcatcataaagt

SEQ ID NO: 98179 - DNA, 1955 bp, Homo sapiens
gtatatctttaatttccttgctgtctccttccagtatactatagacctcggaaaaatcatggcagtggaatataccatacataaaggcatacatgtctttaaacatctagattttcttttgctataggaaattcattattcccttgaccgtcttagctcatcattgacatgcagtgctcatcgggctgagccacctgcatggtaatggggctgtcaagggaactgaaagcagcaatgatgatgggggcttcttgcattctaagatacatatgttgaatcatatgtcagatagcactttggtcctttatgtttgaaggtgggggacagagcttgagttttatattccttttctgtgatgtaagttaactgtttttaaaaaataaaagagcttgtttccaagcttttttttttttttattttttaagttcagtgacttaaaagcattgggttgtctgttctatgtctaggccaaaacagcttcatgaaatcccagccttttattgtcctgacaaaaacaaggtgaatttcattcctaaaagtggatctgctttctgcctcgtcagcatcctcaagccactccttcctaccccggatcttacactcaagggctctggccacagcctgacagtcaccactggcatgacaaccactctgctgcagcctattgctgtggcctccctgtctacaaacacagagcaagaccgagtctctcgaggaacaagtacagtcatgccatcagcttctctactcccaccaccagaaccaattgaggaagctgaaggataggtcacagtgcaacgtggctgttgttctgggaaattgggaacctcctcagatcactggattctgatggcatcgtgcgcttctggtcggctgtgatgtgctccagctttccagtgacatgtgacggcgaggcttctggaagaaaggatcccccgtgacggctctgccccacttgtgaacgccaaccctcagtgcttagcctgctttttatcaaagcactgattgaaacaagaaaggtctcattctttacctttggagagacaatatcacgtttttgttttcgaattagacttctttaaaacacacacacacacacacacacacacacacacacacacacacacacccctgatccttgccaacatgattcctaaagggagatgtgactgatgctgcaagaaccatcttttctatgaaaatgactattttataatataccaatgttacattttctgaaacgtagcaaacaggatattcaaaagattctttggtggcctctgtttcttgttccctttctagatgtgtgcttttctcagctgttttcagctttgggaccaaagggattgttgacgttttcccagcaatcttaatctcatgactatgttcttctcccaaacaaggattgataggtaaatgcattgaacaagtatatataaaaagagattaaaaagcaatattcgtacattatgtgatttatgtttttgatgtcaaaagtttgtgctttgggtgaaatatttgtataactgctgttttcttcactactcctgtacacatttcaccatgtggtcagaaaagttgtagtctgaagacaagtgctttaatatgttctcacccatattggaacttgatttaaaagtcagtgagccaaaaggaagctatccagcgttgattgctagctaagagtaaggagcccctttggttttctgtgatatatatatatatcacacgctctccctcctttaccacaggtgtcattctacctttaatcatcactgtatcatagccccaaagagatcctgaaatggctgtgcatggatttcctcctttgcccttgtgatgttgttgtcttgtggatttggttgggctagtagtttgccaggagtgtaatccagtggatagtgatccaaactgtagccgcagaatcctgtgactgacatttttctttgtggtgg

SEQ ID NO: 98180 - DNA, 2067 bp, Homo sapiens
ttatggcttctcagtcatgaaaagctcagttatttggggtctacattttctcactgagagccttgatattttgccttctttgttatgcattataacttgactgtatcaccactgagtatctgctgtatcagaagttcagaagaaaaggtaaaactgaaatcagaatgggggtagaggaagttaaaaacaagttatttaaaaagaactcttggtttttggatgacttgaattctgttaaatctgtgttcttggccttgcacttccgttcctcttccatctctatccctgctagtcacaatggcattttagaactagaatgccactctgtagaggttttcccttttgctctgttgtgcctatttgtctaattcatatctttctgtggagtttcatatgtccttaatctaaagtaacttaaaattggaatggaagaacaagtttcagaattatttacagtcttatacatagaacttctagtgtaatgtttggttgtaaggagaatgtgaatttgcaggtaaatgaattgtatggcaaccagacagatccctggggtttgggagaaatagagcttgagatttgaaaaaaaggtacaaggtacaaaacaactctaactgccagtgccaaagggctaatttttaagcatgtaagctttaccacagtcttgaaaaaaatattaaccataggttcattcagctgttttatttaacccttagttccctggtggttgattttttttttaaatgggtctccagctttccagtgaaatgtgacactctcaatagaatgcataatgttggtttctaaagttacactccataattattgttattctgtagaaaactgtacagaaggtaaatagaatagcttcaatgggaatataatttaaatttttttaattttataaaaatttatttccattgcattaaaagaaatgggtagcatgtgtctttcagagaaaggagctatttggttattcactttgtcaatcttaggtttttttaaatctttaaacaatttcttctttgtgatgataaaaataatataaatttactgtttctgatcatgactgagtctattacttgtcatggcttttgtacgcaactgtgttttaaaaataccggttttgcctctttggttacatgtggtgagcatggatgtcaagattatttttcaactagattattcaatttgttttatatttcttatacttaatacttatgactacagtccaaatcagtcttttagaaggtgctcttgctaactgtggaatatttgacgacatgaaagtcctttttctttgctttcagtggttggctttcactgaaagaaagtgtaaaaaaagtcagaatttatagctttcactatgtccaagactaggactgggttataaagattttcttttgtgaaggaaaataaaagaaaatttgccactactgcatttactttactattgtaaacttaagattcattccttagtctttggaattttgatgtctcaaaaccagatgagtggaagtgctgaatttgcaaaataaagctaagaatgcttaactctgcactttaagttctactctgaccaaattgaagatgagcagagcagccctgaacagcattttgtttatacagtcttgtttaagaatagaatttttttaactcttcattttttgtctctgtggaagctgtgtaactctttttaaaatgcaatttaaaacattttgttattctaacaattctctcaaaaaacagcatttccaatggtaatcggtattgttacgctgtacttatgtattccctgtacctgaacacttgttgctgcctcacaagaaaatagaacttttatgttaaaaataaagtctgttcttcttgagtttttttctgtgaatttttatgaatattgtccaaattcaagttacatttctttttggactggttatttatctagcttttaagcggtacattgtttttctcagactaatagaaaaatttgtttgtgttcagcagcaagttccttgctacccctcacctgccctagaactgaaagtacctgctctttggggtaagtgctag

SEQ ID NO: 98181 - DNA, 1013 bp, Homo sapiens
gagtaaaaataaaagtgtgacaaacttttgtacttcaactacagtctccaagcaaccaagaatgtataatgaaacatatatttaccaaaaaacatctgaaattttattatcttaattattctgtggcagtttcatatttcatacaccaagaaaaggaaagggatacgttttcatacttttctaaacttttccatttgctttaaggtgtctgggtccagctcttgggatacatctttcatccacagtagagctcctctgtattctgtgcgtgcctgctccatccgattaattgtcatcaaggtatcagatactgccctttgactgaatgttgctacttcttgcttcagacgagacagaggagtacacagggccaatctaatggcagagaggtaaaaatcagagggttgaacacatcataagtaaaacaaaacaaaggtttaaaccaatgaaaaagcatatttgctaacaagatgaatctacaagtaaaaaattattcagttcctaaggagattttgaaagcaaataaggatcatatagccaactctgaattatcaataaagatgtgttggccgggcgcggtggctgacgcttgtaatcctagcactttgggaggccaaggtgggcagatcgcctgaggtcaggagtttgagaccagcctggccaacacggcgaaaccctgtctctactaaaaatgcaaaaaattagccaggtgtgatggtgggtgcctgtaatcccagctactcgggaggctgaggcaggagaatcgcttgaacccgggaggtggaggttgcagcaagccgagatggcgccactgcactccagcctgggcgacagagcgaaactccatctcaaaaaaaaaaaaaaagtgtctacacctcctcccttgttactttaggaaatatgtcatttttgcaatactttggaagttattccatgtataaataacctgccaagtaaatctgccatttagaaaacagttctgaggggaacagagaacctgcattcataaagca

SEQ ID NO: 98182 - DNA, 1049 bp, Homo sapiens
ccaactacacaggaggctgaggcaggagaatcgctcgaacccaggaggcggaggttgcagtgagccgagattgcatcagtgcactccagcctgggcaacagaccaagactccatctcaaaaagaaaaagaaattcatgttaatatgttgttttgttgcatatagatagctagacaaacagtatataaggccatagtttgggggttaaagtagtcaaggaagtgtgaaaatgggcctaattataaataaattcttaaaatgaaataacatttttttctgaatatatttgttataataaatgtctgtggtctaccaatgatacaggaaaaagaggagagatgatcaaataaacagaattttaagattaagtggttattggggcaaggttggtaaaccctgtaaagttttcagataagtataagtgattattcaaatgtttgttttaacactgtgaatgcatataatatgttaatattttcatcttttagttgtaaggctcctctctatgatctggctgctcatgaagacaaagttctgagtgtagactggacagacacaggggtaagaatttattagttatttgatgaagaggaaagtgactagaataaatctggtgtttgtgtttataaaatgtattagtttcgggccgggtgcagtggctcacgcctgtaatcgcagcactttgggaggccaaggtgggcagatcacgaggtcaggagatcgaggccatcctgactaacaaggtggaaccccgtctctactaaaaacacaaaaaattagccgggcatggtggcgggcgcctgtagttccagctacttgggaggctgaagcaggagaatggcgtgatccaaggaggcggagcttgcagtgagctgagatcgagccactgcactccagcctgggagatagactccatctcaagaaaaaaaaaacatttattagtttcaatatatttgatatttataattctgtattatttcacttaatattatttataaaatgtcacctctcattcaaagaagaaacaaatttgtcctttaataggccagg

SEQ ID NO: 98183 - DNA, 1031 bp, Homo sapiens
agtaatatttggggtcaaattcaagtctgccacttataagctctatgaccttgggcaagttatctttatcagcctcagtgtcttgtataaaataaaaacagaaatatccattccattgtaaaggaagaaataagtcaggatatgaaagatgggcagtttgtctctgtcatgtgggctttgtaagtaataagtactattattgtttcaattattctgtaatgaaaacactttccccttttggggttcttcctttctagactcccatagtgaccctctctggccacatggaggcagtttcctcagttctgtggtcagatgctgaagaaatctgcagtgcatcttgggaccatacaattagagtgtgggatgttgagtctggcagtcttaagtcaactttggtaagacaaattcagtgttcttttaagtgataaacttctagagatggtttttagtctaccatggttaatgttctttccttttctttttcagacaggaaataaagtgtttaattgtatttcctattctccactttgtaaacgtttagcatctggaagcacagataggcatatcagactgtgggatccccgaactaaaggtgagtcatgtaaaccactgggggaatatatgtgtgaataacatctatttctcatctctctggagatgtacaaaaaaaggaatttctggccaggcgtggtggctcatgcctgtaatcccagcactttgagaggccgaggcgggcagatcatgaggtcaggagttggagatcagcctggccaacatagagaaaccctgcctttactaaaaatacaaaaatcagctgggtgtggtggcgcgtgcctgtaatcccagctactcaggaggctgaggcaggagaatcacttgaatcccagaggcagaggttgcagtgagccaagattgcactactgcactccagcctggtgacagagcaagactccatctcaaaaaaaaaatttctacaaatattttttgggttccttctacctacttcccttttctaaaattcaacgctt

SEQ ID NO: 98184 - DNA, 2025 bp, Homo sapiens
ttcatttatataaccttcttacctcatagtaattgacatatttccagtctatatcagctactcttaagtgctgtcatcaactgaaaacgcctagttgatagtctgagcattagcatacactaaagttagtgctaatagagttttactatagtatcaatctactctttatcatgacaaaatggtaaaagttagttaaaaggtaacaaacctgagggcaataccatattgatttattaatatgaagggttataaatccacttagaatttgaaagtttcctaagccacattgaagtattctggacttaagagtgtttctttgacagttagggtaacaggatgcttgtattcaaaggtgaagatttatgatttttcatattgagccgaaaagttttatatgttgtttagtccaaactttagtggattaactgtacctcttctttttggttaaggagagatagaaactcaacttgaacttatttaaccttaaaagtaaatggattgtgagatccaaggaaagattgaacaaccacatcacaagaagggtaatggtgcatttgggcctcaggaaccagtggaatagaggcttgaatgtggtccgcacaccctctcgctgtcttgtccctcaagttgactttattctctctcacttcagattggctttcttcaaaagacatggcaataagcttggccttcaagatttcccagattttatgttctgtcctatctgcccctggaaaaaggctaatttcagttctgtggaacacaagttctttgaaaaggtcctgaatgaggaagagacctactgttgtaggcaaataatatgaatcatattacatatgtcttttcccttcatatacatctgtttagttttgcagtggctcctgggataagatgctaaagatctggtctacaggtaaattaaatatttattttaccttgacttaataatgttgtttcaaaaatttaaattcggaggctatatggtggcttacgcctataatctcagcacttcaggaagccagggtagaaggatcacttgaggccacgagttcaagagcagcctaggccacatagtgagaccccgtctctactaaaagtagaaaattaaaattagcaaggtgtggtggtatgcaccggtagtcctagctccttgggaggctgaggtaaggggattgtttgagcctaggagtttgaggtttcagtgagctatgataccatgccactgcacttcagccagggtgatggagtgagaacctgtctcaaaaaaaaaaaatcagtttagtgaaaggggactttttaacccatattttgccataaaaagagaccagtatggcaacaaattcatatatttctttgtgtttcaagattttttttttcctaccccaccacccccttacttacaggatagtgtcactgaattgcaagtatcaaaaacatgtttggtgcaataggacataaataccttgattctcaaagttctcttattcaggaaacttggaagtaaataaaaatactttccgagccattttgacttaagtaatgtaagaatgacttttgagtcattttactgttaatttcttaggtaagctggtttacttaaaaaaatttttcaatgcagttttaccaatattaatatttttactctgaaagcatagattaaaaggagcaaattgagggaggaggaggaaggactttgagaggaaggtgctttcatagtagtaagaagacactgatgagaagaaaagaggaaaaaacacacacccatagatacttacattttaagacctagtagctacaactatttattgcataggtaaacaaatcagaatacctctgttactttttaggtaattgctgtgttacacagtataataccccaaatgcatttcacaaagacttgagggggatcaagaaaagcttaaccagttttgaataattatgtgtaagatggtgggaaatatataatccgttttagtagattttacaaaaatgatgaaagcaaataatttggtggcaaaaagtgat

SEQ ID NO: 98185 - DNA, 1067 bp, Homo sapiens
tttttttgaaacggagtctcgctctgtcacccaggctggtgtgcagtggcgcaatctcggctcactgcaagctctgcctcctgggttcacgccattctcctgccccagcctcctgagtagctgagactacaggcacccgccaccatgcctggctaattttttgtatttttagtagagacagggtttcactgtgttagccagaatggtctcgatctcctgacctcgtgatccgcctgcctcagcctcccaaagtgctgggattacaggcgtgagccaccacgcccagccatgccaggtattatttttaggaggttgagaaacgtcaagtgatctgatctagtatggcttgaaatctcaatcttcatatcaaaaaagagtttaaaagtataatcctcaaagttactttgtcattgccaaagaaacatttcagggtttggaaaaactgctttttgtgtttcataagatttttttttctcataggatcttgactggttcttatgataagacttctcggatctggtccttggaaggaaagtcaataatgacaattgtgggacatacggatgttgtaaaagatgtggcctgggtgaaaaaaggttaggacagtttgcctacacttagaggaatcctagatagggatttggaaataagccatttttggtgctggggaagaatggggagtgggtgggaagtatctcatacctcagttattatgaggtctttcaaaaaatacagtgttcaagaagaaaaagattatataaaaaattcataaattgttagaagtgtatctttattaaaattacatcagataatatacattttcaagttaatattgaatgtattacattcatcttttattttcttctgtttttgtttgtttgttttgttttgttttgttttgttttgtttttgagatagtctcgctgtgtcacccaggctagcgtgcagtggcatgatctcggctcactgcaacatccacttcccaggttcaagcgattctcctgcctcagcctctcgagtagctgggactacaggcacctaccatcacgcctggctaatttttgtat

SEQ ID NO: 98186 - DNA, 1034 bp, Homo sapiens
ctcaggcagtcctcccacctcagcctcccaagtagctgggactacgggcacatgccaccacgcctggctaatcacttttctaaatgttgcttaacagttatcttttctgtggatcgtttctggccctgctcccctgccctccttttctgtggttaaaatgacctatggtgtctttgttctttttatacatgtcacctaatggcattgttcttatataacttcattctatttgattactaaacttcaacctcatcttagaacagagaccatgttttaattcatttttgtttacaacatgtagcaaaatgtctggatgtctggcatttatttacccaataaatgtatgttgaattcgtaaaagcatgtttgttcaaatatctgtagacttgatcttgacatatcatttcctttttatagatatgccgtagatgatgttcccttctcaatccctgctgcctctgaaattgccgaccttagtaacatcatcaataaactactaaaggacaaaaatggtgggtatatatgcttaggagagggcacagtgtccctaattattctaaaatgcattaagtttttagttccttttttggccttatgatactgtatgaattttgtagtggtaaaatttgtaagttataaagtacaggttcttctgctggatgatactgtaaatactgctttgaaagaaaagttttcagaaaaaaatttctgtttaatctgtttttaaggccatgtggaaatatggtggttgtagttaaggaataaagattttggtataaagttgtaatatagaggtaatcaagacattgattgttctacagagggctgagttatgcaggcataaaacaagcgttttagtgcttaggccccatttactagtgaagcacaaagcaaaatgacaatatcagtatttgagtgtttagtgtaatatcaaaatgacagtatgaataccagtattttattttttgtgtccagaattcataaaaaaaggatataacaaaacatggaagaatataaaacatttaaaagataca

SEQ ID NO: 98187 - DNA, 1077 bp, Homo sapiens
ctttgtatttccgcctctcgcctctctctaaaagccgcagttagaggcgagatttaggaaaaacctctgccgagtgagcctctggttgggaatatgtatgagaaaaaaaaactggcaaggcgttagtcaagcaaagctgaaggcagaggaaatttgatatctggctggagtctagaggatttaatgcaaataagatactctgagggcagcgtggcaaaaaaagactacaattcccggtggtcacagcgtttgagaagcgatgctttctgagacttgtagtaactaggagctgtgtttgaactatccaggctcaggacagcctcttgaaaaaaaattttttattaataaagcggatttgagtgggatctttttcctaatcgattacgggcccacacgtatgggaagaattctaacaatgattaaagggacatgctacctttacgactatccttttctaatcgatgactcctaaatctaggagtaggtagtcgatgtttgtggtctgggcgtctgtagaagggcaacctcgtgctttctgcagaggagaccggagggcagaaggcagagtccaggcttagactgcagttcctcgcttacctgtgcagtctaattttgagctgcctctttgtagtcttaaaaggcaggagcttcgtgttgtgggtctgctaacccgtacgtttccgtgggcaagtcgtgtgtactcctcgccatggctcagctccaaacacgcttctacactgataacaagaagtaagtaagcgttccagccttctctcccttccccaggttcctttccgaccacccctttggtatgaccttgtggatccctggttgtttctgctgtcacccccacccttttttctgagattacctgctttctaaccagcttcgtaggttctatataatttgaattgtgagtgtggaggaggctgaagggcttcaggtttgctttctgaatgaaacattttatatgtgtaatttaaaaatgaacagtgggccttgttatagggtgtctgctagtggtggttcacagtttttgaaaacggaaaaaaagtttttgaaaatgaaaaaacatat

SEQ ID NO: 98188 - DNA, 1034 bp, Homo sapiens
attttttttcaagaggctgtcctgagcctggatagttcaaacacagctcctagttactacaagtctcagaaagcatcgcttctcaaacgctgtgaccaccgggaattgtagtctttttttgccacgctgccctcagagtatcttatttgcattaaatcctctagactccagccagatatcaaatttcctctgccttcagctttgcttgactaacgccttgccagtttttttttctcatacatattcccaaccagaggctcactcggcagaggtttttcctaaatctcgcctctaactgcggcttttagagagaggcgagaggcggaaatacaaagaaaagaacggatgagagaggaaacggtcgacggtggccgatagtggtcctactgtcgtgggactgctctgcgcgctcccggtggggcgcgcctgcgcattatgctggtctccatggcggggcctcggagccaagacgaggttgagtagactcgttttgaattttctcccctctgctccggcggacttcccatgtcgccttgtggggctatcggcggcggcaggactgggggagtcagaggtctggcagcgctgtctgcgcagacctaccggacgctacctcccaaccccccgtcttcctcctgcctcctcctcctcccgtcacctcctgacccgccggagctccgagcaactgccggcctccgcccccagccgcagccggtcactggcggcgccttccgcgccaagcttgggggccttttcggggtcccacatggcacggcttccgacccccggcccgggacggggctcgcaggccccagaggggcaggctggagaaggaggaggttaggtgtcttcaggagggttgctgagcccaaggacgcgccatcgccgcggagaaggagccggaccccttgggcggagcgcccaatgtgtggtccctcacgccgtcccgcaccttgctttttagggttctttttccgctttctgagcccttttataccttacgtttagaaggggaaaatcatcctcccacacct

SEQ ID NO: 98189 - DNA, 1470 bp, Homo sapiens
aatctgggaggtggaggttgtggtgagctgagatcatgccattgcactccagcctgggcaacaagagcaaaactccatctcaaaaaataaataaataaataaataaataaataaataaataaataagtaatccaggcatgaggtgattatgccttccaggagaatgaagagaaggcaaatctacgggaaaaaaatagtaaaatctgtaagtacttagatatttttaaataatgtttacttttaatttgctaagtattaatacaactgagaatatggcatatattttacataagcctctgaatactttacagataaattgaattttctctaagcttaaatgcttaaagtagacttctggttgataagatagattatcttgagattataatataatgaaacaaattcttctttatcttgtataaaggatttacattaaaaaggtacagaagtttcctgaatatagagttcctacagaccccaaaattgacaagaaaattatcagaatggagcaggagaaagcttttaacatgctaaagaagaacttggtagatgctggtggtgttcttaggtatgacatttttatagttcttttattttacaaattaattagctcaatttgcaagaattattttgtaagggaaattatagttttccaactatttcattaagtaacggttttataaggtagagatatcaatagttccctaggtattaaattgatttgccactgtgtaagccattgagtttcttagccccaagttgtagataattcagaccaaagaattattccatactgtatagcatatactctgtataccatataccatgtaaaagctttttctcaaaatgacaaagacatacttaatacactttattatatatttagtactttgttttagctacttactatgagcagaaacttcagccgcctgtcatttttttaaaactaatctttgattacttacggcagccagaaatgaattccaagccgtaaataaaattccatttcacaccttttatgctttaggttttaaatgtgaaatattagcattcttttttactttcctttatgtgtcagtctgggtgaataatttgttattgtataatggatttaagtgtatggaatatcgttttcgtgtgatctttaaaaaaaacttttaggtatgtgaaaaataaattgagtcaacaattagatccttcaatgaaagtcaaaaatatcactaaaaaaattagatcctgcagtttgaagagcattgcatataatttttaagtaggcattgtcagttattgtaataattttatacagaaatatcaattaaagcagtatcctaccagattagttcattttcctaccgtctacttttctttttttttttttttcatggctctccaagagatctgcattcacctttagttaattctcttgctcacttggccagcaggagctgggagtgctgtagaggcagtatg

SEQ ID NO: 98190 - DNA, 1748 bp, Homo sapiens
ttcaacgtcttttcttttgttgttttttttaactttttttgtaaaagaagcaggggtcttgctatgttgcccaggctggtcttgaagtcctggcctcaagtgatgcacccaagaagatgggattgcagaagcaagccactgcacctgattcggtgttttcttatagcattggagaaaataatttggttttgttgtatgtcctttcacttaaggtctcagtttccaggagcctaacaatgatgttaactgagagcttactgtaattcctagaattatttcctaattaatacatgacttttctatttagcagttttcttagacattttatatttatttccactggggcatcattagcataaggcaaaaatttggtaaagccattcactatttactaaacctgaatcttaacaatggaagtataatacagttctgcgatttggtccaccaaatgtaataagcatatatatgttaaattttatcatttcttttatatattgattttttatacaattaaataacagtgctgccttctatttctatcttcttttgtctccgtgtaaaattcaagcccatcatatttcatataatattaattgatacttttggaagcaatgtaacatgatgtttacgcacataacctgggtataggcccaagctctcttatttactaggtaggtgtatgattttgggcaaattatttcacttctacagtccttagttctatcatctgtaaagtgggaatgataattgtacgtatgtcgttgatcattaagggttaaaggagatatttgatgtgaagtgttccatacagtgcctgacatagcattaaaaacattattatacttaaactgaaaataatgatttctttaaattcataaaaatatcaaagctcagctgggcgtggtggctcacgcctgtaatcccagcactttaggaggccgaggcgggcggatcgcgaggttaggagatcgagaccagcctagtgaaacatagtgaaaccctgtctctactaaaaatacaaaaaattagccgggcgtggtggcacactcctgtagtcccagctactcgggaggctgaggcaggagaatcgcttgaacccgggaggcagaggttgcagtgagccgagatcacaccactgcactccagcctgggcgacagagcgagactccatctcaaaaaataataacaaaactcactctaatatatttagatgttttaccaatgaaaatattacatttctatagtctgcaataattctatgttgtatggaaaaagtttaaataggaaaatataaattacttacagagctataaaccatactttatagaagtttatactgaaagagaacctttctgtcttttgatctaaaggcatattgctaaatggtttatgtctttattccattttgtattctttacagaaaatttgtggaaagggaactgttcaaacccgatgaggtacctgaaagacataatttatctttttttccaactgtaaatgatataaaaaatcacatccatgaggtacagaaatccttgagaaatggagatacggtatataactcagagattattccagcaacggtatgattacaaccataattccttattacagagtctttctcagcttctattaatatttagtctaataagaatggctagtgttaggccatctgaataactgcaatataagcaaatacaataggccgggcgtggtggctcatgcctgtaatcccaacactttgggag

SEQ ID NO: 98191 - DNA, 1045 bp, Homo sapiens
ttagaaaaataatatttttctcacttgattctgtgtgaatgtctcttctgatactgttttttaatcagaaagttacagagcaactttcccacaaacaaaccaataaaacaaaaccccacaaaaaccaagagcatgaagaaaagtttaaatccctaattatatactcttttggtttttaggtagaaactggagctatcaatattttcatgtaagtatttcaaggagtagctctttaaaaatggtttctaaattagattttaaaaattcattgtcatctaaatgcatgtttagtcacaatgtatcagtattgtgtttaaaggtgctcagcatcactttttgaaaactatgtttacatatttaaaatgtttaattattttgaaatgtatagggtattaaatacaagcttctaaaattttcagtatctatattggctttctctaacagctctacagcaaagtttgacatgttttttgtgtgtgtcatgtattgtaagttgtaatatctgtaggagtgagttggacattctaaattagcagtaaaaaattcacaattacagctcagcttgtttattcattatagtttccacatttccaacttccaagtgaactttatatatactacagtgaattatagataaatacagccatggtggacctttccctcaatagtgattttttgtacaaacagttagtataattaaaaggaaaagcttttatattttatgcaaggtaaatgtttcctaaatgtcacaaaagtgatagaaaacatagcttttgggatctggtcctgcattagagtttctaattctgagacccaccagcttgtgtttcatcttctttatatcctgtcagaatacatacttaatcatgtgggtatgagaaagatgttgtttaacttgtaccaggtttaaaaaaagaggtttaaaaaatgtctgtgcgtatatatatatatatatatatatatatatatatatatatagcaacttgatgtatagtgtccttgttaccatgtatttttttcattaaaaatcctgctttttttttat

SEQ ID NO: 98192 - DNA, 1068 bp, Homo sapiens
cgtgcctgtaatcccaactactcgggaggctgaggcaggagaattgcttgagcacgggaggcggaggttgcggtgagccaagattgtgccattacactccagcctgggttacagagtgagactccatctcaaaaaaaagaaaagaaaaaattattacaaagcatcctaaaaggcaaaaaacaacctgaagacataaggcaaagatcagaaccaaattcatataagacaggcatgttgaaattaccagactgagaatttaaaacaactatgattaatatgctaagggctctaatggataaagcagacagcatgcaagaacggatgggcaatgtaagcagagatgtaaattctaagaaagaatttttaaaatgctacagatcaaaaacactataacagaaatgaagaatcctccttagtagactgaatgaagatgagctcattagtaaactggacatggctaagagaacatttctgagtttgagaatatgtcaatagaaacctccaaaatggaaaagcaaagagaaaaaagacagaataaaatgattcagaacatccaagaactgtggaataactacaaaaggtataaatgtgtgtgataggaataccagaaggaaaaaaaaggaagcgaagcatatttcaagcaacagtgacagagaatcttcccaaattggcaatagacaccaaaccagagatccagaaagcacagagaacaccaagcaggataagtggtttaaaaaaactacacctaggctatcattttcaaattacagaaaatcaaagataaagagaaaatcctgaaggaagccagaggaaaacaaacagctttctatgcaggagcaagataaggattatatccaacttctcatcagaaatcatgcaatcaagaagacagtggagtaaaacatttaacatattgagagaaaaaaaaaaaacaccagcctagaattctgtatcccataagattatcatataaaagtgaaacacaaagactttctcagatgaacagaacaatatttgagggaatttgttgccaacagaccttccttataagaaataattaaaagaact

SEQ ID NO: 98193 - DNA, 1152 bp, Homo sapiens
accagaacaagaacattctaagagctttgatgtatttgaaatgtctgagatgtgggccttttccttgtatctgtacaaaaggtatgagtgggaagggagtcttgctccttattctcactggacgcattcttggttatgaacatgtacccatctctaggagtctgtctgccctagaggattctatggtggacatactgtgttagctgtgatgttttcctgaaacacaagtttctatgaaatctaatcagtccatgtgaaagtatagcgggttgtttgtgggaagtgaagaagatacatctttagtttttgataagtctagattttttagtatggcctctttttctaacctgtggatgtttttctctttcacagatttatttaattgcccaactaccactgatgaagatatattggagtgactgctgaaattgcctttttgtttttaaccagaggacagtccatttgtttcacttctttttgctttctttactgctatgagctttactgaacggctgaaaaacttggaaaataaaatggacatgctgtagtcttgaacataatttttttaaggaaaacttaaagtgccagagtgaaagccagaatggcatccagagagaggctctttgaactttggatgctttattgtacaaaggtaattgctttcctttttatttttatgttttaaaatactttattataaaatttgtgactggcagtagtaacactttatttaatagataatagtgtatttagtcataatgaataaccccaaacttaaaagcgtttaaaggattttctgttttcctctttttcaggtttgaacacacatacaatattggcatactgttaaaaactgtagggtgcggcttttatttgatacttatccccaaatgatcctaaaattatataagtaaaattatgcccttaagagaaaaataaaatatttttatttttgtttgtgcttttcattttctcccacaagtgagtgtaggatagagacatttttatgagaagggcattaagcatttttcttggaatgaacctttgaaattgcatcacaaggttattgattgaactgcgtgctgtgtgactgccactaagttagcactctttgagcattgtctcatttccttctcactacaatactgtgag

SEQ ID NO: 98194 - DNA, 1091 bp, Homo sapiens
aatttaatctggagagtcctggggccttgttttgaaaagacttgaaatacacataagaagaaaggcacataaataaatgttcagttgtccagaaaaaaaagatgagggagtagccattcagatacctgggagaagagtgttctgggtagagaaaacagccagtgcaaagtccttagggtgggagcatgtctggcatgtcccaggaaacagccagaaggccagtatagtacagggtaacagtggacaaggttacagggatatgggagggcaaattgtttaaacttttatagaacattgttaagattttagctctttgagtgacatgagaagccatttgagagttccatatacttaatgtacattttaaaacagcacatatgtactcctaaatatcacttggagatttcatagtattgattctttaggtatctgcttaataggtgtagaagcattttttttttcctgataggcatacttaatattataatggttttgttatttcagaaagatccagattacctgaagctgtggttggacacttttgtttctagctatgaacaatttttagacgttgactttgaaaagctgcctaccaggtatgtagaaacgctaatttgtaacccctggatgagtttttcatttttggcacaaagatttcattgatgacatattacaaggatggcaattatgttaccctcttgatactcatgaataaccctattctcatagagacatagctaattgatgacaatagtctttcttgatgatgccagacctggcttctagaaaactctgcttctctaggacactaccagctggtgttctgcaacacacttcatttctgacactaactaccagatcccacaagtaaagggcaaagtcctctgtaagactgccttcacttcagacattagccactacaagtcttcgggaccacccatacttcagaccaactggctataaattctgggttctcacacctcctccccacctcaagttcagtaactcactacactgacttgaaaaactcactgaaagcactatacttgtgattacggctttattgtaatgaatacacataggacaaggtg

SEQ ID NO: 98195 - DNA, 1050 bp, Homo sapiens
aagtgctgggattacaggcgtgagccactgcacctggccaacagttgacatattaaactagttatgtagatacttcatttttactttacagttattgtttcttttagaaatggtatgcacactgctatacacagtatttagtatacatagtatttttaagtggaacataatttattctaagtattttcattaaaaatagtacaattgaagatatcaaatagtctgtctctctctttagtaagcctcttctgaaataagaaaaaccactctgctctaataatcttctagttactaatcttctagttacttctagttactaatctagttactaatcatcatgtgctacatctgtgttgcagacgagaaggcacagagtatctggaataaataaaagagcttctttaggatttgggctgaaaatgaagttcatttaaatgccagagattttcttcttgtatttcaacaggcttcttatttttttccctttctgttgtagggtagatgatatgcctccaggaatatctctgcttcctgataatattctgcaggttctgaggatccagcttctacagtgtgttcagaaaatggcagatgggttagaggaacaacagcaagccttgtcaattttgcttgtcaagttcttcattattctttgcaggtatctagtagaaaaaataagctagttttcactcataggtgggagttgaacaatgagaacacatggagatgaggaggggaacatcacacactgggcctattggtgggtagggtgctaggagagggataacattaggagaaatacctaatgtagatgatgggttgaaggatgcagcaaaccactatggcatgtgtatacctatgtaacaaacctgcacattctgcatacatatcccagaactttaataaattaagtaaataaaaaagaaaaaaagaaaaaataagctaattatctgttttaatataattgttacattaccaaaataataattaattttgtttattattagtgatgtttgtagttgatatggagctttaaagagtaagtgcact

SEQ ID NO: 98196 - DNA, 1038 bp, Homo sapiens
ctctcgagtagctgggattacaggtgcccgccatcatacccagctaatttttgtatttttagtaaatatggggtttcgccacgttgaccaggctggtctcgaactcctggccgcaagtgagccacccgcctcagcctcccaaagtgctaggattacaggcatgagcctccacccccagccctttttttctttatggtgaaaaaagtgtctatttggaattaacctgctggactcagtttagatgatcccagttttgtaggcaatattgaaagcatcatagtcaggaggcagtctaacatatgccttctctccagcaggcctgattggggtgtagacctggccacatcattgtcaatagagcttcttcatggcctgtctgatctgttgttgggcttgatatctacagtgaacacaagtgttttgctgtcatctttttcattggctgacttagtggcttaaagggattttgatgctggcatagtagtcaagtttgtatcttctctgagtgttcctctgaggatgtttgggctgcgtttggaaccatagtgtcttgggccaccagaaggtggtgatgtgcagattgtgtgtgtgtggggtggggtggatgccttttagccctgcctgcttggccttcatagccttggctttggctttggctttgggaggggcagggaccaccttccttttaatgccatcttcatgaaaaggatctccagataatctttttttcattactttctaatatatttcctttatggcaagagaaaatactctttatgacttcaataaacttaaactcattgagttgtattttcttatttaaatttattgagttccacttttcatcatgaataacattccttgccttgattatatttcttgcctactttgtcagatactaatatagccacccagcaatcttatgatgagagtttgcatggtatatgtttttatgtcctttttatgtattatctttctgtgtgtccactgtggctgagtggaactctgtcatcttctagctctgtgtaaaatcagaga

SEQ ID NO: 98197 - DNA, 1022 bp, Homo sapiens
gaaaacacagagacttgttcttgttagtgcctaggggtagtcaaaccccaggagacctccataatgaaacctaacactaaaatcaagtagctactggaagtccaatttattattttatgtaccaaaaatccttgtgatccaggcatagctatagtgggatttatatcaaagttggaaagttgtttgttgaatatggcattagtacaagggtgtttagaggaattgaatatataaaagctaaagaatggtcatgtcataaaggtcagaaaaatcaaagtctaattactggtttcctttcccaaagcatcatatctgggcttcccattggcatatttgaaacctgtcctgttttgtgttatgttaaaaacaaagattttgtagccagactgacctaggtttgagtgttcatctctaactagttatgtgactttggatatactatttacatatgttttagtttattaatttatgatacggaaatagtaacatttatgggatatttgtaaggactaaatgacataatatatgtacagcacttaacaaagtacttgtacttttaaaaactaagtaaataaaagttttatcagttagatctatgatttgctttatgtagcagttaataaaattaaaacagcttaagttacttttctaattaaaaacaaagtaataaataattcagagttaatctggtgcctctgggatcttcagggattcagttttcttttgaatgtcaatctgtcatgcttactattctatttcatgctgcaagatagcttctagagttctggccattatgttcacatttggggctctaagatagagggggtaaggaagaaggatacaaatggcatgtgtcaagtatcttttaaagacatactgaggccgggcatggtggcttacgcctataagcccagaactttgggagactgaggtggcaggatctctgagccccagagttcaaaacgagcctgggcaacacagggagaccctgtctctacaaaaaagtttttttaaattagtca

SEQ ID NO: 98198 - DNA, 1005 bp, Homo sapiens
aagctgcagaaccaaaattcaaactcaggtctctgattccaaggcctgtagtgtatatatcaatttattgttatgttaagccttacatatactcttccataacatataataccatacctctatgcagtttattttatattgcatatttcagcatgtaactcgaccttttgttttctcatttctgaaataatagaacttcctaagaaccttgttccttagcatgctcttaataaattcctttataaatctgtctctccctttgagtatcatttgaatttttttcaaattgtgggcaagttgaaggccttttgggatgctgacttttatatactgaaactaaaatacttgatttctttattttactcagaagagggtaatgcccatgtatgctagagataatctcaattttcctttacagaatacaaatgaatataaatgaagctcaattcttgatgactttggagaatacttttaaactaatgttttaacaaaatgtgtggtcagataaattttggaaatgctgcaccgtgacctcccttgtcaaagtatccattagcatatttgagactctgaggaagtacttctagaaagaaccatttttaaagttagtttgatagcacttcacaaacttccttaactatagaaccatactgggtgttacgtactacggtatctttggtttgtgtcagtaacagctttccttcttttttgtgtgtattagtccattttcatgctgctcataaagacataccggagactggacaatttacaaaagtttaatgaactcacggtttcttgtggctgaggaggcctcacaatcatggtggaaggtgaatgacacgtctcacatggcgtcagacaagagaagagagattgtgcagggaaacttccctttataaaaccatcagatctaatgagacttattcacttaccatgagaactcccaccgagtttctcccacaacacatgggaatttggggagctacaattcaagatgagatttgg

SEQ ID NO: 98199 - DNA, 1014 bp, Homo sapiens
aatttaatgttctttctccattattcttgtctctgtttttaacagctatttttaaatgctaacaataaggtggcagacaagaacgagaaagaccttgccaacaaattactgacagaaatgaatgaggaccaggtatctacaaagcctgcatcttgtttcagctgaagtccaaaatcagccaatgggaataactattcctgtgcttttcttcttatgtcctaaaatacacaaacattgtcaaattctaatatttattaattatttttgaaaattactaaaaagttaaaaattgctttcatctaaaggataaatatcttggtggttgatacaaacaatcagtaccattccattccctctacgtgtgtatggtcttttcaatttgaggagatataaagtacaggaatgggatctcagtacaatgctgtccacctggtggtgacttttctaagcactgtggtatattgggaccttagggctttctttgtgaatatgtatggtcattgttaatatcttgattctttgcttcttattgacaagtgatgattataattcaatggacaacctgaatcttggaggaagggaagaagatgctgaactctctgttaatttagcataaaacttgactttttgtattctagaaattcaagtctatacaggtataataaagcaaaaatatgtaatttatgttgcttctctcaatacattaggtaatttagtttgaaaaaaaactacctttaaaaattgacgttatttttctcttccaaaatatttccaataaacttacatattgtcttttattaacattgtgttaatgtccaagtttataaatagaatttttgtataacaagacacattatcatctaattattttttattctagatgtgaaatgccaatttacagaatattgttttagatttctgtataaatgttaatccctcttaaggcctacttaatgtagattaataaaacaattattatagtctcttagaggttcacattacaattccaaattg

SEQ ID NO: 98200 - DNA, 1058 bp, Homo sapiens
ttttagctgtctttttatacatgcaaatggaatttaaacctggatggttcaagtgtagttttgaaggggaattaaaacataataggatttctggctgggcatggtggctcacacctgtaatcccagcactttgggaggccgaggtgggtggatccacttgaggtcaggagttcaagaccagcctgaccaacatggagaaaccctgtctctactaaaaatacaaaaattagctgggcatggtgacgcatgcctgtaatctcagctactcaggaggctgaggcaggagaatcacttgaacctgggaggcggaggttgcagtgagccgagattgcaccattgcactccagcctgggcaacaagaacgaaactccatctcaaaaaaaaaaaaaaaaagtaataggatttccaatgaatgatagacctccctcccttcctcttgagattgtccattatttttaaaaagcatgtgttaagcttgtttttttctcaaaacattttaatgtaataagtgaatgttgccttatcctccttgacatgtggtttatttttcttttaaataggtaactttccttgcaggttatagtgtttcagaaatccatttcatcagaagaggaatgtaatgcatgttaagtaattattttttcaggttttcagaccaaaggtttcctaactcaataaaaatcgtgagcacatttgttaatttcttgtttccccttccccctcaataggtgtttcagggacaattggattgtttggccatatcaaccattcaggctttgaccgcagtaatgaacaaatctccagctgctaaggtgaaacatatatcctccagcttttttttttttcttaacttttattttaggttcaggggtacatgtgcaggtttgttatataggtaaattggatatcatggggatttggtgtacagattattttgccacccaggtaataagcatagtacccaataggtagtttttcaatcttcccgctcctccttcctttcatcctcaagtaggccctggtgtctattgttcctttctttgtgtccatatgaactc

SEQ ID NO: 98201 - DNA, 1055 bp, Homo sapiens
catgatttaagaaggcaaatagtgaattcgtgtctttttctttatttaatattaagttaattagcataaatgagtattatttaatatttttaatattccaacatattcagtctttgaaaatgtactttgatatattgtcttcccatcccctaggaagtatttaaagaaagaattggttatacacatatgcttgaagtattaaaatccctgggtcagccaccactggaattacttaaagaacttatgaatatggtgagtttataacctttattaagagaatttctgttaatatccattttgaaaatgataactaaccttttatcttttatgttgcttttcaggctgtagagggtgaccacacttcagttgggattttgggcattagtaatgtccaacctctcttgcttcttatccagtggcttccagaactacaatcccatgacctgcaaatcttcatctctgattggctgaaaagaatttgttgtattaatagacagagtcgaactacttgtgtcaatgcaaacatggggattagaatcattgaaacccttgacttgcattcttccctccatcaaacttgtgctgagaacttgattgcaatccatggttccttggggagtcagtcagtgagctcagaagaaatccgtcgactactgagattgctgagagtggatgaatctgagtctgttcacccttatgtcactcccgtgactcgagcaatcctgacaatggcccgaaaactaagtctagagagtgccctccagtatttcaatttgtcacatagtatggcaggaatttctgtgcctcccatacagaaatggccagggtctgccttttctttcagtgcttggttttgcttagaccaggatcagttgactcttggcattgctaacaaaggagggaaaaggaaacaattgtacaggtattggtaaaaattatggaatataaatgaatactgtcataacaatatatgctgtgattcttaaacaggaaaactgtttccaagcatctagcttttagatatacagcttatctaaagtctcttcatccttagg

SEQ ID NO: 98202 - DNA, 1058 bp, Homo sapiens
ggctggagtgcagtggcacgatctcagccgactgcaacctccacctcccaggttcaagcgattctcctgcctcagccacctaagtagctgggactacaggcgcccgccaccacgcctggctaatttttgtatttttagtagagacggggtttcaccacgttggccaggctggtctcgaactcctgacctcaggtgatctgcccacctcggcctgctaaagtgctaggattacaggcatgagccaccgcgcctggcctatatcttgtgattttaaagacctttatttatgcttactgaatcttatttggaagaattttaaagatttgaaaattagtagttttacttttttacttttactagtggaattccactttacaaggctgccttttatttactaaactcttatgaccaaaatggattttaaaggggtctttgaaacaaggttggacttctgtgtggcaatagaatttaagccacagaattgtgggtaaagatgttcatgatggctttatggttttatgtactttaatgatgatgaaactgaacaaccaactttaaaagttctgataatacgtattttttttagtttttttacaggaagtggcatgggttttgaagcctttattacccattcaggtatgttggtcgtggcagtgtgcacaaaaagagaatatgcaacggttatgcttcctgaccacagtttctgtgattccctctgggtaaggctttagggcatcacatttaacttctagtatggttaatggtatttcccaccattgtcataaattcaacagcagtcatttttttgctaaaaaatttaaatgaggctgggcgcagtggcacacctgtacgtaatcccagcactttaggagcccaaagcaggcagataacttgagctcaagagtttgggaccatcctgggcaacatggtgaaacctgctatctactgaaaaatacaaaaattacctgggtatggtgatttgtgcctgtggtcccagccacttgggaggctgagttgggagaattgcttgagcccaggaagtcaaggctccagtaagc

SEQ ID NO: 98203 - DNA, 1119 bp, Homo sapiens
gaccttgtgatccgcccacctcagcctcccaaagtgctgggattacaggcgtgagccaccgcgcccagcctctcctgtgtctcttattataaggggttctctcagactacggccccatcccgatgacttcatttaatcccagttaccactttaaaggccctattccaatacagtcacattggggattatggctttaaataggaagtttagggggacatagtcagtccataacactgccagtacttttgacagattttaatgaattgatgaaacaaaatataaccgtatctctagaagaaattatgtaactgcttccaaaatcatgagccttattccaaaacttgtcattttttcaactgatatattaatatatctgaagaattcatgaaggcagtagaattagggaaccttggataagtttgcaaactgtttttcattttgttttggctttttgtttttcttttggctatgattttaaacatatgtactaatagttattggatcctaactactttcaaaattatatgtatattctaacaggatgttcaggagttaagcttttaagagttatgtaactgcagaatagcttcttatttgtctaaatatcttttttagattgcatgggaattttgagatgaatgggattgcccacatttcagactttatattagaaccttatcttttcttttctttgtttttttttgtttgtttgtttttttgagacagagccttgctctgttgcccaggctggagtgcagtggctgatattggctcactataacctctgtctcctgggttcaagtgtttcttgtgcttcagcctcccaagtagctaggattacaggtgtgtgccaccacacccagctaattattttatttttagtagagacaaggtttcgccatgttcgctaggctggtcttgaactcctggcctcaagtgatcctcccaccttggcctcccaaagtgcttggattacaggcgtgagccactgtgctaggcctaaatgatcatttttaatggttgcatatttccttggattcaagacgtgttatttacttaggttgtttataatttctttctttttttttttttttggacagagttttgctcttgttgccc

SEQ ID NO: 98204 - DNA, 1073 bp, Homo sapiens
ctcagaagattttccttaaaaagaaaagcaagccaaagttactatgaatctcagaattacatggaaatatttttttaacactatgaattcttttatgtagaaaatatagaaatgtaaaaattaggctgggcgcggtggctcacgcctgtaatcccagcacttcgggaggctgaggtgggcagatcgtgaggtcaggagtttgagaccagcctggccaacatggtgaaaccccatctctactaaaaatacaaaaattagctgggcgtggtggcgtgtgcctgtaatcccagctactcaggaggctgaggcaggagaatcgcttgaacccagaaggcagaggttgcagtgagccaagattgtaccactgcactccagcctgggcaacagagcgagactccatctcagaaaaaaggaaatgtaaaaattaaaatttcaattcttatactttgttttgtctttcaggaatggttgtaaatataatgaactatctctagatgatattcgaacaataaggacttctttgtatggactaattaaatattttctgtgcaaaggtggatctcatgaagagatacaaagtattatggggtacatagctgctactaatgaagaagaacaggtattatgcctaagatacatctacttttcctttttaacatttgagttgctacatcatcttctgaacgtatgtttgtgtctagttaaatattttgagagtaaaatatgtgtagtgtcacattcaatattatgcacttaagaagtaaattttatcttttttttttttgagatggagtctcgctctgtcacccaggctggagtgcagtggcacgatctcgactcactgcaacctccatctcccagaaggagaagtggttctcctgcctcagccccctgagtagctgacattacaggtgtgcacccccacactgagctaattttttgcctttttttttttttttttttttttccggtaaagacagggtttcaccatgttggtcaggctggtcttgaactcctaacctcaaatggtctacccgcctagggctcccaaagtgctaggattacaggcgtga

SEQ ID NO: 98205 - DNA, 2029 bp, Homo sapiens
taagtagatttatgttgactaggctattttgccctctatatataatatttattatttactcagtggttacatgacttcattatcggtattagatgagttaatgcaggctgtttccctataaggttgccgctcaaaagcttctcattattcccatcttatttcatgatagctgtatctatgattcattgccaacaatattttttttggttatttcagttaaagagttatttgttgaggacttactgtttacacacaataatattagacattacatgtaatataatgatgaattattattcttttaagctaatggggcaggggtcaataagagaagtttacaaataactataaacaaagaagagtatgacaatatctgtaagagagatacaaagttctatgaggttttcccaagagggttttacatgttgcaaagaccaggaaagactttatggaggagatgtcttttcatatggataaaagaggatagatatggttccaacaggtaaatttgaatagtgaaaggatatactaaaggaaattgaataagacaaaagcatatctggttcaaaagatatcagaggccaggtgcagtgagctgggtggatcgcttgagccgaggagtttgagactagcctgggcggcatgacgaaaccccattcctaccagaaatacagaaaatcagccaggcatggtggtgcacacctgcagtaccagctacctgggaggctgaggtgggagaatcactgagcctgggaagtcgaggctgcagtgagctgtgatcacgccactgcactccagcctgggtgacagagggagattctgtctcaaaagaatttttttaaaaagacatcatatcagatatagtgaagttaagataaaacattatataggatttaattaaataacttttgtggcttatgaccttatttgtgcttgtatatatgaatgtggtggtttgttttgtgttgtttaattttaaaagctctttggaattttggacgtgctcttcagtctcctacgtaccagcccaaccagaggtcagcttttcttactgctttttgaaccaggaaatgctgacatactgtacgcattgctcttaaatcagaagtactctgacagactaagagaaatcatttttaaggtacaaacatttcttaaacatctttgtattttgaggcgtttgtgggtatatgaattttcttgcaatatatccattctgtgactataaattatttttatatctatttctctaagatgttcaacttatttttatatatagttttcatgtttcagttgtttgcatattaaaaaactaattatattgtaatctgaaaatcctctcagtggaatattcactttgtcataccatcctcaatataaaacctcccatcttcttgacttggtgggtctatgtggcaattcagaacatttcaacagctaataataatagcaaactttatgtagcaaccactatatgtcaggaactaagtacttttcatatattggcttacttagtcttgcaataacttcatgaagtgggtattattactattatcattttacagatgaagaaactgagtccagagagatcagtaacttataaaataaatagaagagttgcttcacaaatgtttacttatccttgaaaattattttaattttaataactgttacttaagtggattattagattgatccagaggtgtactgacacacatttgttcttgcaaactacatggtttgtttccacctaagcctttctcattaagaaacaaaattttaaattatttctctttaatttgccatgtaattaaactagagttttaagcataccaattatacaactacagatgaatttcagtccagtttattcttttttaaaatttgtttatttttttgagacggagtctcgctctgtcgcctaggctggagtgcagtggtgtgatcttggctgactgcaacctctggctcccatgtacatgtgattctcctgcttcagcctcctgagtagctgggactacaggcacgc

SEQ ID NO: 98206 - DNA, 1152 bp, Homo sapiens
ggacactacagaaaatatgtgcaaaagattgttttttcttaaggagcttaaatttttaaaggcaaatgaaaactaatttcagatattctttgttgtttcttttgtttgttttgttctggttttttggtttttctttttagaaacagagtcttgctgtattgaccaggttggtgtgcagtggctagtgacaggtgtgatcatagctcactgtagcctcatactggatgcaagggatcctcctacctcagccttccaagtagctggaactacaggcatgtttcaccatgccctgcttctaatttttttaaataatttttttcagtacttaatgacagacagtagaatttatgccagatgctgggagtttggggatataagattctttgtcttgattagtttacaatcttgttgataagacatgtatataaaaagataaataataatataagagccatgcagtatggacagtacgttcaagcaatcaaaaggaacaattatttagggttgactcaggaggatgtcaaacattctaaacctattttttctttaaaatttgaacatacctataattcatattttaaaatgaaataattatttcagcattttatacaagtattatccacagttctttctttggttatctctggtatttaattttaactttttgtttttcctaccatagatcctgttattaatttcaaagatctactatctgtggtatatatatctcacagagcacatataaatgttagagtggccatctgcagaaaggtcagtaaactcttaagatatattttaatgatagcagcatcaccatcatgctataaataactttgcattattttgcagcagatacaagttttcatttattttataaatgacgtaattttataagtaaacaattttctttttgaagtaaattaacttcatgttatcataagaaattagcatgtgaatgttttcttagttcttcgtggtctcctgcaaatatgttctttccagagtcaaaaatgtattaccagagaataattttcttattaagaaccttcaatgattgtgaccatttctaattaatataccatattatagagtttctgaatcttttgaaactttctggaaataattttctataatttgtttaggagtattcca

SEQ ID NO: 98207 - DNA, 1131 bp, Homo sapiens
cctgaacaaatgtagggggctcatggaaagtatttagttgagaggatattactctattatttaacatataccatcatcctattcattttaatttttcttttttatcttccagcagatattttagtgtactcttactctgtacaatgagtaatatggagattagttggaaacacagtgccagtcttccaaatagtttataatctaattaagaatataatcttttgaaagtatattcttctatagtttctcattaaattaccttatcattaaaataactgaaaatattatttttgatataaagtactatgtactttttgaagaattttgtattctaaatctttttacaggttttgcaaattttgcagttccagccagatgcagcacatcaaatatcacagcaagtgggttggcaagacaccttagttaggctttttttaaaagcaaaatttgaaaacggaaatactcttcataagcacagtagagctgttttaatgaaagacaatgataaaaatatgtcaactgaagataccaagaagaactctgatgaaaaaacagatgaggaaaaaatcacctcttttgcctcagctaatgtgtcttcggatcagtggagtttggaggatagacactctttagactcaaacacaccattatttccagaagatagctctgtgggagaattgtctttcaaatcagagaatcaagaggaattctggcatagtaacccttcacatttgagtttagacctcagtggaattgactcatgtgaaatgagtgatagtggaagtcaagtgccagacagtctgcctagcacaccatccccagtagagtctactaaatcgttttctgtgcactctgacagagaaagcagcatcacaaatgatatgggctttagtgatgacttctctttacttgaaagccaagaggtaaaattgcttatttttccaaatgttgtttttattttcatgtctgatatatacttctaatccttagaaatatgtgagcagttgttaacaatttcatattgtattcatgttctaagtttcatgatctaaggtttagaaacctggaagtcactagattgtgagttttttgagagcaaagctaatgtcttactcatcttatgtctctagg

SEQ ID NO: 98208 - DNA, 1033 bp, Homo sapiens
tcaagtaaaacaggaaacttttgacttttaatactatgtatattaaagataaatactccaaacatttcaacgtttctccattgttgttaaattccatttataggcctggcatggtggctcatgcctgtaatcccagcactctgggaggctaaggcaggtggatcacctgaggtcaggagttcaagaccagcctatccaacatggcaaaaccccatctctaccaaaaatacaaaaattagccgggcatggtggtgcatgcctgtaatcccagcttctcgggagactgaggcaggagaatcgcctgaacccaggaggcagaggttgcagtgagccgagatcacaccattgcactccggcctgggcgacaagagcgatctctgcactccgtctcaaaaaaaaaaaaaaattcaatttccatttacagtatcttagggatacctgctagagatagtatatctttagagatacagtgctgcctctcaagctattttgttttgtttttaatgtcctactgtttttctaagctcacaatggttttaagaggactttgttttccatttagtttgctacaaaagatgttagaatgggcaatctcagaaaacagagaagcaaaaactaatccagtaactgctgaaaacgccttccgactagtgctgatcatacaggactttcttcagtcagagggactagttaattcaaacatgtggaccgagaaggtgcagtaatatctctttaaaattatattttgggtagttaagaactttattcaaagaaaaattttgcaccccctctttttagagcgttaatgcttaatcagattcaataaacaaggataagatgtgatgaatagtcacagatttttgttagctattactaggatgattcttttggcttttgtcaactgaacattggactagcttttgaaatatttgtggtttgtattaatgttggggaaaattgatcatcagtaaattgaaaaactgaatgtttttatttctcaatttttttcctttgtgatagcttttagaggata

SEQ ID NO: 98209 - DNA, 2064 bp, Homo sapiens
tagccaaggaaaaaggaaacccctagtgatctaatttacctttcctcactggggattaaggccaaagcttagtagtagtatacagtatttctttgtctgggcttgtgccctgactatgtatattactcgggaattttaagggtagttcggtttctgatcaaggacttggactcctgtatacctgttctttatgtatcaaaatattttgatttcaaataacagaaacatcaagccaaattgacttagttaagaagatttttttgctcatatagtttagaatttcatagttaaggtgagtttaagcaggattcagtcagggctccagttccatttatttgctgtcctcacagcaccactctccatcatctgtcagcttgtgttaagctggcttcccttatggacacagaacagctgccaatagcaattagggctgtatgctacttctttcatatccagagaaagagagtgctttttcctacagccattgttggtagacagttctccatgggtctcttgtgtttctatatatcttgaatagtgactctggctgcctttgttatgaactagatttttgaggttgttcatatgagcaactttggaagatagaggttatgtcttcctccagagaaaagggaagatttgtttactatccaatataataaagataatgtctccctccatagcaaaatcagacaagtttgctgcccggtataaaagatttgggttccctttgctggacacggtggctcacacctgtaatcccaggacgttgggaggccaaggcaggtggatcacgaggtcaggagttcaagaccagcctggccaacatagtgaaaccctgtctctactaaaaatacaaaaaattagccggacatggtggcaggcgcctgtaatcccagctacttgggaggctgaggcaggagaatcgcttgaacccaggaggtggaggttgccgtgagccgagatcaagccattgcaccccaacccgggcaacagtgtgagactccatctcaaaaaaaaaaaaaaaaaaaaaagatttgggttctctttatactggtggtttctctcctaaaatgtgtctacatgtgcagacatcatctagtcctcttcatctctcactgtgggaattgcactttgagaaaacaatgcaaatgctgatactctggctactgctattgctgtagatcttggtctctgactcaggagtcttgtgtcttctgccaatacctgtgaaactgtagcagctaaccctttagcttggaggcaaagtaacatctgagacctttcacagttcttgacagttatgtaaaaattctgaatccacagagccaggcagaacttgtgctttcactaaatgtttgctttagtctgctctttctcatctaaactgttttcctccaggtttgtgcaatggcatcagctaagctaaatacccttcttcagaccaaagtgattgaaaatcaggatgaagcatgttacattttagggaagctggaacatgttctaagtcaatcaatcaaggaacagactgaaatctactcatttctgattccccttgttcgtaccctggtttccaaaatttatgagcttctcttcatgaacttgcacctaccttctttaccttttaccaatggtagctcctcattttttgaagattttcaagaatattgtaattcaaatgaatggcaagtttacattgaaaaatatgtaagttttatcttttttgatcaagatttttctgctaatttaccatttttatagaggtgaagtcatatattaaattttatgtatcttttttatttttttggtaagattgtaccttatatgaagcagtatgaagctcatacattttacgatggtcatgagaacatggcactttattggaaggattgttatgaagctttaatggtaaatatgcataaacgagaccgggaaggaggggaaagcaagctcaaatttcaggtaaaaagtaaatgttttaatatctagtttttcttgttgattttaggcatttaatattgattaagagtaatacaggccccaaactttaaaacaagcagtatt

SEQ ID NO: 98210 - DNA, 1444 bp, Homo sapiens
tgaatattgatgtgagttagataagccagtcttcggtttgtttctttgaaacctataagcattaatttcacagattaaaattatgtctttgtagtatacaatttctactttctttcctcttgagtctcattttagatgccttataaatcaaaagatcccagaggaaaattattttacttgacagtaagtaggaggttaattatcttgagtttaaaagttctgtgttgaggcactttccatttttgaagttcttcacgtgtttattgttggttggttttttttttaagttttaaaaaatataaatagattataggtaaaattatatcacacttcatcaaagaaaatgattctaatggaataagaaaagcctattggttacttagcttctttctcataatgcaagattttattggtcaaaaattttaaattatggaattaaaatgtaaatatacctgtaaatatatgagtcaatgaccttactttttattgtttctttcaggagctgtttgtggagccatttaatcgaaaagcacgccaagagaacctgaggtataataatatgcttaaacaacttagcagtcaacagttagccactcttagacgctggaaagcaatacagctctatcttacatgtgaaaggggaccttgggctaaaaggtaagaggatataattttattaagtactcctttttctttagtactctggtctagaaatttttgagcaaatgccccctttcactccaatttcttaaatgttcaattcataaaagggtgcttttaatcttatttattgtctttccatgaattataggtctgggatgattcgaggttgtattgttttttatcatacagttatttgccttcctttgaccctttgatatgaagtttattggactttagactcttagagagtgttaaaccaatttacttctgtctttctgataccacctctttgagctagggctaatgctgttgtatgtttgaatattttacaattcacttaactgatcctcagttacttctgttttgcttaattatattatcttttttttatacagccctttttaaaatgtggtaaaatgtacataaaatttatccttttaaccattttaaaatgtacagttcactggcactgagtatattcataatgttgtacaatcatcaccactgtccaacttcataacatttttatcacctaaaaaggaaatgctgtacctattaaaaagtcactccttattatcctctgtcccactccctagcaaccaccaatcagctttctgactgtatttattgcctgttctggttatttcatataaatggaatcatacaatatgtggctatttgtgtctgccatctttcacttagcataatgttttcattatgtagtagcatgtatcagtactttattcctttttatggctgaatagtattcccttataaggat

SEQ ID NO: 98211 - DNA, 1010 bp, Homo sapiens
tacttcttgagggtaattcagatattctttcctggacattaatttgacagataagtgatttatatttgaggccaggcacagtggctcatgcatattatcccagcagtttgggagaccgaggtgggtggatcccttgagctcaggagatcaaaaccagcctgggcaacatggcaaaaccccacctctataaaaaatataaaaattagctgggcatggtggcatgcacctgtattcccagctacttgggaggctgaggtgggaggattgcttgagcccaggaggcagaggttgcagtgattgagccgacattgtgccactgcactccagcctgggtgacagcaagaccttgtctcaaaaaaaagaaaaaaaagagattatatttaaatgtggcattcttttctatttaagaaaaataaatggttgaatttttctgtttattggcttcttgtttttacagtgatgagaaagaagaacaggatcaaaaagaaaaattggtattgatggaagactgtgaactcattacaataattgatgtaattcctggcagattagaaatcactactcaacacatttacttctatgatggcagcattgaaaaagaagatggtgaggagttctggaaaaaataatttttgctgttcaataattaagtatctaatttatcaatcatgaatgagaagaagaaagcagtaagatataactatcatgtgaagggagaaatggaaagtcagtaaggggtcaaatttgttattcaccaaggtgtggaagggaatgctttttaaaaattatcaatgcatttttaagggtttggctagagggaattgctgtaaacttaagttacaaaatacagtgtttattattattatttttttgagatggagttccactcttgttgcccaggctggagtgcaatggtgcgatctcggctcactgagacctctgcctcccgggttcaagcgattctcctgcctcagcctcccgagtagctgggcttacaggcatgtgccacc

SEQ ID NO: 98212 - DNA, 1050 bp, Homo sapiens
acttgggaggctgaggtgggaggatagattgaacccaggaggtcgaggctatagtgaaccatgattgcaccactgtactccagactgggtgacacagcaaagctctatctcaaaaaaaaaaaaaaaaaggaaaagaaaagaaatgaaatgaaaactatacctgataagggacttttatatatttgtacctagaatatataaaaaacccttacactcaaggtaaggtggcacacacctataacttcagctactcaggaggctgaggcacaaggattgcttgagcccaggagttcaagttcagcctgggcaacatagtgagacgcccatctctattaaaaaaaaaaaaaaagaggaagggggaagagttcttatatcttaataataaaaagacaacccaattaaaacatagacaacagatctaaataaacatttcttcaaaggagatatgcaaatgttcagtaaacacatgaaaagatgctcaacagcatgagtcatcagggaaattcaaatcaaaaccacagtgagatgccacttcacacccactatgatagctataataaaaaagacaaataataactagtgctgaagagcatgtggagaaattggaagccttataaatactgccagtgggaatgtaaaatggtatagcttttgtggaaaatagtctggcagttcctcaaaaagttaaatatagaggggctgggtgtggtggctcacacctataatcccagcacattgggaggctgaggtaggcaaatcacttgaggtcaggcgttcgagaccagtctggcaaacatggtaaaaccctgtctctactaaaaatacaaaaattatctgggcgtggtcgtgggtgcctgtaatcctagctactctggaggctgaggcaggagaattgcctgaacccgggaggcggacattgcagtgagccaagatcatgtcactgcactccagcctgggcgacagagcaatactccatctcaaaaaaaaaaaataaaaaagttaaatatagaattgctgtataacctagaaattccacttctagatacatac

SEQ ID NO: 98213 - DNA, 1050 bp, Homo sapiens
caagtagctgggattacaggtgtgtgccaccacgcctggctaatttttgtatttttagtagcaacgaggtttcaccatgttggccaggctggtcttgaactcctgacctgaggtaatccacccacctcagcctcccaaagtgctggaattataggcgtgagccactgtacccagccctaaaaagactcttaagattatatttaatttatttgaaatttttctccagtgtgatttggttttcaactaattcaactaaggtgctactggtgattaaaattagagtatttagttcctgacaacacaatatgaaagatagagattatcataataaggagagtaaattgtacatgtaggcattaaagaggagattcagaaaacagtacctctaatcattaggaaccctgaagggagtttaaaagttttgtttcatgtcttgttgttgatttcattcaatatttacttctcttttaatttctacatgcaggtttgactgtgcagatcgacagttccattctattcctgctacctggcaagctcttatggataatccatatgatgttaaagaacttattcctgaattcttctatttcccagagtttttggaaaatcaaaatcgtaagaaatagaggattaaaaatttgactagcaggtcccaatggaggagcctcaaaaatgtctttcaggacatttttgtaatatcctgtagattatttaagattcattctgtctgtggattacttagtgacagggctgaactaatgctatgagtcttaccttccagggaagtgctatagggaactaagccaaaggagtcaaatttgaatcagtaagagaatttatcagactacagtgtttactagggaagcaaaaatgaccatatgctatttcagctatatataccacttaggttaaaagtgtttgagttagataaggtgaggatttagactaaccatcagctgactacaggtctgttaaccaactccatgggcaaactcatgtctttatatatacagtttcactgaatacagccagtcaatttttttttttttt

SEQ ID NO: 98214 - DNA, 1401 bp, Homo sapiens
agtagatttaagtcaacttaagaagtagatttaagtacataacaaaatattgcagtcaagatccatgtatatagccagttactctcagtcacagaaagatttctgtttgctcagaaagtcttatattatttccaagaggaaaaactgagtacctattagggtatgccattaaaactgtcctcatgctgggactcattccacatgtaaaacttctaatagctaacatctgcccaaaaaggcacttgctttccagagcccaaacccagtcttaagaatcaaattgctctcggctttcggctcggaggaggccaaggtgcaactttcttcggtcgtcccgaatccgggttcatccaacaccagccgcctccaccatgccgccgaagttcgaccccaacgagatcaaagtcgtatacctgaggtgcaccggaggtgaagtcggtgccacttctgccctggcccccaagatcggccccctgggtctgtctccaaaaaaggttggtgatgacattgccaaggcaacgggtgactggaagggcctgaggattacagtgaaactgaccattcagaacagacaggcccagattgaggtggtgccttctgcctctgccctgatcatcaaagccctcaaggaaccaccaagagacagaaagaaacagaaaaacattaaacacagtgggaatatcacttttgatgagatcgtcaacattgttcgacagatgcggcaccgatccttagccagagaactctctggaaccattaaagagatcctggggactgcccagtctgtgggctgtaatgttgatggccgccatcctcatgacatcatcgatgacatcaacagtggtgctgtggaatgcccagccagttaagcacaaaggaaaatatttcaataaaggatcatttgacaactgaaaaaaaaaaaaaaaagaatcaaattatagaatatttaaaatgtagaatcaaattattaaatattactacatatatttctttccctatactggtatctgaaattaaatcattatcttcctgatgacacacaggtttagattaatggaaattaatctaatggtagttttcaaagatgtcttgatctttttcagtatatgaatttagtgatgtagaatgtacaaaaaaatatatcatttattaactagatatgttcttaagcaatcactgtgtttgttaggtactttacctaatcttcatagtaaaaattcagctatcctcattttttaggagttaaagccaagcctcacagaaggtaatacctagcctataatgcctttgagaaattaaatactttttctatgtttacacaacaagaaagtgactaggattatatgcctgaccatctaactccaaagcctttctagcatgccatgtttcctctgaatgagt

SEQ ID NO: 98215 - DNA, 1086 bp, Homo sapiens
cagaatgcttaacatttatacaataccattagctaatccacagtccatgttctaattttgtatttccaataatgttctttacagctgtttttcccagtttatcttatttgtaatttttctctttttcttgatgtaatgtattatgttgagaactttcctaggtttgcaccatccttgaatttttataataaacccacatagtttatggtatattgttattacactttactgatgtatcttattagctagtactttaatgatttctctactcttaagtaagatagatctttttgttctgtctttatcatgtttagtatggggatatgcaatctttaccaaataaatttaggaagggctcctctttctcttgacttggaattgcttccataatataggaattacctgagttttaaaagttaaatatagtgcactacgcactcagactgatactcacagggaaagacaaatttgtcacaggtagcagagtgtcaaggggaattaatgcacaccacatggaacaggtggaaggtgtgggcagagttgtctaggataatcacaaatacaaatagcaactattcaaataaaacaaataacatacaactatgtgtatgctaaagacaaagcacgctaaagacatgaagaaagagtcttctggaagatgactcagagagcaattttttgcaatacaattgtgttattaggaaaacataagaatggcagttcaataaaatggaagatcaaacatgaaatgataaaatagcattataagaagaaaacgaaggttgcagaagaatcaagttgagattaaaaccagtaccattacatactccataaatatatatacctactgtgtaccacaaatgttttttcaaagggctgcagccaagacatatttaaaaataccattacaaacacaaataaacctgaagcagaaactacaagaaagaaagcatgtctctccctctccctctccctctctccctctgtccctttccctctccctctctccctctcccctctttccaccgtcttcctctgatgccgagccaaagctggactgtactgctgccatctcagctcactgca

SEQ ID NO: 98216 - DNA, 1136 bp, Homo sapiens
taaggtgggaggattacgtgagtccaggaggtcgaggctacagtgagccatgttcatgccaccgcactccagcctgggcaacagaatgagagaccctgtctcaaaaaaataaggttattcagaaatataacacaaaaagtttatttgaagttaaggaataataaatctgtagattaaaaggggaaataacatacttggaaaaattaacccaagactgtcaacattgcaaaaatttatgttaaggttttgagcttagttaagtttttgagatggagaataattcagaaatccaagtagaaatgtaagaatgagtactattatgaatagactcagtggttgtaactagttgcaatgttagtttgtgattagaaggtttaaatgcaatataaaccttgtgaaaaacaggaaacaagaaaccacctttacctttgcttttctcttgtattattagggaggtgttcctgtgggcttagcatctaaaccttttcagattctttatggacacaccaacgaggtactgagtgtcggcatcagcactgagctagacatggcagtgtcaggatcaagggtaagatttcacctttaagaaatactatttattttgtctacaaatttattaccaacacttataactaaaaagtttttcagaggaattgataagagtatagaaatgttataccatacttgtataggactttgcaaaagtagaatagactttgcaaaataaagaaatcactgaatgccattttgggattttattcgttttattatttaagggaagaggacattctaggaaataaaatactatttgaaatttcgaagttggaatttttcctaaggtgcatgtatccttgatggaataatcattttcttggttcctttcccacatttctttatctggcccactctacttttattcttttttgctgttcttttcctttgtctttttcattttctgatatatcctgtgtgtaggatggaacggtgattatacataccattcagaaaggtcagtacatgaggactttacgaccaccttgtgagagttctctgttcctgaccattcctaatttggctatatcttgggaaggacatattgttgtctactccagcactgaagaaaagaccaccctcaa

SEQ ID NO: 98217 - DNA, 1763 bp, Homo sapiens
tttaaaggtatctgttgcacacttggattttcaaaactcggtgaaagttacaagtttgcatggtaagaataaaataagaatattgaaactggtacattagctaattctattactacttagcgtgtttctaatgagaagttactgaaatctattactgtccttaataaaaattgagtagaaaaaagtggaactagagatacattttacagatgtatttccttaataatataattaagcaaaagtgctaattgtgattttgacagttgggccttttaagtagcatttgcagcacaatttgcatttgcaaagttccgaatttcttgactctttcttcactaagcaaatactgttttactctaataattaagagttagtagtacccaaatatgttgaatttttacttaggatatctgtgtgattgatgaatgaattgaaaagatatgtataacttaaaataatcatttatatatagtaatttaaaaatttctatttcatgttttaggattatagctaattttattatatagtgttaaatgttgtggttgattattaagatcttaaagtaaaagtctgatttatttaatttggaattcaaagacattgttaaacttagatttttttgtaagattatcttttgagttaggtcagagagcttttacaactaccagtgttattaatctgagatttcatgtgtttgggagaacttgtgaatccctctgaaattgtgcagagactttgtatgttaaatgcattttcaggaaggaatggttacatggctttctttaaagggatctgtttccagtaatagtattcttttttgttccacaaatcatagatgtccttaaatccaattgtcttctcagttgaatcttagagaaatttttcttttgcaatttcgctttcctgttgaccacagtatccagtgcccttttctttataatcttttgagtgagtaaaaaaattttaagaaataaaggattctgtttagggaaacttttgaatagatttgatttgatgtgagtcagggctaataaaaagctatagaagaattttctttccaataagtaaaaatcctctgttttattaaggaaaaaatagctatgttttaggtaaataactctgaaataaactggtacaacaattgtaaaatagaacatatttaaatgtcaaggtgtcttttcttaagacttcaggaatttgtattgaacaaagtctcaagttaagtagcaataattatgatgcataaatgagactggcatctattcatttattttattcttttttggggtgatgggaggtttcaatccagtgcttcacccgtggtgccaccgtggctatctttttttttatcttacagttttttaggagatttcaagtcggcagaactaacatgattgatttttagtttttaaaatactgatttttttagaaactttttctaaatcaaaacctactaagttttattttgttatttatccagagattttgatgtaaaaatgccttcatttttaagattacttaatactggatttgaaaattattttggatgcttataagttttctaaaacttagataattagaaaaaatgcctaagtttatgatgttttactatgctgctttttagatggaagaaataagcagtttttactttatagtacaaataagttttgttcacaataaaatagatatcctacctggactaatactagatgtacaaggtagtggaattatttcttatattgctttttccaaaaagtaaaaac

SEQ ID NO: 98218 - DNA, 1817 bp, Homo sapiens
tttgcaaaactttttgtatgcttttgtttcttgatactggtgatgacaaaaataaaaatctcagcatcctggtgataggaagagatttataccaagataattattttacttttggaaaatgagatcaagtattaaaacatgtaatagctgtgcacgcttagagaataaagaacctttataaaatttttttacaactgtttgcaatcagtattctggcattactcagataaaattgtaagagagaaagaaaaatagatcagggcataaaaatcaggaaagtatataaaaatgaagtttggcaagttggtttagtctttctttttagcctgtgaagctcacgtctgttattaagttaataacaaaattaaaatctgttaactttgtttaggtcacagtgcagtgcatccttttgtagaagaaaaaataccaagtgttcattctgtcattagcaaggaacaccaatgaggtttcttttttttctctatttagggcatattaaaattatccttcagagtacttgtattgaaaatcaagtttatgcttctgaaaagaataagtgggctctcagaattagaattcagatttgacggttgaatcttaagacattttatattttgtgtgaaaaggagtggtcaggggaaactgttaacttggataccagatttttatttaatgatgatagagatatgacctttgcctttatgtatattttatattgttactactaaagagaccactgaggaaatcttgtaattgaacttaaggaagttagctccttttatatatttataaaatgagtagcattatctttaccacctttccactgaaaagatgcaagtcctaggactatattaaatataaatattatattattaaataatatatgtaatatgggtgtctgttggggttatgtgtgtgtaaagattggtcttttcaaatatgtatatttaaacctgtcttctggaaacaggttcttgaacctatctttaggatacagtttttgactgggatataagaaatgaaacatgtttgtttgtttcctttttgtttgtttgtttgcatcatcagccatactcatggcttatcctacgcattgttcctctcatcagctgaaactgtttctccccaataagtgagcaatcttaaacattttcatcactctttaacaaaatccattctcaatattctttttgctgaattcgtatattgtatatgctcaacatattatttgttttaaacttgactccatccagagcattgttctatagagttttcctgtatttatcagagtcatgtggtatttttcttgatgaccttaggcaacaatatagtgttatcagtcatcattttaatatgatttaaaatgtggaccacagcctgccttctttagtttaaatctaggccaagcatggtggctcatgcctataatctcagcactttaggaggctgaggcaggaggatcactggagcctaggagctcaagaccagcctgggcagcatagtgggctccacctctacaagacattaaaaaattagccttgtgtgctggcaagcgcctgtagtcctagctgctcgggaggctgaggcaaggggtttgcttgagcctagagatcaaggctgcagtaagctgtgattgcaccactgcacttcagcctaggtggcagagttagaccctgtctccaaaaatacatttttttaaatttaaatctggcagtttctaggccagtggttcttaatggatattacagatcagacttctctgtggagtttataaatatacagatatgtaggcactgctttggacttcatgaatctct

SEQ ID NO: 98219 - DNA, 1622 bp, Homo sapiens
tcaattcagctactttttaaaagaagtcctattccaattggacctttaaaatttttattttggtaatatttcaacttaagatgtattaaaactagcaattctgtggtaatcagtgtactagtcaacattaaaatgctattttgggttgtcttcttttggtaacatattctgacactaagcaacatgttttacaatttagtgggatgaacctacaaattcataaatgcttctctttattttgaaggaaaaagatacttgtctgtatacgacataattgttttactcttcagaatgtgaaagttatattaatcactaaacactttaagaagtggttctggtaggatatcagtagtcagacttaattgaaaaactgtcagcgtctgttttgtatatagggattaaagaggataactttattttttcctttggaaagaataattcttttggaattttggaattttgattttcttagatgactttttagcaatttaatgataataatttctatttttcttccaaaactatggcatgttatagtagatcttactattaaagatcttttatattttaaactgtttttttcctattctgctttttgctgctctcaaagactgtgattgatgaacatcaccaaactttttttgtggcaaactgcttattttataagtagctttatataagaaaacttcttagaaaactatgtggctggttggttccatttagaaactcttaacaggtatggctttcattcctccagttgtttgcttttatagacttggagcaaaaaatatagcaaaaagtaatcatatctggctagatagccatttctctcagattcattgctataaaaatgaatctactgaggcataaaaatatgaaacatatttaattcatctcttttgtcagtttttctgggactccaatagcatttcagtgttatagagagtgacagtgacttgaatgcatgtatatgcacatagtcaattcagagcgtaataactaaaaattcagaatgacttgttttttgaaagtacttggaaattgtgctgctacttaaatattgaaggaattcagaaagttgtgtatttatcttaaaatgttccttctcacttattctactggaattgaccatgaaaaagaaaatattatgccttatttatatctaattattgactgtgcaaactgtgactcagtggatatttgtatgccccccaaaaacattttaaagctgagcaatttttaataaagatgtataaataattttgattattctcattgtagttaagttactgttagtttggtgcaatacattctttccttcctcatccttttaaaattaaatatataagatgtatgttttgttttattacattaagtgctatttttaaaaaattcattgtgtgtatatgagctaatacttgatttgtttctgtatagcatgattaaagataattgaaaattttgcacttattttaggcccttggaaatttgtattctaatactttttaagaatgtccatttattttgtacataataaattagctttgtatatgaaaatgggtttgaatcaaataaaaaaagtgatgttactttcttcagttgatttgtaattctcagttcat

SEQ ID NO: 98220 - DNA, 1025 bp, Homo sapiens
ggtaccagctgcatcaacgtcgcccgggagctcgttagagattcagattatcgatgccgggcgcggtggctccacctgtaatcccagcaccttgggaggctgaagcgggaggatcgcttgagcccaggagtttgagaccagcgtgggcaacatagtgagaccccagtctctacaaaaaaaaaaaaaaaaaaaaaaaaaaaattagcctacagtggtggcgcttgcctgtggccccagctgctccggaggctgaggctggaggatcactttagccggggaggcagaggctacagtgagccgagatggcacgactgcactccagcctgggcgacagggcgagaccctgtctcaaaaacaaaacaaaacaaaacaaaaggaaaacaaaataaaaagattctcgatcccaaactagacctactgaatcaaacactcggggtgggcaggggtagggggcgcgtacaacaatctgtttgaacagagccctcccggggacactgttacacacttaaatttgagtgaaaaccaccactgatctaagcgggacagggaagtgtctgggagtaaaacaagagtagatacgccttgtttcgcagaatttctgtctgaagtactagtaaatgtgattctttgacactttctggtgagcggaggctgcacactgttcaggtttccttgctctgttaactctgactttcggtaaattgcttcagttttctaagcttccatttccttctatgtaaaaaagtgaaaataataccacatggagttgcctgtaggttaaattacatattttatgaaaatcacttagcacagctcctggcaaaaccgaataagtgctatctacgtcagcatttggcgtttgttgccctgggcataaaataccctaggacccctctttctatttcgcctggctcagaagttttgacgtggctactgaaatacaagacaaggcctgctacttactagtgctgcttttagtgaaagtgtgctaaaagtatttatagattttatagctttaataatat

SEQ ID NO: 98221 - DNA, 1059 bp, Homo sapiens
actctgtttttattccataggtatttaataaatatttggtgaaggaaggaatgacaaagagactctgagaggtttctgtcactgaagtatgtttaggacttttatatatattcatatgtttattgattattatgtcacaggcattctgtggcagacttttcattatttttaattagataccaagagtatggtcttttaatttccgttgggtttaagttttttctatctttgagtttttaatttatattttctgtttttattgtcgtgatagtggttctgttttgttttacatatcagccctttgccagaagttgaacctgaaccattgaggatgcaattataggtggagctagtgttagtctgacagattcgtacctgaatgttgactttggttacagagtttaactgtttgccattaaatgaatctacttagtaacattttctgagatttagaaagaagaaacagtaatcattgtgcttttctgttctctttcagctttcagaagaattattagataaatggctctcctacccagagacccagcacgtgcccctcagccagcatatgcttggttttgctatgaagtctgttacacagatggtaatgggtagtacatttgaagatgatcaggaagtcattcgcttccagaagaatcatggcacagtaagtctggggctaaatttaaaattactctttcaggctgggcacggcagctcacacctgtaatcccagcactttgggaggctgcagtcaggagttaaagaccagcctgccccacatggtaaaaacgtgtctctactaaaaatacaaaaatcagctgggtgtggtggtgggtgcctgtaatcccagctactcaggaggctgaggcatgagaatcgcttgaacctgggaggtggaggtcacagtgagccaagatcatgccactgcactccagcctcagtgacagagtaagactttgtctcaaataaataaataaaattattctttcatcattagccaggcatggtggcatgtgcctattgtcccagctactgaggctgaggcaggagggattgatt

SEQ ID NO: 98222 - DNA, 1050 bp, Homo sapiens
cacattgaatctttttaaaaatattgaagcctgactcctacctgtaaacattcagatttaattgacatgacgtgtgacttgtgctttactgttgtttgaaaaaacttctcaggtgattctaatgtgcagcaaagcctgggaacaacttctttatagtgttaataatttcttattttcttttctttttttttgtttttttttgagactgaatctcgctctattgcccaggctgggtgagattgcagtggctcaatctcagctcactgcaacctctgcctcccgggttcaaacgattctcgggcctcagcctcccaagtagctgggattacagacgcctgccgccgtgctcaaataatttttatagttttagtacagacggggtttcaccatgttggccaggcttgtctcaaactcctgacttcaagtgatccacccacctcggcctcccaaagtgctgggattacaggcgtgagccaccgtgcctgggaataatttctcattttaatcactaatgtgtattatattgattcaattctataaatatttaatgtagatctgtgatatcctggcatgttttagatgctgaggaacctaaacaaaatttcttgcccttgtggcaccacattctagtgggaagagacagacagtaatctaaataagtaaactgaatagtacattaaaaggtgaaaaatgctgtagacaaaaataaaaccagaaggggatagggagtgccgggggttgggagattgcaattttaagtaattattaggaaaggcctcaccaagatgaggtgacttttgagtaaacacttgcaagagatgaaaccactcatgcagaacatgtggatacccagatgttcaaaggaagaatattccatgtagaggaaaagtaattacagagtccttgaagtaggactctgctgctgtatttgaagtacaacaggaaggccagtatggctggaatgaagtgagtgagaagaggagcagaagatgaggtcagaaagactggagacaggaatgggttttgtatggcttacagaccattgtgtga

SEQ ID NO: 98223 - DNA, 1050 bp, Homo sapiens
cgtggtggttcacacacctataatcccagcacttcgagagattgaggcaggaggatcacttgagcctaggagttcaagatcagcctgggcaacctagggagaacctgtctgtacaaaaaactgttaaaagtagctgggcctggtggcatgtgcttatagtcacagctactcaggaagctgaggtagaaggatagtttaagtccaggaggtcgaggctgcagtgagccttgattgcaccattgccctccagcctgggtgacagagcgagaccctgtctcaaaaaatggaatatagtaagaaacagcaatagactaaatatatgttaaataatttgggaacataaaaataagtggcatttaaatataatgtaagagcactttctattttcagttgatttttaactttgttacatacttgtgttcttttagtgtcaacatgtaagatgccagtggagctatattgtgattaacctcaaattttctttgtaggtttgatccagatcggtttgatgatgaattagtaatgaaaactttttcctcacttggattctcaggcacacaggagtgtccagagttgaggtgaataatagaatgccagactctgttcttagaattttgatgatcactgttgatgagaatgggcaatctgtatgattaaagtattatttttttattattattgtactttaagttctggggttcatgtgcagaacgtgcaggtttaaagtataatttttaatctttagtaactaattgactttcttcctgactaggtttgcatatatggtgaccacagtacttcttagtgtattggtgaagagactgcacctactttctgtggagggacaggttattgaaacaaagtatgaactggtaacatcatcaagggaagaagcttggatcactgtctcaaagagatattaaaattttatacatttaaaatcattgttaaattgattgaggaaaacaaccatttaaaaaaaatctatgttgaatccttttataaaccagtatcactttgtaatataaacacctatttgtacttaatttt

SEQ ID NO: 98224 - DNA, 1011 bp, Homo sapiens
aaagcattttcatgtcttagtgtaaattttaaaaaacaggtgttacaattttataggttcataaattttgtaatggccacattgttgatcgcggaagtgagattttgtttgattagacatactgttatcttgtagacaacatttgtatttgagaatgacccgaaccactgtataaacctgttccttcgaaagaggcagttgactatggctactaggaaaggaatgtaggcaagattaatacaaaaaaatacaaatgtccacttgtaatgtactttgctgatacaagtggggtagaaaagattcagaggttcaggcctgggcgataagagtgagactacatatcaaaaaaaaaaaaaaaaaaagattcacttgctcaatttttcgctaaaattgaaagtcttttatggcctagaactgtgtgaggggtggatggtacatacctagtaggagaggctgatcttggaggaaattaataccatgtagttaatttatactctgtagtgcactgctggtaccaaggaggactggaggaagcaatgctgttctgagggatttcacaatctctagtagaggcaaaacctaaaggaatgaagtggtaattccattgccttgtgcagcatattatggggaaagagttgcaggtcagaagagaaactgagggtggaaaagtggattgcaattattaccagtaagaaataaaaaataaacagatttctctctcttttgcaagatgatttcttattgtaatttgaaggtacaagttcctcttaagttataattgctatataaaggtaaaaggataaggattattaaagctgaaaggttaaaggcatcagcagttttctttttaaatattttatacatttccttcagttgaaaagagaaaaacgttactactatcaatctctgttttagcaatgggactcaaaatttagtgtggtgacattttaaaatttaaagcataaatattgattaatattaatttaatagaaatgaacttagattttaaaa

SEQ ID NO: 98225 - DNA, 1041 bp, Homo sapiens
taaaggtttatgaattacaataaacttacatagtcatgtaaccaccacaatgtaaaattttccttgtaccctctgtagtcagtcctgtccctccactactagcctttggtaaacactgatatattttctgtccctctagtttttgccttttccagaatgccatataaggggcattatgtagtatatagccttttgtgtttgacttcttggtactagaagtcctaatacatttgaaaatcatcagtgttattgtgttttgtcagtactttgttccttcttattactgagtaatattctagagtatgaaagaatcataatttgttcatccattcaccaactgatggatttctggattgtttctagttttaggcagtggtgaatatggctgtaaacatttgtatacaggtgttggtgcaacctaagtcttcactcttttgggtaaatttaagggaaaagatcaactgttgtaccctggtaacagtggatgtatccacataggctgcataggccagtgcttgaactgcatctgatctgaatcttggccgagcactttgtgatcctcttggaatataagattatggaagtttgcgaggaccttatgtgaagccctttctcaatctcttcatctgccgaggaggctgtacgtgataacagtgcctcatcacctcctagttcccatgagatgaggctctctattgtacccttttaggtagtagctgcaggctgtaagactttagttgcagcatggcattggctcctccgcaacagagtgtcatatctatgttgtagtcacctggctccttttgttttagtattgctttacacaagggctgtatcttttactactattccttctgccctccatgtaaatggtaggctttctgaacctaacaagcagttgggcaggtctatcacattgccttctctttgccttgacaataaatatctaatagtgggattattaccgtatggtaaatgtgtgtttagttttatacaaattgccaaactcttttccaaaaacgatggtaccgttttgcgttc

SEQ ID NO: 98226 - DNA, 2403 bp, Homo sapiens
tgggaaaatttattcaaggctaacaactgctaatggaatattttagaatacctctagaatctaatgccaaaaagacacttagaatataaaagatgacatttgtgtttgcccaattacataagaaaaaagtaatcccatttttttaaaatatataattcataggtttacatcccccattcttataatcctcaaagtaaaatgtttttctttcaggattctagccccttcattttttgactttcagtgtttaagggtcattaatttgaagaaatctttaatacagttaaattgtggaataaaacagtatcttaaattcatcagagaaacttctgttcatgacacattctgctttaaccactctttctatgatctactgaaacattattttgttaatgctgaatgcttaacttgttttttctttttttcctttctcttcacatcctgaagtttcaactaacctttcaatgctttttttccttacctcttttatttgctccatttatgcattaagtggttgcttagatttaaggtaagagattccagggctggatttccattctttgttcttatgtagaatattacatatggggagttaaagagattgttaactcttggccttttaaaacccaataaataattcctcctttttgttttattttttgtcatgcaactttgtggtgtgtcttcatgttccttgagggcagatatttttgtctgttttgttcactgctctatccttgtgcctagaacagtacctgacacacattaggtgcttagtaaatatttgttgaatgaatggttattttgtaatgttaatatattttgtgaaactgaaatgtaagctaccctatcataaaaatgttatgaaatataattagctggatttttataaatatagagactttgttatgaattggagggccaattaatgtactttatttaaccctccccctgtgtaatagcctttttattctataaatggtatgctttctgatataccttatggacaatatgtcattatcttttaatcagtataaagaaattgagaagcagaaaatattcagtgacacgggttttttttttaagttgcagtatcatattttgtagaaaaattattcttttttccaaatagctgtataaagaatatatttcaatataaactgtaagagcttttaaaggtgaatataattatatgcaaaacatcaaaagctcatgataatgtttaacagaatatcagttaagaattagagatatttcctgttagaattcgtttcaataatgttttggtatcgtggaggattcgtgataaaagaaattcaactatattcaagaagcctgcctaaaatacaaggttactacaattatatacaaaacttagcatgcatttcttctttgatttttttttgtaggtgagttttatagtttattttcaaatatatattcctcccatctaatacccattatttgccatatctttagtgtagaaagtgatgacaagatgactgagctctgaatcattaactagtactaactaaggccacacaactttcccctgcccgtggtaggtagatttgattggaagagcccaggcatatggacacctgtattattgattggattgttggttccaaatcctcagtcatggtgagtaagatgtggaattgtgaagaaatccttttgcttgaaataggtgggttgcagtgaactagaccaaaagcagactgtggctgctttggcccttttaccctaaagtctgtattcaaattttgaccattgatgtgttaacctccaaagtgatagaaatacacggaaagtttaattgaagaaaaaatacagaaacacacagattctttacccttaaagtttagactagcttgcccaagctactatctcatgcttgttttctctaagccccagtatgattccttcttgatgttcctgcgtcaggatctgtttccattgtgagagacaggccaaacagagtctcctagaaagatctaatgaagaatcacacttagataagatccctgagctttttggagacctgtggattctagcaagtgtcttagaagtctcctgatgagcaatagcattatggattccttatcctcattttaatcagggtagctgattaaatgttcaaaatttaaaacctatttaagacctagtcgtttttctttctacttctctttttctctttctcagcactttttgagctctgtctttgctgctcccattgctgtcatactttttatacttttcagacagtctccagagaaagtcatcatactttaggaccagacatgtgggatttgactcagaagagacctccttgtttaaaagtttaacttttactattttatacagcatgtttgatgcttaattgttcttgacatctgaaat

SEQ ID NO: 98227 - DNA, 1046 bp, Homo sapiens
ttcttgcctattcaaataacaggtagtattttaggattttaaaaaattccacttaagccagggttggttttgatagcctcacttctctgtatacaattatgatttgctttcttaaaatttatattctgaagttacagttataaatgtattctgatttcaatggtatgatgtcttgcaattttatttagaaagtataatttgactactctagccatattatttttagaaaagttgaggtcctttttcaaaatatgttttgaagatggaaattcaaaatattagggtcttaaaatagaatcacatatgaacctgtgtggtgaacattaacccattggtagtctcaacttgagactgcatttgaactacacttgtgagtgatttttcttagctttttgagatagccagggctttctgtataagtgctaacatactcctttggtgacctccattattcccagattatgcatctttcctacacttgcattttcagttggggatagaatagtgagtggagttacggtccagctctgacttaggactatgttacatctttctcatgcctgaattcaccttcagtttgggcccaagtgggtccaattcccattggaactaggacattgcctgtggcccttgtgctgctcccagttgaatgggatacctcagccctaactttctggttcagatgtttaggaacatggcttgaacttctagcagttttcaggtaggtggttccctcataagaagatactaactaaatctgacttataaggctggcccacaatttaaaaaactaaaattttctgtatatattacatgatttatctttatattctctagttacagtggatcatatgcatagttgcatatttttatttgggaaatgtattttgcttatgatatgcttactatctaaagaaagttactggccgggtgcagtggctcacgcctgtaatcctagcactttgggaggccgaggctggtggattgcctaagctcaggagtttgagatcagcctgggcaacacggtgaaaccctgtctctactaa

SEQ ID NO: 98228 - DNA, 1059 bp, Homo sapiens
gtagagtaatagtagagtagagattgcatatgaaatgcatggcctctaatttttttccctttatttaaaccttcccctcctttgttatgtagtgtagcatattatttcccaaaagtgccactttatttcactgcatacaagttgagttttccttaaaattttttaggtgagtacccagaacatgaagatgggtgggctgccgcgtacaacacctccaactcagaagccccctagtccccctatgtcagggaaagggacacttgggtgagtatataagtagtaattgaaaaccatttcatgtagtattgtttaaaaatgaagcacaacatatttaaattattttttgaatatttgaagagagaacattttctttgtaggattgttgtttgtgtgtataacttcctcttctcttgggaaacacatttttatacttcagaaagatttgtttagaaattgtttttctagtgaattttaaatttgaggtaaaatcctagcccaagttcatagtttattgtaaattgcagtctaattttaattccttttctttcagaaaatgtatatagtcttttatattacagtttaactccaactatcctttttaagctgtgtagattataaaattctataaaacttataagaatattgagcttcaggccaggtgtgttggctcatgcctgtaattcccaaagtggggattttgagagaccaaagcgggcagatcacttgagcccaggagtttaagaccagcctgggcaacatggtgaaaccctgtctctacgaaaaatacaaaaataagctgggtgtggtggcatgcacctgtagtcccagctacttgcgaggctgagacaggaggatcacctgagcccaggaggttgaggctgcagtgagccgtgatcatgccactgtgctgcagcctcagtggcagagtgagcccctgtctcaaaaaaaaaaaaaaaaaagaagaatatggagctttattttggtcctagagttgggctctagatttgacttttggcaaaaatggccaattaatggaaaagcttgacttttttcttctag

SEQ ID NO: 98229 - DNA, 1097 bp, Homo sapiens
ataaatattgggaagtctatatatttgttatttgtaagcaagtgatttgtaagtgtttgctcactttgcacttctctttatgcctttggtgatgtggctcagttgctgctttgaggtttcagatcacactttgttatgagtacaagtttaattccagctagtgttatgacagtgcagtctttggacacagtgggaactcagtgtgagaaccatattagtaacaaaggattgggcagatataaaaagtagttttgacagttaaatttagtggctgtattggaatttagtagtctctgaaaatactaccctcttttctctgaaacagaaaaatctgcttatttgattcgaggagatacacacttaaaacttagttttgaaaacgtgacacaaaatacattaatagaatgttacatacttaatttacttatagtaacaagtagataatgccttttaaaaatcataaagatttgtgttttaaaaaaaatttttaatctgataatatggaatatgtctattttctgatttgtgtaattcaaaatggaaaactgttgttttttagtgtattatgttagttttgtatactatatacagaatgttatgctaaaaataacaatacgaagggaacacttttcttctggagtagtgctttcaattgaaaaggaatgtttgtttttaatgaattgaaaaaatctgcacattaccctgagcatcttgaattatttgctgcttatatagtaatcctttagcataagttttattctttttttcaactctgttcttttggttagtgttaagcactgaatatctaacattaaatactctaataccttttctaatcctgcctcatgtgattgcctcattaatgctgcctcttactcctctttcccctcagcccctgctggctctgctggcactcctccccttcctgctacttctgcatctgcccctgctcctcttgttcctgctactgtcccttcctccactgccccagacgctgctgctgggggtgcccagacccttgctgatggcttcacttctccaactccccctgttgtttcttccactccccctacaggtaagtatttgcttattcattg

SEQ ID NO: 98230 - DNA, 1024 bp, Homo sapiens
attacaaatagtgcatggtaggtggttagcaccatttgttgaatgaatgggagaatgaatgaattgtaggttgttaatactgtatctttcaattctttaaaaaaaaatcagtatgtgatttccacgtaaagtcatacaacttagtttttctgagcagaatttttttgaatattttagtggttatttgctttttaaaataacattgtggtgaatggtatttcctttttatttaatcagacatccttacttttaaataacaaataatgaaagttgtgtgcacatgaacagaatttagaagtggcaaaggaaaagagaacatttttgaagctactttgtgctagggaattatactagcttatacaattctcataccaaacccatggtggaaaaactaggaattgggtaaattgaatcagatataataattacactaaataatcggttgtatcatgcatgcagaataactaatctggaacatatttaataattattattttgtttactccccagagagggcaagaacaaatattagacaccatggctattgtggacatggtatgtcaacttactgcttttttctgtatttttgccaggaagccagtaagcctatgtgtgaacacctctcatactgggttcaactcattccatttttgataagccttgaattttatggagctgcagtttgtctctgtggctgtgacctatagtgatattctttgaaagagtcttgcagaagaaatttgatcctccaacataaacacttaatttaaataatgtttttatattatctcatttgattcttagaatcacgtacaaaataagattggtgatcattttcttatatcttataggtaaggaaaatgaggctgaggtgatggtcaggttaggatttgaacttaggttttctgactctaagttccatgttctttctttctgttttttttttttttttttttttaaattgagatggagtctcgctctgttgcccaggatggagtgcagtggtgtgatctctgatcactgc

SEQ ID NO: 98231 - DNA, 1153 bp, Homo sapiens
catccattgtctttttttaatctttgcagccactattggaagtaggttgcattaccttgttttcatatcacatttatggaataggcctgaagaagttaattgactagctatccaaacagccaggaaatgatggatcagagatttgaggctgagtgacctgaaaatccaacctctttccactaagcactcttccaccaggcatataagatccttccctatttcatatcctcccattgatatttctgggttttttactttctctttgggtatcttttcctagccatatggaaacatttctggtcctgtgaactggttatgctgttttatgcctctgagcctttaccctcacttgcttctctcaacttgattatctttctcaacccctgtcagcttggcaggttcccttcttcaagtccctgctgagaggtcatttcattgtagccctccttacctccaccactacttccagggaattgctacaaatattgttgggttaagattatcatgtattcttctgtttcaatagaatgtgatctccttgagagcagagacatgttcatctttttagttttattagtcttaactgtattttggagctaacagaggcattttctctttataagaaaatgcatatcctactttgtacccattctaaaggaaactgtaactgtagagtaatcttttttctttcttttttttgccgctttagtttccacacatacctggcttattagtgcaattatatatgttaaacatctgttgacagtttattagttctaggcactgtgccaggtgattgaggtgcagggaaatacaccttgggaaggagagtggaatgatttgattaaggcctgcacttttctataccatcagggaggaagtgtaccaatgagttgggattatgaaaaattgtaatgacatagcacccgattctcagaggacggttttgatactgttttcctagcaggtgtttgccacttacttagtatgaagtcagtaagtatttgtctaattaatgaatgaagaaccagtttacttgcctacaattagagtaataaaagtatccatttagagtgttgggatgtaatatttttttctctctgtattgacaaacatttaaacttgtaaccttccaaggtaaaattcagaaaac

SEQ ID NO: 98232 - DNA, 1182 bp, Homo sapiens
tcattttgaacaaaagtggttctgagcagcttctggagtaaaggccagattttgaaactgacattgaagactaatccattaatgaaacacgaatgtttgtatagcaactaagtggttattttcttagcaaaaaatgagacttgaaagttgaataggatttaaagcaggatgtcattggttttcgccagtcaccagtgaaagctgcaagctttgtagaaacagcaaaatgtttcatgaaccaaacctaagaagtattgttttaatttaatagtaaagtgcatgactatcactttaagacttaggaatgtcttaagtagatgactgcaaaacattattatagcagcactacctatattttaaaaagtcattccctaatttgaccaccctatcacagttgattgccttttggattggtctttttcatcttttcctacaatcatatacgtttctcatttacacaacgtataaaaaaattgtgtatgaggtgtgctgtgactaattttacagacgtggcaggacttaaacattagtcaaataataaacattatttgaatgtttaagtctttaaactctttaaaacattcaccttggaaaaatacatacatttcttttggtacatcttcaaagataattctttggaattatcttcaaagctttccaggtatattattttgaagatattccttggtagcaaatactcactctgcattaagtttgatgtttggaagaagtctggaataatttggaaccagttatagtgacccagttatactggggtaagaagtacagctatgaccctgttattccccttaaaatctttctgtggctcaccatggctctttggatagagtccaaactgctgtaaggcccttcctgcctcatcctcttcagcttcctgaagctggctactgaatttggacagttctttgaaagtttcttgctttcttacctttgtacttgcattgtctttttttttttttttttttggagacagtctcactctgtcacccaggctggagtacagtggtgcaatcttggctctctgccaccttcccctcctgggttcaagtgattctcatgcctcagcctcgtgagcagctgggaatacacgtgtgcaccaccatgtgcgtctaatttttgtatttttagtagagacggggtttcgccatattggccaggctg

SEQ ID NO: 98233 - DNA, 1051 bp, Homo sapiens
ccattaactcttactcttccttcaggtttcaggaagcctttcctgacccacataacaagtgtggtttatgctgtgtgcttctatagtatcttaaagcacacactacactcaattgtaaatgaagatttggtcgttcatgtcttcatgacttttgcctactgcccttttctcaatgctgagcataatatccagccatattagttaatgtttgttgaataaatactaatgaagcatgacttgaagtttttaaaatttatcccatcccataatagtgtagcttttaagataataggcattggagttcaggtgcttttccacttacttgctgtcagaatacttaatcttggaaagccagtctccacatctataaaatgaaaaacaccacctcccaatataaagatgaaatgaaataatgcattacaaaggactagctgagtaattggaacattttaagtcaaaagtagtagcttattaaactggcagttacaagaaaagtaaaaatgaccaatggcagcatctttgagtaattttgtagtgtcatttctcaaggttattgttttgaaagttcctttggatctatggttctgtgcagttgtttaaagtcagtctttttatcttacaaatggaaataggataaatttctctttctcacccaagtatatggtaaatcacatatctatatcttttgtttattaataaaaactattaggatgaaagacattctatttaatgactgaagttttaaagtttataaagtagatcagtatagaggggcacagcagatgggaagaatactgataagacagcatggtgttgatgtggctgctcccaccaggcatcagcagtctttgaaaatccatttaattcaccgggcgcggtggctcacgcctgtaatcccagcactttgggaggccgaggtgggcggatcacagggtcaagagatctagacgatcctggctaacacggtgaaaccccatctctactaaaaatacaaaaaattagctgggtgtggtggcgggcgcctgtagtcccagctacttgggagggtgag

SEQ ID NO: 98234 - DNA, 1036 bp, Homo sapiens
tgggcgcccgtaatcccagctactcaggaggccaaggcacaagaatcgctggaaccggggaggtggaggttgcagtgagtcgagatcacgccactccagcctgggccatagggcaagaccgcatctcaaaaacaacaacagcaaaaaaaaaataaacaataaaaaataagaataaaaaaacccagagatcagtacaatacagctgagctttacactgtattcaagggtaagttatcagaaatactaacactgaaaaccatatttcacaaattcttaaaatattttttcacttaaatgagtccagggaatagtaaaattttaataacccactactttcctcttaatgaatttttctaaaatagcattttaccaaattcaagaggaaaaaaatcatcaacaaacttgggttacttcatctatgaggatgtttgtttacttatagaatttcttctaattcagactataattcagaatttcttcaggctaaatgtccaagtgtactatcagagtaatttaaaatatctcacatggagatctgcttccacagcttgcataccaatatatagtaacatcaaaaagattatcttcaaactcagctaccttaagctttcaaaatggttggtaaatacgtgagcacaactgaacagaatgaaatgaataaacctgtttatcagctccccaggtttaatgaacagcactaattcttatttatgaggtaccagtatagttcccatgtgactctctgagcaatccaatttatttagtattttttaatctaagcctacgaattgaattaaatggatttttttttttttttttttttttttttgagacggagtctcgctctatcgcccaggctggagtgcagtggtgtgatctcggctcattgcaagctctgcctcccgggttcatgccaatctcctgcctcaccctcccaagtagctgggactacaggcgcccgccaccacacccagctaattttttgtatttttagtagagatggggtttcaccgtgttagccaggatcgtctagatc

SEQ ID NO: 98235 - DNA, 1066 bp, Homo sapiens
actcaggaggctgaggcaggagaatcacttgaacccaggaggtggagcttgcagtgagccaagatcactcgccaccgcactccagcctggcaacagagtgagactctgtctcaaaaaaaaaaaaaaaaaaaatctagaaagagagccagttgcatgtagtggctcacacctgtaatcccttaaagtgctgtaaagcactttaagaggctgaggccggcggattgcttgagacgaggagttcaagaccagcctgggcaacatggcgataccctcgtctctacaaaaaattagaaaacttagccagacatggtggtgcatgcctgtagttccagctactctggaggctgaggtgggagcatcacctgagcccaggagtttgaaggctgcagtgagctgcgattgcaccactgcctggggacagtaagactctgtctcaataaaaagaaaaaaaatatcgagagtccctataaactgtctgccacccacactgcttagaaaatctcaggtaccctgagtgataaatgtaatcaattttaaagatgggtgcactaactggggcggtgactatgatgatggagagaagtcgagtgttggtatttgggagatttagaaggtggaattaacaggacttggggatgtcggggaaggtgagtgaggggaaggcaaagatgactcctagtttcctggctccacagaagcgtagtaatcagataactgggagaagacactgtcatggaagccatggaggaaaatgtcaagaagcaggcagaggtaatcatcattgccaaacactacaggaacattagacaaagaactgagaagaggctcaaaagtagaaggccagtttttttcaagtgaatagtttcattggagtggtaggggcagaaggaatatggctgtattagttaagcagcattattttcattgaaacagcatctccagtgggttctaaaacatttcttagaatacattaagtggtttaaccaactcttcattgatagtgtccaggttaactttgctctacctcaggacaggttataacataaattccaaagtatgttaaatg

SEQ ID NO: 98236 - DNA, 1474 bp, Homo sapiens
gctgaggcaggagaatggcgtgaacctgggaggcggaggttgcagtgagccgagattgcaccactgcactctagcctgagcgacagagcgagactccgtctcagaaaaaaaaggacccagatgattttttctctcctaaaatagtaaattgaaacaaagaggagcaatctaaacataaaactctctacactataaactcctggaggtaagggcccatcactcatctctgtgtatccctagcgcctaacacaaggcctagctttttggatacttctaaatacatctatattctatattattcagttacacagtgagtaataaaggtaacttaaatacatattgggggaaaaattaaggtgatactaaaataacaatgtaaaacaaaaaggcccaaaaggagcatgttacatagaagtgactgatctgaactaaaaagactgaccaccaaatattgtagggtattagcaaccacacctaacaattaagtaccctaaactagcaagccactggaaaaatcaaaatgctagtaagattatccatttcaatatactgtttgtattaaattacatattgtgagttgacatcattttatttatatggaaaaaagttcatcctaagccagcaaaacatttaacatactttggaatttatgttataacctgtcctgaggtagagcaaagttaacctggacactatcaatgaagagttggttaaaccacttaatgtattctaagaaatgttttagaacccactggagatgctgtttcaatgaaaataatgctgcttaactaatacagccatattccttctgcccctaccactccaatgaaactattcacttgaaaaaaactggccttctacttttgagcctcttctcagttctttgtctaatgttcctgtagtgtttggcaatgatgattacctctgcctgcttcttgacattttcctccatggcttccatgacagtgtcttctcccagttatctgattactacgcttctgtggagccaggaaactaggagtcatctttgccttcccctcactcaccttccccgacatccccaagtcctgttaattccaccttctaaatctcccaaataccaacactcgacttctctccatcatcatagtcaccgccccagttagtgcacccatctttaaaattgattacatttatcactcagggtacctgagattttctaagcagtgtgggtggcagacagtttatagggactctcgatattttttttctttttattgagacagagtcttactgtccccaggcagtggtgcaatcgcagctcactgcagccttcaaactcctgggctcaggtgatgctcccacctcagcctccagagtagctggaactacaggcatgcaccaccatgtctggctaagttttctaattttttgtagagacgagggtatcgccatgttgcccaggctggtcttgaactcctcgtctcaagcaatc

SEQ ID NO: 98237 - DNA, 2081 bp, Homo sapiens
tgttacagggcatcccagtataactaaactgttgaaattgatataatacttgggaaccagagattatctggttgaaataagataacagttgaaataaccactgagataatgactcaaagagccaagttaccaagtgatttaagcaatgaaaatcacaggagggcttataggtatctgattttcttgtcacttttagtctgttattatagttatattaaattggtgacatagtgcagcatatgttttgaaaaaatatatgtagcggactcccatcattcatacatttaacttggggaaattgaaccaccattctacttagcgaagaggcataggctccagagagagtgagaaaggagacagaaatctgctgttccattagtctggtttctcacttgactctcatagtgtatctcattgccctagtataattctaaggtaaagaaaagctttaaaaaaaaaaaaaaaaaaaccacaatatggtatctcaacacaaactcaaatgaagaaacagccatctttcttgattctaggattgtgtacctcttcaatgaggtacttccctgtaggctcttaaaaggtcatcaaaagcacatttgattaaatgtgctttttccccatttgtactcaatttagagcctaacatccctagaaaatggaatttcattgtatatgactgggtattacttagaaaaaaaaacatgtaagttttggttggtgtttagaaagtcaccatgtttgagtgctacaggatttgggaacagatagctattcactggcttggttctgtctttctaggaatattactgtctttcacatcctgttttgttttcttccctcctagttgtggcaatttatgactatacaaaagacaaggaagatgagctgtcctttcaggaaggagccattatttatgtcatcaagaagaatgacgatggttggtatgagggagttatgaatggagtgactgggctttttcctgggaattacgttgagtctatcatgcattattctgagtaaagctcagcagggctgtgcttgcctcacaggaatagtcaggtcttcccagattatctgaaggccctggggattccactccagtaaagtagaatgaaggatacaaatgataaaaattacacttttttttttggtttattccccagtattaaaaacaaagcaagctgagtctgaacaaatggatctttctgccatcatttgtacaatgctgagctgtctggattgaaataaaatgaccatttttatgtatgtcaaaggtataacagcataactgtgtagccaaaacaaaatcagattaagactgattcagaaaaatctgggatctttctcaggaatactgtatacccttgggatttctcctcctgcagaatctgtggcattggatgttcttcattgcctgtgctaaggggttaacctcatggcccagtgggtaccctagccccttcttttcttccacttgtatgaagaggagggaaccaacatttaaataccacacttaaccatttttacaattatttcagatggcttttttcctctgtgacactgtaaattctgcattctctcagcacttgagtgcaccaaacgagtgaatgctgaactcacttgcatcccttcatgtttctgtttgtggattataaggatgatgaaatgtgaaagtctcccaacactctgagggtggtgaacgattgccacccgtttgattttaatgtgctgctgcatgagactgcattgttgctaatggccagtgtacccagatgtgaagtgtggtaggctggttcatatgtggaggtgggtgtgtgaagctagacacgaaggtccctaaggttctgaagagacttgaactgtggaaatgctcttagcaggcatcccgaacccctgcttcggtgctgttttgaggagtaggatcttggagttcagaccaactatgactatcatttccttcactatctagaaaaacgctattctactttggaagagaatagtagttattttcaagtctcctgacagtcactgggagtacaaggtttgctaatgtgctctctggacgttattaatggccagtatta

SEQ ID NO: 98238 - DNA, 3205 bp, Homo sapiens
ctgaaaaaaatccaggagggcttgtctctttgtgggtggtcactgtgatgttgggccagctcctgttcaggtccagagctgctaacgtgggttctactcagtcccagtgacttggccagaatagagctttgccaggtaactgccctgtgctaggtgaaaggggaaaagcagtagctggatatatttcaaatgaggttttgaacaagttcagaaagtggaacttgattgaaaagtgaacaagtgtagtagtgtgtgagaaaattcagatggtgtcggatgcagaagttaatattccacttaatgttatctgagcattaaaaatcatcagcatttaactgagaccccactatagagtttccttatcaagactttttggttttaaagttgtttttaatgcattgcaagttacaatagctattttgcttttagatttttcccagcactttgtatttattagctttcattaacttgcctccagtatacattccacttcgtgcttttcttaggtcatttctacatcccttattccttgttttcctgcagtgtaatggccctgaatgtcctctgagccttcagctccattatggacccaaactagactatacttggataagttaagctcttcttcgtgtactggtctataattagaaaaactgttttaaattagatgttcccattatttatttaaacagctttttgctgagaaagcttagtggattaatgaggcagagggtgttttgaaatccaataaatagttcccacaggctgggtgtggtggcttatgcctgtaatcccagcactttcggaggccgaggtgggtggatcatgaggtcaataaattgagaccatcctggccaacatggtgaaaccccatctctactaaaaacacaaaaattagctgggcgtggtggcgcacacctgtagtcccagctacttgggaggctgaggcaggagaatcactggaacctgggaggcagaggttgcagtgagccgagattgtgccactgcactccagcctggtgacagagcgagactccatcaaaaaaaaaaaaaaaaagttcccacagctcaccactacagaagcagggaagacaactatgcagaaaacagagttagtggcggtcagcaggaatgcagctggtcttttggacccctacgggatgggggcagtgcagaagacactggtgaagtcctttatactgaagacctgtggttgggagcaggggtagtccatgggtctgctgattttttttccctatttagtactaatgtgtgtgtgatctttgttttacaaacagtaccttttgggttttctgcatattttataatttttgtacagttttgaattctatagattgtcttggaaggatactgtgtgatgggtcaggcacacagtaattggagacttttaatgtatgtaatatttcatagattgcatgctattaatcatctgtgagggtagtattttttgttttattgtaagtttccctctttttttataaattaaaagatggttggtattaggaatttcaaatgaatgcagaaaatcttacatgctgtgtactattaatattataacagacgatccaagtccaaaatctgaccaataaagcaaccattttatcaagatagagggattctaatgggagaggggattcttccctcctgaagtttgtgtgtccagtccccttaaaaaaaatgaatagttgtcttttcttgtcatattaatactcgaaagtccatggtggtattaatgaaagtacactttattgttgcctttgaacttacggccaaggcaataaatcagaaacaaaaatagtgccaatgtgtcaaaatcgacatctgagagattcagcctcccatttggaataaatatgaatcttctaagctatcttgtttaatattttccatcatttagctacttcctatctccctcagaggcgcctgctgttcccattttagagttgacagtggcctgctaattttgctatgttcctaaaagttactgggtgtgagacattttcatcccctcctttttcctactgctggtgtttattatccagctagacaatattttatgcatatttaccgtgatgtctggaccgtacctgtgctccttggcagtttatgttgaagataactaaagatttttctctttgggaggcatcaaaatgatggtagtttgcttttatctttttatgttcattttcttttagtaggtgacctttctgcattaagaactgtttttatcttttactaccttttcttttctcctttgtggagacagcatgacatgtcctgaaggtcacctttgcctttgaaaaaggtttgatggaggaattcacaggtgactgacaagtctttgaaaagaatgggatctgctcacttctggtctttttggccgggaactcctgattggtgttaaggtggtaatttcccccatataagatttagaatcactgagtttgagctagatgaaatttttaaaatttctggttgtctcattagactgatgaggtgagttttcttcttcatatgaacagctagttaataacagcagagttctcactcagtgctcagtacttaattttccactgcaccacaactgtcttaactaaatgtgctgtatttttctttaaaagttaagagttctatttggtgttttcaggaatatacgtgaaaagacatgccatgttttggtaaataccatcagagttgtgtaaaggcgtgtactaagtgcaatcttaatttgtggaaataatcttcatttacccctcctaaaactacactcagtataaacactttcccataaggtgtgtgcagtaaaaatgttatattactccaacactggcaggagcacagcacagcagccttattggagagagccttataaaagtgattaaatggaggcattgagctcattacctttaagtttactttgtgctgacctttgttcctgttttgagaatctcatataattattaaaaaaaaaaaacaattaaaacgaaacggcggggcctagctgtgtataaatgatccttgctgaatatcttaaggttttttgtaagaaaaaagaaaaaccaacaaaaaaagcttattttcacattaaaatgaaacctcttttgcaacttaagaattctatggaaaagcagtttttatcatattttgtgtccatgcaccatttttcttaaaatggcttacaaaa

SEQ ID NO: 98239 - DNA, 1107 bp, Homo sapiens
acaagacaagactgctctgacgcctaaaatcctattcacaaatacgagaaacccataaatgttttagctgggtatttgtttcctacattattcttcaccttacctaatgataccaaaataataaaggtacagaggaaataagatgggcttgaaaagtgagaaaagctgaaacatcattttgggtattgtgaagacaaacttacttgctaccctcagatacatcattagaaaattcttttataatctaggctctcatagcaacaaagcacaggctagttagtggtttgtcttttagattcacttctgaccagtctgcaatattttttagtcaacacccatcttcagtgtttgtctgttgaattaaaaaaactgtacattaacagaattagatttggagaaaagtggtaagaaaaccccaggtgcgagtggagcaaaaacaggattagaaagttcttaattagaacagctgtcttcagggaagaaacttgagatcaaatttaaagctcaacattttaaatctttgaaaatttaaaaagacgacttcttcagtaataaaaggcagctccctggtttagagcaacagaaaagtcagattatccctaacacgtaaactcaagataccaccttagaaaaagaggttatttatataaataagttaacaagacacctgaatatactttgtgggattttatttaggtcaagttcttagtacacggcaacaattccaaatacaattaaaaaattaaaaagtgatgttcctccactcatctggaggtggtttaatggcacacaaggaacattactggcaacagactgctccctcaagttcccctggatggtttttactcaactcataataccaccaactctccctctgggagctaaaagtacaactggccagatcacaaattgtttacattcttttttgtaagccattttaagaaaaatggtgcatggacacaaaatatgataaaaactgcttttccatagaattcttaagttgcaaaagaggtttcattttaatgtgaaaataagctttttttgttggtttttcttttttcttacaaaaaaccttaagatattcagcaaggatcatttatacacagc

SEQ ID NO: 98240 - DNA, 1027 bp, Homo sapiens
gatggtgaacactacatattttatagatggttaagttgagaattaattatgtttatcatggatggctactaataccaagctcatgattgttgcagcctcaacgtcttaggcagtaaaacttgtctgcagcactaaagggggagaaacccttatattttgcaaactgtccattcgttaaatttattgtaacctaataccaaaaactgccgtttttcatattatttccccacctcctacttttttttttttttttgctacttgtaaaataaccccttctagaaaataagcattaactggaatgtttcaaacaattttgcttcattttactatcagccactagtgaactcttacagagatgtacatttaagataaaattagcttgtgctaagtgttttaaaaacattgtttactgttaaaggggaattgcacattatatttaactgggattgctccctccctcagttctttaaaaaacaagagtcaaggctcacaccaacttgtaggctgtgggagctttgccataggtagatacaatgtagaagtatacttttttaaagcatgaagaagacaaggaacttcattataatgtaccaggtagaggacattattattcaaaggattatgcacagctcagtgaagatgaagttacaatttttctcgcagctttgttgctattattttcttctgcataaatgtatgctcatttcattatgtgccttgctccctgattgtgcaaagctatatatatatatatatatatatagatagatagatagatatatgagagagatatattcagtactactgaggatgtttttctgaggatgtttttgttctgctggattaagttattttccaagttactcttgccagttatgtcagtaaactattgtaatggcttagcacactagtcgtacagtcagtgtaaatgtttttcatttacatgttttcattatatcagcttatcaaatccttaataaaaaaaattcatagatttcatttaaacatggggactttgagtgtttgt

SEQ ID NO: 98241 - DNA, 1052 bp, Homo sapiens
cttgggaagagtaactattcttaaggtttttacagatacccaccttagttgtaaattggatagtttatatttctgggactttttaaatgaaaatgtggaatgttaagttacaaaagacttttcatcagaaaatttcaaacaaagtaaacatggcgttttatagtcctctaaaatctaggtgctcccacccaccaaaggcatatcctgcaaagggctgtgaactatcttggtgaactgtcttgggtcccctttccatgtatgttttcttgtcactgaaaacaaacaacgctgagtttatcaagaaaatttaaattgggggatcataataattccaaccaagtgacaactctgacatcaaggttattaggagctgtacatccaattcaagttttatttgctgctattctgggagaataaacttgtatatggagaataaactaataaacttgtatcgaggaaatccataaagttataaattagcctgaaaaatatttcaggtaatggtgtggattggcctgctttgactctcagccaccaacagaaatctttgtcacctttgttcctcagctaaaagtaattttgttataaacacaaagtgactttaaacaggtaaaaaacccattcctatttttgtacattaccaaaagtttttcatatacctacagagctaactaattacaactgatttaatccactcaagtttagaccagttaaacccataggatcctgtatggttatcaatgtgatgccttgcttttcataaaataggtataattgggtcatacacttgacgagagggtgactgtttctaggggaagaaaaccctttagattgcaggtaactttcacttttttttttttaatatacactttacatttgtataaattatgcagggtactcctaaccctgtagaaatgtatgacctctcacaaagttgagatttgatccaaagagaaatgcaagtataaaagaattagatacttattatcttttaaggtttttttttttttttggtagagatgggggtctcactgtgttgcccaggctggtct

SEQ ID NO: 98242 - DNA, 3269 bp, Homo sapiens
aactcaatctttctggagtcaaccttcctggagttctccaacaagggtgtgtgtcagcaaaagcccctgttctgagtgggcgtggaaaggactccgtggtggaatttccttctcctccatccgattctgattttccaccccctccacctgaaacagagcttcctctgccccccattgagattccagcagttttctcgggaaacacctctccaaaagtggcagtcgttaatcctcaaccacaacaatggtctaaaatgtcagtgaagaaggcccctccacccacacgacccaaacggaatgatagcacccgcctcactcaagctgagatttctgagcagccaacaatggccacagttgtgccacaagtgcccacctctcccaaatccagccttagtgtccagcctggattcctggctgacctcaacaggacactgcaacgaaagtccatcactcggcacggctcactctcctcccgcatgtccagagcagaaccaacagccaccatggatgatatggcattgcctccaccaccccctgaactgctgtctgatcaacagaaggctggttacggaggcagtcatatatcaggctatgcaacgttgcggagaggaccccctcctgctccccccaaaagagaccagaacaccaagctctccagagactggtagccaccataggactttattttcatgatatctgtaatcactgctacaatcagctcacctgatcatctgtgaattcaggtgttcagagcctcctggtatgatgttattcaggtagtgtccagctatatgtgtatgtgtgtgtgtacacgtgcatgtacacacagctgtacagtgtgtgtatatatgtatacatatatgtatgtgtatgtgtatatagagagagagctgagagttattctatttattccttttctctcctaatctgaaaatgggtgttctgtattttgggtggaagaggcatagaaggggatgtgtgttgtctcttaagatttctatatcatgtggattggaccaaaaacttctaatcacttatttagaaggtatttataagtgtctgtccatgtgtagcctattcgtgcatgttgtgtattatataactaaggaatagatgtagaatgtgctatttctggttgagaaaaatcaccagaatgtttggtgtatctataaggcttttgtgtttgtttttccccagttggctgaagttagaattgcttgactgacacttcattgctatacatgaaggggcactttaaatcaggaaaatctctcagcttcatagaacgggtaactagtgcaggatggggaaatgttcacagacatcatctgtatgtggttgtgcatagaaagtaaatacatggcgtaattaactcagctgttctagctgcagtactgctgcagtgatccacccacatttaggatgtgctgacagataagctctttgcctacaatacatggataattagtgctataattctggatagttcctttttagtactgttttatgaagctttatcaacttggcttcatgatcctcactttgattgattttaagaggatggataacacagttatctctgtaatgttctgtcccagtatgtctttgggtcaccagttaccttcttaaaatatgtgctttaggtaggtgttattacatatctgtagacaattggtatatgaaatatacacatcctgtgccccaatatggtgcattatgaaaaacaaaatcattttctaaaatgcattttttgagcattgctctatagaagggaagggtgatgagagaacagaactggcccctgtacaggtgtcattaatctggttgtatatgggttataatatgtaatacaaaaagctcattaagtatgggactacatggagagggaagacagtttcatttatagctactggggctaccaggacccttgctgactgcagcctggttgtgattagttcaggttactaggtgttctgatggagtgggacagtccaagtccagtaactgacattacgttttatgcgtgtgcagtttggtataacgtggagtcagtgctctaacgacacactatacttctatatgcttttttctgtgaattttccttggtacatgagagaaataagtactctcatcaacttatgataaattggactattaggaataaaacaatctcagagcagctcctaaacaagagaataaaaatgggccatcccagcacttataaggggagcacatcttgtaatgaaagtctgtgcctattgttaatgattaccaatgcaaactgcagaaatcagttgacattgtcccacaaggaaaaagtgatgccagtaaagtgggggaagagatggtaaataattctagaatgagcaaaagtgcttaattagtacagtatactcaaggtcttgcataacccacactccacgaaaaccgcatcgtaaacagagagtgaacagcacctctccattgctacatctccagaatattgttcggttatgttcatgtggttatggagcaataagaatatataccattaatttttaggtctttcaaattgttcaccaagttttgtgtttgatatttatgaagtgatctttaacacatctgcattgttaatttaagcatgcacagaaatttgggtaatgtttgagtagattgccaagcgctactgtgattcatgaatgaatttctcatagtcttctgcctgcagttttatagtttgaggggcacccatatttgtgggttagagttagtaagaatatgaatccagttatcaaagtattcatccctgaggttttgagttttattgtggtggtgattttctcatgagaaggtagacaacacttcagtttttcttgagggggaaaaaatgtacccgctaaccttttttcacccatgatttgagccctaaaacaacagcctttatgttttcagtgcaggatttcttggaatttcttgcttgtatcaatcctgatgatagccatcctgaacagatgcttctggtctgttttcctggaatagcagacatccttttgaacactaatgatgccaggaagagagtaaggctagaggaggagactcattttaaccccagtccagtggcttgtccgacaacaggccatttccctttacattcctccacagacagaaatggctattaaaaatgttttaacctcatgtatgaactgaatttaaaaaaccactaaagtgatactttatacttctgttttactccctagtgggttttctttaatttggatttttgttgggat

SEQ ID NO: 98243 - DNA, 2814 bp, Homo sapiens
tattcagactcattccttaccttttttttttttaatgcttttgccatttctttgggcattgatgaattttttcaaattatactttatgtggaagactaaattaaaatcatttcccttaaaagttttggattcctgagccttgcatagtatattgtgcagtgagactgaaggatgagtatagttattgcaagactataattaggaaaatagagaggttcttcagttcatttgaaagacatcatggccttctatcagacatcatctgtagttgtgtaggcaaggatgtgtcctggctgtagtcaccatttcaatatgcaagaggtcactccatcattgaggaaccagtggcaccctgggctcaactattttatttttactaataattgtttttatttatttatttaattttttggtggggggtgcttttggtctgaatcacttatacaggtacattcacgaatgagaataaatggacatttttccttttattccttcattcgtatatgtggttcactaactgggctcccgcagggaagagaaggccttagtagcaccatgtggggctgaagccctttccttcagaaatgagcatttgagaattggttctaacgatctaaattctcaaaacactgagtttaactcccttattagagactcaaacttttaagaaataatttctctctcccttcccccatttaatcaatttggatggagctagtattttaaaaatgtactaaagaagttggtttacagaattcggatggctaaagaaaaacccctttgccttaccaaattactaatggtgagatccgtgtgcattttaagttatagaacctagttatgtgtaaggccaaggaaaacaaaatcacagacccaaaatgttctgtgattaagcagcaaagtccgttattgcacagagtttcagaagagtaggaaccctgctgtcagcagtaatgctttaaggcttgatcactctgtatttcttctcctgttacctcagtctcaggtgccaaatgagaaggccagcacagctaaggcctgcgcccctgaagcagccaagacagggtcaagttaaggtcaggggttgttctctggaaacacattaacctcggtgacgcctgtatcccaatctcacagactaatctttttgtgtaattttaaaagaaacatgtgaatgtccggatggctattagaattcagccctataatgagccttctagttcactaacccatgcattctcgatgtcattcaaaattgaaaacaaatggtttatcttggatcctcaaagtttgttcaaagagcctaaaagatgtacctaaagtttttaaaacaagggtccttcctttcctcttttcaaagtacctgaaccaccatcgtgcatgattagctccacgaaataaactaccagatgtgatcatttcagctacccagatgggttggttgttggcaaatgctagctgccatttcttgatacattttctttattctagccttccagagcttcctcttaatttcttctggctttttctgtatgatatttttacagtcttttgctataatgtttacaaagcatttctttatgtattttccagtaaaacaaatgtaaagaatgtcccccctttacctgcattgctggacttctgtgcatgttggatgcaattgtctcacaccaacacgagtgtgtgtgtcaagcttattcattcctgtgtgactgtgcacgcctgctcaacattctcatactctcctgtgtcagcttactagcatcaaaaagccatcctcattccaccaggaagccctcctaaacccagttatagcatctgcttgatgtggatgcagtcatggactgaaaggtaaactggagccatcacatctccccttggaagtccagtgctcagaggaccgccacagagggttccatgtagggcaggctgtgtcaaagtcatacagccaaggtcagaagtcatgcatcctgtcaccattcaaacagcttttgcagccggacatttttcctagattgttagatggtctagctattttactgtggggtaaaacaagttttctgtttccttcttgcccgcacaatcagattttagccttcctgacattgtccatctttatgatcaccaccaacttctgcatccttttcatgcatgtcccagactccctgctttttagttttacacaatcaaagcttacctctgtaactgttttgtttgttgtgtttttctctctcccactccctttttatactccttttaggccagaatggagtctatgaatcggccctacacttcacttgtgccccctttatccccgcaacctaagatagtcaccccctacactgcttcacagccttcaccacctctacctcctccgccacccccacctcctcctccaccaccccctccaccaccccctcctcccccactccccagccagtctgcaccttctgcaggctcagcagccccaatgttcgtcaagtacagcacaataacacggctacagaatgcgtctcagcattcaggggccctgtttaagccgccaacacccccagtgatgcagtcacagtcagtgaagcctcagatcctggtaccccccaatggagttgttccaccaccccctccccctcctccacccccaaccccaggctctgccatggcccagctaaagcctgcaccgtgtgccccatcccttccacagttcagtgccccgcctcctccactgaagatccatcaagttcagcatattactcaggtggctcccccaacaccccccccacctcctcctatccctgcacccctccctccccaagc

SEQ ID NO: 98244 - DNA, 1336 bp, Homo sapiens
actctgttaaccttgatgaactttgtttctttgaaatgtagaaggaacgtttgggaatttctcaagatgtgaagatctattttaacttggatatcttgatctaaaatttcacaaaagtttctttctcatttactttgtaaaaattcttatgggctactttatttggccttatggccatataagaagcataaatgtattggccattactctaatggcctataacttgtcaggatatgtttaagctttgataaagtttgtttttctttagttctccaagggacttagttggattttgtctttaatcttgcagcatccacaaatccagaagaaatctcaatatatcaaatacctttgttgtgatgatgtgaggacactgcatcagtgggtcaatgggatccgcattgcaaaggcatgtctccttttgatttgatgatggaataatgaggtgtttgtcgatgatatagttttcgttttcatgacaactattctgactatttcatgttcatggatttgccagtgcctacgtttttcaggcctaagtttcaagttttaaatgttgtcttttttccttgtttatagggataaacttttaacatttggtatacttggaataatattgctggtaaaagcttgtgtagtatcaaagtgatttattttggctttggagaatgcattatatgattcttaaatagtagagtttagcctaagcaaagtaagttttggaaaaattaaattactttaagtaatgatcatttaccaaccacatttggagcagtatcctgaagagtgctaaaaagctgcccttggatcaagaatttggggtgaaaaaacattaatgtttataacaaacagaatcaagtgttgacttcttgctgcccctctaaaaatgaggagaaataagaatagattataatttatggtattagaggaatttttgaactatcataggtattaattttaatacagaccatcaatcagtaaacagaaatatgtcccccatttcaccttatccttctgtatcatactcagtaaagtttagatgtcaccatttcctgtcttctctttagtatgggaagcagctctatatgaactaccaagaagccttgaagaggacagagtcagcctatgattggacttccttatccagctccagcattaaatcgggatccagttcttccagcatcccaggtagttcaaaatgcttcaaagcactattttgcgattaatatgaaggtctctgtagagactgatagtagacctggaaatttcaacttgattcttaaaaaccggagccatacttaattcctaaattataatcaatagatgcctttttaaa

SEQ ID NO: 98245 - DNA, 1325 bp, Homo sapiens
ttcttacttctctggtcactagttgagcctatctcagttctctttaccaaatttgaaatcatagttttatttgttgttttttggggactctttctggagtagttttgtttatttttgtttgggaagaacagcacagctctctgggattacaggcttttttatcttgtttgggtaatatgcttcttctgctaagggccaccctggtgtagctatcacttcggtgcttattggcaccaggactgttttaaacttttttacagtattatctcatctagtcttcacaatagtcctatgagcatatattgttgcccctatttaactggtgaaaacctccccccaaccagttgcgaatcactatactttacatatgcattataggcactgaacgacttgatattttcttgttctttccagagagctctattatacattattgtttttaatgtactagactatattaatagtatctttaaaatgccaacactccttaacaagttagtgttcattgtgaatgacaaaacagtaagtaaaatgggctgcttttttgttacgttaatgattaaagaagaaacatttatggagcatctcattgtctcgtgtaaatagcaataatttctatttagtattagcaaaagtagttttgattctcacctagaaaatgttaaccaggtatatttgcttgtttgtgcattattattaattttatctttttggtgtttttatcttaggtctctcgggatctggtgtgctttctccagctggatcatgtcaacgtttattatggccaggactatcggaacaaatacaaagcacctacagactattgtctggtgctgaaggtaaacacatatttctttttaggaattttaattgatgttagacatagagcaggttattggatattttagaactgttgagattccatcaattatactgtttttgctttattctcaaagtttaaaaaggaatggtgaagtgtggtaaggaaaagaagcatgtgctatatcatagcagaccctgggccaattatctctaggtaaggagtgaatattagattgtaagctttgagttgtgagatataaaatgtatttgattataaatttgagattctcatttaacaccaggcttattttaggaaaacttagaacagagccgaatgtaggtcataaatgtgctttagttcttttcctgtacttactcagcaaaccatcagagggcactgtgtccaagttcaaatcagactggctgttatctggtccagaaataatttttgtctctttttttccctgaactatagtcatgatagcccatgtatgtattgtgac

SEQ ID NO: 98246 - DNA, 1123 bp, Homo sapiens
tattatgttaacttgaatttgtactgaagtctttaaaccagcatttgactcgggaaacaaagcacattaacaaatttcaaagaatccatatctagaacgtgttctttaacatatgttcagtatacaggacatgttctttcatttctaatttggaaattagaaaatacatatatgtttaagattaaacaacagtcatggatcaaagaagaaatcatcttggaaatgttttaaatgccaagaactaaataggaaatacttgatatcgaaacttataagatgtaactaatgttttatttttaagggtgggatgggaaaatgtttaagactgaagaatggtgtcctgcaagtcagaaagcctagattctagtcctagttcttccatatatcagctgtgtgaccttggttatgtcattaacataattaaggcatatttctttgtttgaaaaattagggaataccagataatttttaggtgctaaaatgtcggttaagattatgtggttctgaggttaactacttcacaaagtttcatgtctttcatgcaactctaatgaatactaacaaaatacggatattttattttgggacagagagaatctttgaagaccatgaaaacttggttgaaaatcttcttaattggacaagagatagccaaaacaagcttatatttatggagcgtatagaaaaatatgcacttttcaaaaacccacaggtaagaccaaacaacttacagaggtcaggatttgtaaatatgtctcctattttattcgattactgctaagttagagttaaaagactggtaaacacctggttggagcgatatacctgcaaaatcctataggagcatcatctactactgctgctgctgctgctgctgaggtggaaagtcagctggtgcccacgtgttaggccctaaagaggttcccagtcctccagaaccagatggggtgagccgttttggaagcagaagtatagctctagtgagttaccaggtcttttggctctgtaatccagagctgtgttgaacccagctgtttatttggtgagtttgtcatctcatcaaagaaaagtacttctctactccagccatttatccagttgacacttcttttggaattacttt

SEQ ID NO: 98247 - DNA, 1032 bp, Homo sapiens
aaaaggtgatatgtgggcctcttcctggtttgggatttttttatcagttttttggatttgtgaagaattgccttgtttatgtaatgtacttctaagatatggagagatacaggggcatttcttcctagtaatatatttttcacatgtagtattttttgtgggtaaaatgcattataaaaggagtaattttctggttctgaattctcctaaaggagtaatcataacattataaccttatctgttatatttttaaaatgctttaaatttacttacaggttatttgatgtctgatttttagcctatatttttgcataatgaagtcattatttgtgttttaatttatatacaaatacattaatccaaattttatttgatattggatcagtgcctttcctagaatgccattttttagtgttcatttacttttctttttacctgttatagctggtgatcagagtccacatgtctgatgacagttctaaaacaatgatggtggatgagaggcagacagtaagacaagtactggataacctgatggacaaatcccactgcggttatagtttagactggtcactggtagaaaccgtttctgaattacaaatgggttagtaatatcattgctttaattgctttctaatttttgtgtaatttcatcagttttcatgctgataaaaacattttgagttatctttatatatatatatatgtttttattttattttattttaattttttgggggatggagtctcgctctgtcacctagactgaagtgcaatggcacgatctcgggtcactgcagcctctgcctcctgggttcaagcaattatcctgcctcagcctcctgagtagctgggactacaggcgtgcaccaccacgcctggctaatattttgtattttttagtagagatggggtttcacctgttggccaggatggtcttgatctcctgaccttgtgatccacctgccttggcctcccaaagtgctgggattacaggcgtgaaccaccacgcctggcctcatctttatatat

SEQ ID NO: 98248 - DNA, 1011 bp, Homo sapiens
cctagaaggcagactggctctgcagtctgcatgtactacccattttcccaaagagggagggatcagcaggagtcagctgggacacgcctactggcacggatgatgtctttacctccctgctccttttctttttctttttttacattttctttgtggagatatttcactcaacttagggaaaagatatgagattaattatagagaatcattcttgctttgtctactttatgttttaaacacataaaacctccactgacttctgttattgcctttttttgtttgtttttctcttttctgaacaagcactcctatctggacagggaaacctcccttcttctgagaaacattgcaggaaaaccttctcatttgctgaccaaggtgatacttcttccacatgcatgtaactatttactgccttgtaggtagaatatgatttctgtttttgatcatgctcttatattattattttcttactctagcatctttgtcattaatatactttttcttttacagatggtaattatttactgatcttaatgactgtcaggcaatattgagagtacaaaatattttcagtaattttcattagtttttaaacttttgtaaatgcctaatagtcttcccaagtatgttgcactttttctagtttaacactgttgcattttaaagtctaaaaaacattgctttaattgtaacttttactgctaatggttgtccatactctgggtttctttagcaaactttgcttcctagttcttgtttatattatcacctcctcatttaattaaaacatttactcatataaacagaatcttagttaatattaacttagtcaaattgaaagaggaagctgcaattttaattgcccggttctctgcccttggaatgttttgaatcagtccagccagattttcactgggctggtattttatatccatttgaaatattttagccattgtcatcattaactagggaataatacagtagggaagctgagttgctttctacctc

SEQ ID NO: 98249 - DNA, 1836 bp, Homo sapiens
tacatagtaattgtgtagcagtacatgtttacccattatatttgaatagctaaaaatgaatgggaataagagcaatgaaagttatagttgctcttttatttttaagtgaaagcaagtttattagagaagtaaagaaacgtggctgggcacagtggctcacgcctataatctcagcactttgggaggccaaggcgggcggatcaccttaggtcaggagttcaagaccagcctggctaacatggcgaaactctgtctctaataaaaatacaaaattagccgagtgtggtggcccatgcctgtgatcccagctactcaggaggctgaggcaggagaagcgcctgaagctgggaggcagaggttgcagtgagctgagatcacgccactgccctccagtctgggtgagagagggagactctgtctcaaaaaaataaaaaaaaaaaaaaagaactaaagaaaccaaagaatggctactcttacaaattgtgctttttgttctttgtttttcccaattccctccctcctccttggctgtgcattaacctcaaactaaattgaattttcagaaattactacttacctagtgtctttatggaggagccaatcagtcttacctttaggaggactacacaatctagttaaatgaggacctagggatagttctctatgttcttgttattgtttgactttgttagtgctaatcttgatgaatatgtccaattaaaaaaattggaccttaggtttctttttttttttttaaagaatgggtgagaggggcatttatgcttataaagtttaccttgcattaaaacacagctttaaaaatgcagacaataaaataccatatagcaaacttaacatagtatagatgtgagcaaagattatattgtcttctgtaacatgtttttaatcttgaagtagtgtattttatctatgaccgtgtatgtactttttttttttcttgagacaagagtttcacttgtcgcccaggctagagtgcaatggcacaatttcggctcactgaaacctctgcctcccaagttcaagcgattcttctgcagcagcctgctgagtggctgggattacaggctcctgccagcacacccagctaatttttgtatttttagtagaaacggggtttcaccatgttgaccaagctggtcttaaactcctgacctcaagagatctgcctgccttggcctcccaaagtgctaggggccatgtactttcttatagggggtgctgctctagtatttgtttgcattagtttctttccaaagaatttccaagaataacttaacctgtatttagatttataaaatataacaatattttctatacttttactcagctgtattgtacatttttttaaatggtgataagtaactatgtactgttaaatactaatttggaattttttcatgagaggccagtccaaattacatgtatatatcaaaacaactacaatttaaggataaatgaaatacaattgtattaacttatcttacaacatgttactgaaaagttaaggggagaatgatagggaccatgccatttacaaattattttcacgaaaacagttacttgaattaatttaagtgtgtgacacttctgaatattttgttcatgtcattcatttgctctgcaaattctttactgtgcagtatactcctatttttattctgataataatgagtgggttaataaagttttactgaaaacaggtgtgtccattaggcaaaatattgatggatatttttcgtcttggtgcagctatcattgaattgatcagaaatacttggataagcttttaaaaatgatgtcgtcttattctaaccg

SEQ ID NO: 98250 - DNA, 1054 bp, Homo sapiens
cccatctctgcgactctccgtgtaaggacatttaacaattgtggaatgtgggacttttgttgttactgacattgtaccatgcttgcaaggcatcttgcattttcaacttcccaataaataccagtaactctccctctcctcttcattgtggcagcccagaatgtccttaacattttctgaaattcctgcttgaggacagagctaccctcttttgagaaccactggtctcaaatatccctttgccctctttctaccctgccacactccctcacactgcgaccccagcagcctcttaatcatcctccaggactgtagctttttcagaattactttattaagccgctaatttggggttagatacccgtctccttgctcacctaccacttaacacactgttttgtagttgcaagttggtctgcatctccctatttagactacattctgtgaggcaaggaatgcccatcttggtcacctttgcatctctaatgctggcatggttccacactcaaaagttggagcctaaaaaatggttgaatacatgaagaggaaaacagagaaataaaataaatcaataaaatggattgaaaataagcccttgactttgtgtctatagttggtaaataaaagaaaatataagaaggccctgtttatatgaagctgtatgcatttttattaactcacaacataaaccaagactgaagcctgattggatgccatgcccaaaccataatttttttttaattaaacgtttaaaatatatttctaaacagaatggccttactcagttacagtaagatctccatagcagagcaacccacaaagacacagcactgatttttttcccctgtaatcaagggtgaaaaatatacaacttgtttctgaaccaaaaccacaatttctgcagtttaaaatgtttcactgataatacggccctggtagaaattatgtagttttaaaactacataatttactctccttagtccttcagctgtgcaccactcttctcatccctcttgcatccttccagtaaccagtttcaccccacccctgcccc

SEQ ID NO: 98251 - DNA, 1016 bp, Homo sapiens
atcacaccactgtactccagcctgagtgacggagcaagacttaaaaaaacaaaaacaacaaaatttatttgtatttattacttgttaaaattttggatatttttggttaactaaaatatatgaatatttcagttttttctttttatactttttaaaattaatgtggctaacaaaattttaaattacctttgtgatgatttctaacaccatctttactgtccaagtgaaatttgtaaataatataacctacttacatacctacttttttatatgaatgtaatgccccaacacctatgaaggagaaataatgaaaaagaaatttataataaataatatatctgttttagtatgtaaatgcttagctgccactattaaaagacataatgaagtagtcaaaccttacacctacctataatcaagaactttgggtttaagagaagtgagatcagaagcctttttttttttttttttatacaagaagtgtaggaaaaagaacagaaatatgagtggaccccagaactgaaacatgttataagtgatagcagataatgacatacttgtatatactatgagaaaaagggaaataatcttaattgaagtagggataatgtgctgagacagtttataggcaagtagagaaaatgggagcatgtaaaattcttgcaaatgagataagattatttataattgtaatgacaaaataatttcagtgttataatgtgggatgagatggtagtaataaaatcatttgatatctgattttttttacagtgtagatttttcatcatgctatatattttatttctttttttttgagacggagtctcgctctgtcacccaggctggagtgcagtggcgcgatcttggctcactgcaagctccacctcccaggttcatgccattctcctgcctcagcctcccaagtaggtgagactacaggcacccgccacctcgcccagctaattttttgtatttttaatagagacggggtttcaccatgttagccaggatggtat

SEQ ID NO: 98252 - DNA, 1051 bp, Homo sapiens
gcatgcaacttttcattactattttgtttcattactgttttgtttcacttcattgatctttttctcttcctgcatggtaatgagaactgcccgtttcacctcctttacctatcattttcttccttactgcattttcacagcatgctatttctctgagatgttccagcaagcaggccaagcgtcatattgacttcacagaagaacaggctgagctgacacctgtaagttctataaacatgccatggcatgacttaatgaagaggaatgcattcattagacctccaaatgatgaaaccttttcatataacttcagtttttcaaataaaaattaaaccaaacttaataaattagcaaaaacaaataagcaactttagatatggtacaactgaatattaatactcctggtatgattatgtaggtggtagcataattgatatagatgatttttgtattagaacctgaaacaacatgccttctttattctgaaactaagggcttttgtaaatttcttaagatactaacaaattgaattgttctttacagcagagctaccaaatggaatgattcttctgcactgatgcttaactgaaagcctagtttctttcttaaaaaaatttattctttggtcattttttttgccatgccatttgccatggttggcaaatctggatgcttcagaggtgtactgtcccatacggtagccactagccacgtgtgcctattaaatatttaaaatgtggttaatctgaattgtgtgctgtaaggataaaatacatactggacttcaaagacttactatgaaacaaaaatgtaaaaaaaatctcgtggccgggtgtgttggctcatacctgtaatcccagcactttgggaggccgaggtgggcagattacttgaggccaggagttcaagaccagcctggccaacatgacgaaaccccatttctactaaaaatacaaaaattagccaggcttggtggcacatgcctgtaatcccagctactcaggaggctgaggcagaagaattgcttgaacccaagaggcggaggctgcag

SEQ ID NO: 98253 - DNA, 1670 bp, Homo sapiens
agttattcatgaacagatttttaaaagatggaatttttttcagcatgtgactggataagatagggaatagatttgcggtaacaagttcaacaaaagctgagtttggtgaaagagaattctttattgagttgttttcatcaaagagatggtaattctgtcatagggtagcagcaagaaagaagaaaaatggggcaaagttaagtcaacctttccaataagcttgtgttgacaatattctaatatgggataaaagaatctatttatgaataatcagtactaaagtaaaatcttgaattttaactattacttgacatcattgatttttttttcgtaacttatttaattctttggattaatttccatcagtaggtaactcttggtacccacccatgtgcgtagctttgtttttggtactgtggagcacaaaaggagtatgaatcatggtggtttggagataaacttgagttatttcaaagaaagcgaatcttatcaatctgaagaataaactttcatttatttaaaatgaaacttatctaagtggtatatattctatagagaacttgaaaactgatttctaggccggacgtggtggctcacacctgtaatcccaacactttgggaggccgaggcgggcggatcacctgaggtcaggagtttgagaccaccctggccaacatggtgaaaccctgtctctactaaaaatacaaaaaaaaattagttggatgtggtggcgcatgcctgtaatcccagctgctcgggagggtgaggtaggagaatcgcttgaaccagggagtcggaggttgcagtgagccaagatcgtgccactgcactccagcctggcaacagcaagactccgtctacaaaaaaaaaaggaaaaaaaaaactgatttctattttgtgatacctgggaattatatttagccaccagctacttaatatgtatcatttcatgtcctttagatttacctgctaggatatgagcaatattttattagggatgtgctttcttggccattctttgttttgtatgttgatattccttccaatcagtttacagtattttgagttggattaagatgcgtgagggacaagttataaactaatcattaaggatcttctaataccgtatgcatgtctttctgtctgtaaaatgtgctcattataaaagttcatacagtataggggcaaattgaagtaaaacgtgaaaagttcctctctcccagcaagcgcacttcaaatggtatctagtggtatccatgggtatcactgtgaatactgcaaagataccagtgctcaatggtataatgtttaatataagagtttaatgtaaggtttggtgagtaaaccaggactatagcagggaaaggagttaaaaagccttatctagctagcctgttcttttgcctcacctaggagtatagaaaggtggtttaacaaacccggaacttgcttccatttgcttttttcctaggtctagtctgttctgattcaaataaagtaaactgaggcaagcttaatatatcctgaactcatgtatcaaattgtctttaagtgcaaatacagttttaaaaatattttagtttttcatgcatggcgttaaatagttctatgagatatgttacggaaaactatcctctactcacatacacatcatattctgcttccagagg

SEQ ID NO: 98254 - DNA, 1208 bp, Homo sapiens
gtgaagttacttcttagtaatttttaaagcagccactgtggcctttatctgttgtattccacctagtcaagtttataatattgacctgtcagtctgtaattttttagacttttgacttctctttttatgccctcagctctttcagtattgacatctctaccaaagcattgatcatattaacaatatattgaagcctgtggtaaaaagttgcacagaggaatgtggttaaaaccatggaacagtataagatttttgtagtgtttttgtctttgaactcataatttattctcctctgattattacaagccttaaaagaggaggactgtgtacttctaaaaatttatcttggaatttaaaacaaaaaccagaaatacttaattttatttgctttaggcccaacaaaatatattcttttgcttcatcacctgcatttattaactgatttataatagaatgtataaattctggaaacattatgtgttgttcattgcagaagctctgaatcagggagagactgtggatctggatgccttgatggctgatctttgctctatagagcaggagctcagcagcattggttcaggaaacagtaagcgtcaaatcacagaaacgaaagctactcagaaattgcctgttagccgacatacattgaaacatggcaccttgaaaggattatcttcttcatctaataggatagctaaaccttcccatgccagctactccttggacgacgtcactgcacagttagaacaggcctctttgagtatggatgaggctgctcagcaatctgtactagaagatactaaacccttagtaactaatcagcacagaagaaccgcgtcagcaggcacagtgagtgatgctgaagtacactctattagtaattcctcccattccagcatcacttccgcagcctccagcatggactctttggatattgataaagtaacacgccctcaagagctggatttgacacatcaagggcagccaattactgaggtaaataaatggaactttttccctggtattttgttattaaaataaaggagaaattatattaaaataattttaattaacttcttaaattcttctacatttataatttgtcaaagatacttctgagataggtttcaagagtacagaaggaatatattatcagatatggtagtggcacaaagatgatttagaagaaatttagtttctttttt

SEQ ID NO: 98255 - DNA, 1037 bp, Homo sapiens
ttttttttaacacattgaagaccatagtgctacatggttatacgtggctaattttgggggtgcgatggggcagaaattcctaagaataaagcttttccttttattgtttaaaacatttggatcagtgtatttgaagagtatcctgaagactgtagatgggactgttaagagctgcaactgcttacctgggtgaaatcaaaacaaagcatacaaaaataaatggattgtttaacatctctaacccttagtttatctctttatttgagtttacaataaattaacataatgtatttgaacataaaatagcaatgcttttgccagctttatatatttgagaggctgtgtaaaatttcatctggatgagttttgttgtgaaatagtttttaaaactccagactgtatgatctctaaagctttttcatatgctcttcttgctattaaggtatttttcatgctttaaggcagatgtcttaaactatatcacttatgtcttataaattggctttttgaaaagtatatatgtatttgctcttaataaaatgcatactgtttttctgctctaagcagagctaggcataatagagaaatctaagataggtattctgttctccacaatagagaggatgccagtttaggtataaaatacgaggaatcagtagaagatgacactgaagacgcagggaccacaaagaagcagaagggtctttgagttgaaaatgggtgaacagataaagtttacaaaaggaggaacaagtcatccctttagatgagaagaaaaacaagatcaggaagccaaggatttaccattatgttagactattaaaatttaagccccatggtgaagaatggtgatagctagcaaaaattggactgtaaacatattcagtaggcccagtattattgtagaatcttaagtcaattttgcaatggtatttaaaactttggccgggtgcagtggctcatgcctgtaatcccagcactttgggaagccaaggtgggtggattgcctgaggtggggagtttgacaccagcctgac

SEQ ID NO: 98256 - DNA, 1027 bp, Homo sapiens
ggaggacctttgggggaggggcaaaatagagacgctcaatagcttttaactcttgttgagtctgaccttcaaagattgtctccgttattttgctttttgtgtggtgaatttcccagaaaccagatgcagccctactcaagtaagtacaaaaagcttaattcatgattttttgggttagacattttgtataatttagattgctgtctcctgtttgaatgtaataaagaattatttgtagatgttgccttatgataaacgttagctttatttggtagaagcagcagcttatttttcagactcagaggtctcactaagattatagagtatgtgactgggtgaaaggagtggagtagtgggcactattgggtgtgttttcacaaatatttaactctttattttccaaagaggtgtttttaaccattgtctttgaggatgattatgtcttttggttttgctgccctttggtgctcaccccataaatacttactagattggcatcgtggataactgtcacactattcacagattcttggttacacattgtagaatctcatggctttggttgccttggtttggaagtaattgaatgtcaacattagtattgttaatcccaaacacttaattttaggaaaattaatattagtgaagcaagatgtgacctcaggcagataacttatcttggactcttaattcctttacctataaaatgagaagtttggattagatcactgcttcttaaactgtttcactgaacttgagaatttcagagattctgcagatgtttgactttaatctcaataaaaatgtattttaaacttataataataaaaagtggccactgtatgacgtacactgttttaaacactttatatgtgataatttatttaattctcgccataaccctatgaaatagagtctattatttgagaaaataggcacagacaataagttgcccaaagactgcagagctatagtggcagagctggatttgaaaccgggcagcctaattcttaagcttgtattctta

SEQ ID NO: 98257 - DNA, 1016 bp, Homo sapiens
cttaagaggacaactattcctttctcccaggactactgtgagaaccaaatgatatcatatatataaagcactaaacatggaacctggcaaatcgtaggctctaagcaagtgttacccaatctcatatccagtacagggagggcaaacctttgtcctttcccatttggcagttatggcctctgggctgaagatttgtaactctgccaatgcctgagcacctgtggagggtctggaaggatccctgggtgttggtttggttcagagcaacagtggtggagccccatgacctggttttgaaaccatgcatcatcacttcctagcacggacaactttctaaacctctctgtgcttccgcttcctcatttgtaaaatgggaataagagtacctgtctgttactcctattgtgggtgtaatgaaatcatccatgtgacacacttggagcagtgcctgatacattgaaagccctcaatgagtataagtgagtgaagtgacagggcacaagatttgaaatcaattggccgagcgccaccattttctggctgttggactttgagcaagttattattgccatcaaaagtaattgcaaaaaccacaattacttttgcaccgacatcacacaagctgactagatcccagtcttcatctgtgaaatggggctaatccccactttcaagcactcctttgagagcaaatgaaggttatgaatgaaggtggtgctcagagcaggctgcttccctgccagggttatagtccagccaatggactgaatgtgcttggctgtcctaggactgtacccagccttcataattctctcaattccaaacacaggcctgccaacgaacgtttagaacccaagttcactgtgaattgggacatgcctgcatctcatctgtccattctcttcaggtgctggggtcatgctttgctctcagcaggcattaccacttcattttgtttctttcctgtaaaggggaatacatattttatttaaaagttactcatcttgctctctggg

SEQ ID NO: 98258 - DNA, 1043 bp, Homo sapiens
gcctctgcattttccgcctccagttctttgaaatttcatgatgtctgtgggtttttaaaccatttattgtcctgtgcactttgagcatttattagagcctttcaatctgtagattttcagttttgggaaacattatttctttatccttcgcctattctcaagacacacagtttttcagttgttctctttctggttctgttattgcgttttggaccttctggagcactcttctaattttcttttttttggccacctattttccctttctttgtctttttgttgtattctctgtaacattttctaaggtttatcttaactttctattgactttaaattttgccatcaaaagttttatttttaagagctctttgttgctttatgaactttgttttattccttttaagcatagctattgtatgggtgcaatatttgttcatttctctgagggtataaaagtctttttgaagttttcttctgctgtttgccttattgatctttccttagggttatttattttttctttttatttatgttagtctcctctggcttttatggtacaggattcccacaaatgctgggtgaaccttacattgttcatatttgagtgagtctctagtctgtccttcgtgattggtggtggttttccctgtgaggtaattctgtgtcttgttgggccccttaaatgtctagatttataggtttggattttttttttaactgattcgtgtctctatagagcagcagttccttaaccattagtctcatgacctttttacacacttaaaaattgaggactttatagactagtactgtccaatagaaatataatgcaaatcaaaaatacaagctacatatgcaatttaaaagtttctagtagctacagtaagtttaaaaacgtaaagctgatatttcccaataaatccaaaatatttttaacatgtaactaatataaaaatcgagcaatattacatttttttatactgtctttaaaatccaatatatattttatacttagagtatatctcaattcagactaatcatat

SEQ ID NO: 98259 - DNA, 1017 bp, Homo sapiens
tttttagatacttaaagtataagtggttacgtcaatgcgtggtcttacagagtaacatagaggccatttttccaatggatttctttaaaattgtagcgttcctcctttttattttaagaacttggaagaaacatttgacactaacctcaaaatgtcgcttcaactgggtgcaatcctatttacatcaagaaactggagactatatttaaagcaaacaaatataaaaaagaaaaaccttgggcagtttaagaagtttctcagaactcagagtgaagtataataatcttttaagttattatccaatggcatgagatcataatgtggttaatactccagcttccccttagctgtgaagaagttttgcaattatcagttttcccaaaattatctcaaaaaataatgaagcccttgacctgacatatgactcttttcttctgactctttacccaagttataaagaagtgtctaggtgcccctggtgtagcaagtaaagcctggagactcccagggagccctgggcccctaaatggggcagactggggatatttcttgttcaccgaggaagtggggttgcttacgcttggacactgaaaacacatctgtgatatattcaatgtacttcatgtccaagcaatataaagacagtggtcctttacattgtgacattgaaatcacaatcactcctttctgaagtggctacatggctgtcaaaatcagggttctttaaacaagcttcagaacatgccactcttccctaacaagacagaataatttggtatatttaggaagattggaggttaagcgagtgagattcccggaggatttgtaagaacactgtagaagtgttgggggtgggggagataaatgtgatgagttagaaaaataagtaatttgcagatttagtgtgctgatgatttaaaaagtgctgtaatgaatgttacaataagacaagcaacaaagaataatgtgatagacaatgatacaataatgtttggggaggctccatgtcaaaggcat

SEQ ID NO: 98260 - DNA, 1125 bp, Homo sapiens
aaaaatcttattctggtggatgggattttctaatttagcatagtacatctcaaatataaaaggctaaaactcagttgaaatataaatgatgtttgggagcaagctacttagggaatgcatgaataatgcttgttgcattccttttattatagtttattcctagattatcttacccttttgaaaaaaaaattccgtttccagaattgtaaggtaaaaatgcttgtatagtcccattaatttgatacaaagttctgatagaagagttcaagaatgtttaggtttgcctttacatcatgtcagtacccaataaaacattctccgcatgatgcagaacgtactgcagtattttatgtgagagaaaacagtaccaagagagaaaacataaatgaaattctgccagactgctgtggaatttctgtgagtttcaggtcaatgtatgtggttccagaattaaattaactcatgtggaaagaaccagccttaagaactttagtatgagcatatgtgtcttttattattctactttattattctcttctcttttatgacctctaggttacaatatcccagtacatactacctttggctctctttgaatgtcagctgctgttgaacacagtggaccatctacctagtaccttgtgaagcagatgacttctccatgatagtgtcatacgtttgatgtgttcagttggggaaatacatgtctatataggttaggccccaattttctggggttcaacactgaggcatcttaaggtaaccaaaatcaggccaacaacaatttccagaccaggaatactgtggtgttataggctacagctttaagggtcatcacactttgcatgctcagaattttaaatttgcctcaggatcaagcatttgctaatagccaaaggattattaactttaaaggactttaaatgtttaagtgattgtgaaataatggttagtgcatttttaaaagttttgtctatttttcacaggctaaagaaatcataattaaatattgtttaaccttctgaggaaaacagggccttttccaaaaacagagaaatataaaattttattagtttcattgactcgtagagttacctgtctatttaatacttctatttcttacgt

SEQ ID NO: 98261 - DNA, 1083 bp, Homo sapiens
accacccccatgatccagtcacctcctgtcagggcccttccttgacatgtggggattacaatttgagatgaggtttgggtggggacacagagccaaaccatgtcactgactttgcatgtgacctccatcctcaacattgttatgacttattagattcaacatcaaccattgcctagcagtagtctcttgggtcttgggtcagattcgcagggagcaagagtaccagctttctttagtttatctctgtaagccaagccaaacaagcccttggctgcctttgagatatgtgtatccctgagcaatcagttgtgttgagtttgaggccagtcacatgacatgtaaccctggttccttcagaaactgaaaatgagtcaggtaataacacatatatgtatcgttgcattttaatcatgattactcctgacatatttaatcaaatttgtacagttctgcctcgtttcaggacacattggtgggatttacaaccaggaataaaatacacattgggagaagttatgatccagtggagagataacagttaattaaccaaaacagataattttctaatagttttgaaaagagtatgttcatagttgtttttcatactattgaacttcattcttaatatatggcttcattttgttaaagacggggcttctaacaaaacttttcgaaagcacatcttgtggattactttaatggaaagtattttgttataatagtcttaatggaataattatttcacagccagcaaggctaacggagactatttgtagattgaggtatgttttcaaagcctagtggattagcaaacagttgaggaattagggccaaatgccttcaaatgcttgtctcttcatttttaaaattaaagttgatatttgaatagacagaaaatttaagtaatgaaaatctttgatcatcttaatagcagatatctttaaactataaattaactgctaatttaattcactgtaatgctatgtgaagtgagtgtctttatttaaaaacttgtaattttgctgaaaatatgctgattcttaaccacatgtaaccttctggttatttcattttgccttttca

SEQ ID NO: 98262 - DNA, 1052 bp, Homo sapiens
ccagtgctggatgggaaaccactgatagaacattaatttcttactttgctcattagtttaagattacagtgttaattattcacaagagaagaaagtaaggatatctttttttttttttttgagacggagtctcgctctgtcgcccaggctggagtgcagtggtgcaatctcagctcactgcaagctctgcctcccaggttcatgccattctcctgcctcagcctaaaagtaaggatttcttacttcttcttcacatctccccctttagagactgtaccagatttaagcctgagaactcattggttccttctggtctaattctagagacatgtgtaccttacttatggatacttggcaaggtaggcattagtatttggatgcttatcttcacaaacctgagtgaggttcattgtgagggtagaattttggagaaaaatgcctgatttgataaaaaagagtttttcagtaaaggaccacctaatttctgccttctggacagacttcacaattggggatacaagtggtattctaattgtgagcatcatcctggtttccattccacccctagcagagtgcctgccatgatggtgctttttttttacttgataaagggattcacacaagggagatacaaggtgagcctgatgaatcttgttccccaacctagaagatgctcagcctaatgaaatcacctcaaaaggaaacaggagccgactggatggcacttgcactggtaaaattttggaattttgagcatcaaaaaagaataacgactgtaatagattgcaatatattgaataaataaaagccattgagtaagtgatacacttagtgatatacaataataccacttagataacatcataaaacatgaaatacttagggataaatttgacaaaatatgtgaaagatctgtacattacaaactacccagcattgttgagagaagtgaaaaaagactgatgtaagtaaatgagagatacagtttttatgagtcagtttttatgtcattaaaaatgctaatcttcaaattgtttatatataaatttagt

SEQ ID NO: 98263 - DNA, 1025 bp, Homo sapiens
ctgagagcatcactggggcagctgagtgagaatagagcaaaagctgttgctctgtctatatggttttaaccagggttgttttattccagggataatgggaaggttggatcaacacccttttctcagttgattcttctcattgatacctttgcctttagcactgtgtaaactcattcctgcagtaaaatgactttttaaatgattgctcacttgtcactaacttgatctgcattgtcacagacttaattataaaacttttaattctacttagtactgtaacataggatagtgttttaataggtagaataggattgttttgctatgttagattaaatatggagggggtgttcatatacaaagaaccatcagttgctttttccaggaacattatatcattgttttaacaagtaaaagagatttcatttacattgtttccatttacaaagctttttctcagagtttgtcttttggaagtccacactctttgttttgtaataggttgggaagcaacatggctctaagcaagttaaccctgttttaaatttattcctttattaattttttggaatagtaatttagttatgattcacaatttcaatgttatctttaatgtgttaacttctagttttagtgtatgtacccagagtagatacttactaaatgttggttaaatgaatgaagattggctttgttaagatttttggagagagctccttctgtgttgtaaaggtgctcagaagggtgattttttttctgctgctctggtttgatttttgcattatatttttgtagttaaatattaatctctcttttgaaatccttaattgcatatagatttttaaagttgatctttattttatggttctttgctttaaatgttccacttaattttaaatgggaaggatttaaaacaagctctaaactagtatagaggacatgtacatatcttgaaaaatgacctgttataagcctgtacactgtggcatttactggtaaggtttctcatcatgtgcatgtgaagagaa

SEQ ID NO: 98264 - DNA, 1054 bp, Homo sapiens
gatgaatgagcattggtagtttttatctttcaataaatatttgcacttaacctaagttgttgaatttattggcataaagttgttcaaagtattcccttatccttgtattatgtatagactctgtcataatattatctgtcattcctgttattggtaatttttgtccgaatttgtgtcttctcttttgtattcatgatcaatctgcctagaggtttattcttttaaaaaaattctcaactagcttttgttttaatttattttctgtattatttctgctttctagttcattgatttccactctgttctttaccatttccattttgctgctaactttgccattcaatttcctcttctttgtgaagaggtcattgattttgagacctttcctcttatctaatataggcatttattctgtgctattagtttccttctaagtgctgctttagcagcatcccactgactttgatatgctttgttttaattttcactctgtacaaagtactttctaattttccttttgatttcttcattgaccctgaattattcagaagtgtatttttcccagacatttaaatttttctggagatgttttgttactgatttctaatttaattctgttctggtcagggaacatgcttgtgtgacatgaatgctttcagtctgttgagacgtacatattctgctatcgttggacacattgtttgatagataccaattcggttacattggttgataatgtttttcaggtgtgctatcttgagtagattactttttttgatgattttttgtttgttgaatcaaatattgtgataagggttttactatgttagtggttgctgtaagatttatactctcatctgtagcttatgaaaatctacctttaagtgatattaaagcactttacatacagtataagaaccttgtaatagcatgtttcagtttctgtccttctgatcattgtgctattgttgtcgtacgtattacttttagcatgttataaacgtcaaacaacattactattatttatgtttaaataatgaattatcttttaaat

SEQ ID NO: 98265 - DNA, 1067 bp, Homo sapiens
taaccaacatgttaaaaagttacttatgatagctatccaaaaaattgctgattgatagatagtatcttttctctggaaataggttgaatttttaaaaatatttttatttccacatatatatgtgaaaacaaaaagtagtatcacatctttcattttgtttttgtttacttgaaagttgcattctcggctgggcatggtggctcatgcttgtaatccaagcactttgggaggctgaggtgggaggatggcttgaggccaagagtgggagaccagcctgggcaacatagcaagactctttctctacaaaaattaaaaatattagccagtcatggtggtatgtgcctatagtcctagctactctggaggctgaggcaggaggatcacttaagcccaggagttgaaggctgtagtgagctatgatcatgccactgcactttagcctgggtgacagagcaagactctgtctcttccaaaaaaaatctatattctcataggttttcgttcttgttctacaatgtgaagctcattgagttttctagtggttgatcttatgtgtttatatttgctcagaaaataaaaactagaaaatgtgactgtcattatttgtgtaaaatttgaataaagcaacaatccatattaacagttattgaaatattgtgtattgaaccagtgttagcaatccagcattggcaacatcctactttatttatttataagtttttgcaaatcagtatagtgatagaaatgcatgaaattacaatacttggagaactttttataatagggaaagaagctagtgacagaggtgaggatttgttcatgtattacatgaaaatattaatttaattggtttcctttaaaacttttgtataaatggcagtgatagttacagaactaggaaagatagttcatgcttaaagagatctggccttctcttttgttaatgaatgactttaaagttgaaatttgcattaagaatattaatgtgataattttcaaagtacccattagtctaacacttttaggataacaaaactaaattctaatgaagttgacatgtggaagaa

SEQ ID NO: 98266 - DNA, 1032 bp, Homo sapiens
ctttcttggacaactgagattgtctatttattgtgattgggactcataggcttttgagaggtaaacctgggtgaactttcttaatcagtcaaaaaaaatatgtatatatatatagatatatgtatatatatatgtgtgtgattgatggggtgagagtgatgaaaacatgtaaaaggcagaggcagttactgcatttagtgctcatagctcagcaggaagttgctgatatgaactcgttgtattcatattcgcttcgtgttagtgggcagtgctggcagggttctcaaagcccctgactcctactggatggcatcactctttttctaccttagctgagcaggcactgaccaaatgctgaaacatgtgactgcctatgagtttgcatagtttgtgagctagggcagggactgtgcttaatgtatcttttatgtttttgcataatgtcttacagtgctccacacatggtatacgcctgtttttgtattggtagcttgatcattatgactgtctggcaaattacactgaatgctgtacaaggaatcatattgtttccatctggtagagtaagacaaagactgtagaagtacagtcttttgtagaaggcttgcatttggtttatagattgtacttatattttggcagaagttttcttaaagtggggagaatgcttctcaggtcaggaaaacttgaataatgtaagtattcccaaatagaatgtcgatgttcgaagccattataaaatgaagcatagtgattaccctggtttataccagaggtactccattatttcccatttattaaccttggtgaaacacacacttccctttctgcttttattcctcagtcaccaagaaaaattgctaaacaaaaatagaaaataattcaagtctgcctgcctgtgtgagtttgctatttgtaagccctggaagggtgtggtaagcagtaatcatctcctcctccccaccatcatgctaaccaaagtgactttcctcaaggcttctgatttaatagaatagcagaagaatattagaa

SEQ ID NO: 98267 - DNA, 1031 bp, Homo sapiens
gactaatcaaaatagtttttacgtgtagtttggatgtggaaatgctaccactttatcactgaaattgctggagtttcatattgaaggtggaatgcacttaaaatggggtaacacacaagggaaaatttggcaaaatgatttcatggagtttcagatttaggccagtgatagccagggcccttaggagaagtagatgtttcccttttgtatttaatatgaataacattaatattaaaataaatgtatgtgtattcctttgtattcacaaaggaatgttattggatgtgtgagttgtcagttattctgggagatgtttaattcagtagcaggaaatggagcggccctggaatttgtaggaggggctttctcctctttgaggagccagatgtcatggttaggaggagaagggccatttttgcattgcatgtgtgagactggaatccccattttcacccactttaggcacttagatatgggattaatggtgcagatccatcaactaagagccctgtgtgaataccgagcttaagtctggcagaaggaatgtgaagcagtcctggaataatcatcaggaaagaattactgctcacctttgttccactgcccacccccccgcaccccaccccagatgacttcaaggtatcttaattcagcaagtgttcaagcaagtcattcagtacagccccagctctcacaaaatcttctctaccacgtttggcacgtctaataatgattataggcattgctacaaattcaatggtaatattgtaggctaccaggttagagacctctctaacttagtctgtctctttctcttctttccatttctcctcctttttcttccccttttccttcccccacttctttccttacatcctccttccttccctcctgcctgttttttccctccctttaactatctctctctactttccttccttgaacaattaaaggaatgcattaaagcccaaacaacaaaactgattaactcttaatgcttatctttctgaggaatgataatctatatgaac

SEQ ID NO: 98268 - DNA, 1129 bp, Homo sapiens
tagaacatccctaatgcctagggatttggtggtgtcattagtaatagtagcagtcatggagagggtagtgttggtagtataattagaaatgagcttctacatctcctacaagtttttcttataattagtagtggacttgaacagtcaatataagtaaattctcctaaagttaagtattatgaaatgctgggagaaaagttaacctgtggatttcataggtatatccttaagtcaataatggggccacaaatggtctcaaatgttgccaggcagtttttcactgagtgtattttctcaagctgggggcatgtttaatggaatatgtagttaatttaaaatgtcactgtctctaagagaaatgtaagactctatttccccagaagagatacaaaaaaactataaagtttagaaaaccttaaccaatgatattctgccagtaacaaacccacgcagatttttactaaattgacctctgtgtacttagaacattgtctgtgctctgattagaaattttggtcaatggaaaaactgccctattctttaaaatttaaatattctgggctcctcttaaaacttggattagaacatgaagtgctttcttctttttattttgtactgaggctctgtatctaggattctaagccttttttttttcactttttatttttttactatacttttactttttactttttatttttttactatacttttactttttactttttatttttttactatactatactgggatacatgtggagaacatgcaggtttgttaaataggcacacacgtgccatggtggtttgctcacccatcaacccatcatctacattaggtatttctcctaagactatccctcccctatgctcccaccccccaacaggccctggtgtgtgatgttcctctccctgtgtccatgtgttctcattgttcaactgccacttatgagtgagaacatgcggtatttagttttctgttcctgtgttagtttgctgagaatgatggtttccagcttcatccatgtccctgcaaagttcatgaactcatacttttttatggctgcatagtattccatggtgcatgtgtgccacattttcttaatccagtctatccttgatgggcatt

SEQ ID NO: 98269 - DNA, 1051 bp, Homo sapiens
agtcaccagggaacatgacatctgtcatacatttctcctctttaccttgatcccataacagctgttacaggtctcatgtacaataaatgtaatgtggccgcagcctgtcattacctctttccagatagtgattgtaaaatgcctgggtatcccttcaactttatgggtatgaagggtaactgagccaatgtagccaggccaatgaaattttaacactcatttccccaaaggcaaaaggccaacaacaggctagagttaaggtgctttgcttcatgaagtagaggccggtttgaaacatgaaatttcagatgaaaaatgaaagccaaagtgggtcagagttcttaattcaacttcaagctaggtggagaaatacattgacaacagagagccttacagatcagggtaagacggctgcatacactgagactgagacaaatatatgaccatggcaaaaaatagaaatttgcatgtcgaaggccaccacccatgcagccatccattgttctccatggttatctacaattacagaggaaaagaaatcgatgctaaaccatgttggaattgagttaggctcaatttttatctctttggtaactctgaattttctctcttcagcccatcttaaattatttactttctctttcacaatgtgagccatgaatattttgtttcttcattttgttaatttgccaattttcctttgagctaaatgccctagcaattttaatttttcattcgggttggaaagagcaatgacccttttttttccattattactatcacaggcctgggcccagaatactactttttatgaccagcagtgttgagcctataatggaattgcaaagtagagagtataatatactgatattgacttgtgttaaacccagtggtgtgatcactgataatatttatatgtttatgtgtatacatccttgcttttgttggcttgcaactaagcaccagagagaagaactagaaccataatatggatagattgtgaacatgagaatgtaaaaaaatgagagagagtgctatgtgaatagggcaa

SEQ ID NO: 98270 - DNA, 1125 bp, Homo sapiens
tctacttttcaagacaccaagtgagaggccaaccaggtaagccactgaaagtttttctatttattgcaacatggtttcccctttaaaagtgaccgctaaagcaggaaggccacgcagaacggcacagaagaaggctccctcagtactcaataatttaaagagagatcccagccggcccttcctacaccaccacggctgctaaaacccaactttcctctcctgctaggagtgtgtgtgtgtgtgtgtgtgtgtgtgtgtgagtgtgttttgaaacagaatttggcggtgttcatatgtcacatatggactgaatcaaaggtttaaaaatactacaaagcctttgcattacagtttttgggaattttttttccctgtcttgaagcagaacacatctcccttgagtttctccaactagccagtgaaatataaatcatttgcattccctccacttagctacattgagcaatgttaactgaagggcttgggaaagacaagagtttagttttggttttcagatgctgtagattctttggagaatgactggttatgcttcagaatcataaggctcaggctggtggagcaagttggcttgtggctgagataggggcttggggttgggtgctgctggcaaccaagacggttggtctcttctctcttcatccatgtgttgtctgggaaagtaaatcgtacgttcttttagaaattattattagctaaaacaaattgcaggccctcgaaggtctctcactcttgtgaagtggttagaaacttttgagtggaatttgttctcaaccactgccaaaaagggtgtgtggacaggctgctgtggagataagcatttcgaggcccagaacagtctggggaccgcatttgtggggagcggcaaggggtatgctctggaaaggggaatccatggggaatgcagtggggtttgtgcttccttctcggaccactctctagagtgagcctccctacccctctgagaacagtgtctggaatctaacaacaaaactcttagcagctgctacaggtgattggagatggagaaaccatctatggaggaaatgggtgaaagaaaggcgaaaaagccttcctgaagtgccctcacccaaggcacttgcaagg

SEQ ID NO: 98271 - DNA, 1511 bp, Homo sapiens
gctctgtgatcccagtatcctgtgtgatcagatacttagtctatgtgcctcggtttccttgtctgtaaatgtgtttggtaacaatacctacttcatagggttgttgggctatgtcagattatgtagaatactgtttggcacatatgaagcccattctgaagtcactgaatctttaaaactgtttcagtggggttagtggaatctcgtgatcgtagaaagcacactataaccattgtggtaagttgatttttatgagatttaaaaaataattcttattctcagttcttccaccaccaaacctctgtgttttgtaagcaccatattatctctcgccatgctcttcttcagagaatattctctgctgagttcttatcttagatttatgtctcccttgcattttttccctccttcttcctctgttttcagtattcttacctcctattttctttttaatctctcatttcctttccttttcctccccttccatccttcaacactgagagtgtgctcagcagggaacaccgtgtttaaggcgctctcccgaatgtgtaataacttctactctggcactaaggcccttcagcagctgaactcaaaaaagtcatcataaagacaaaatagcttttacccagcaagggtcttaataatcccatttccctctgggtcttcataaaggagtcattatctaatccagaaaaaaaggaggggctgggaataacaaaagagaagctctcggtagcacagagtgcacgaggctgccggccagctgagtgcacgtggccgtggtaccctgctcccgcctccacaaatcctgcgataaccagtaaccagttctggcgagtctttcagcagagaagataatgggaattgcaaattactagaccgaatgctaataataattgtttggatacaggagaaaaaataaaacagatgttccccaaaggcattctaggggctacagaaaggaaaatgaggagggggttgagtaaagagaggtttgctgaaaccaagcacaagaaaatccaataccaacaaatggcttagtgatgaagtaatagtcagcatcttcctggtggtacagataaccaatatttaaagttgcctttggaagtgtgggggttggagtgaaggggacaaaacccctgagataaattaattttactagtattaaaaataaaatggccgagcatggtggctcatgcctgtaatcccagcactttgggaggaggaggtgggcagatcacctgaggtcaggagttcgagaccagcctggccaacatagcaagaccccatccctgctaaaaatacacacacacacacacacacacacacacacacacacacacacacacacacaatagctgggtatggtggtgggcgcctataatcccagctacttgggaggctaaggcaggaaaatcgcttaaacttgggaggcggaggttgcagtgggccgagattgtgccactgcactctagcctgggtgacagagtgagactctgtctcaaaaa

SEQ ID NO: 98272 - DNA, 1069 bp, Homo sapiens
catctggttttctcagcctctcactcttcaaggtatttttgacatttcccctggccatttgcatttgccataaatgggcttcccctccccactgccttgttttactttcttgtgaaaggaacaattaatctaattgaagtcctggaagttctgtcttgttccggctctccctctctcttccatactgcattttcgttccaagggagctcctgggtttggaaagcactcactctccaaggaaattagcctgctttctccttttattttgggtgcatgcttcaaattggatttggctctgcaggcccataaggtggatacttcccaaaagaaaactgcctgggctggtcttccgatcacagagcacagcagcaatgccccagcaaaaaggggaactgagcaagaaagtcaggagaagcagccaactcagctgtggagacagagcagtggtcagcacacccaacctcgtgtttgcccgggttcttcctacgtgcagggttaactgcaaagattgccccaaagcctggaaacagggccctgatatgaaagaatttatcctgggctgtggcccctgggcccttggctccctgtataccttgaactctacatcccaaaggttgagacggttgctgagtaaaccccagatagaccttttcccctaaccgttgcttattaactttgttccattgaagcttgctgtctgcttggaaaatttcactcacaagccgcagctttgcctgactcagtgcaatccaaggccaccatctctggtgaacttcccttgactcctccctccagccacttgcagaaatgcaaatcctgggcacccacaggctgtttgggggcctgtatagaagctgtgggcagaaaccagaggccactgtggtactgctggactcctgcagccaaaggacaaaagggcgagactacgggccgtctgggcaaacagagagaagccactttattccctgtggagtggaggatgctaggatgttgctgctccggcagacagaggcctttcgcttgagtcatcagccaacagactgaatgttatggttttagaaacccatac

SEQ ID NO: 98273 - DNA, 1079 bp, Homo sapiens
agtaattgattcctcacaccgagagaattcgcctgcctttagtgtcaatggagctgaaccagagtcttggagggtgagcgagacatgtaaacagtccgtggccgagctgtcaggacgaagccagacacaccggagagtgaacgaggggggaaatggtggaacaaataattgttttattggaaaggaaaggaataaataatatttcagcccaggaactggcagtttgaaagagatggttgagagcttggagcagaaggattcgtgatgcaggttttaatggaagagattttctttgtctcaaagtaggaggtttcgtccccacccgacccccctctcccattatcatcattattatcattaaaataattactgtaacaattacagttgatgagacctcaggtttatacagcacctttcatctaaaagttcaaagcgatttatctatgtgtcatcttttgagagtggtaggagggtaagaaactattattttggggggtcatctgctgggaaactgaggtccaagcagatacaagatttagtccaagcctcagggcaggctgctgggttaaatggtggggtactgagttatcttcttgggggccttttctgctgtactcttcactgcctgggcctttatacacacgtggctcttgaagctcatccccggcactgatgcctcctcccacactgccagggcctccactggtcgctacaatattgtggccaaccagccagaagctctgtgcgcaaaacaaacagcctgcttctggctgtgagatgaataaagatccttcaaggtctgactcacacagctcccatcctgcttagagacttcctgtaatctggttccctttcttgtagaagctcatgtcctttctaaacatctttcttcatggtcttatgaggctctagccaggagcacccaacattcctaaatgcttgcttcttccacccccaacaaaccccaacctgttctctcagaatggaaagggcatttctgggatggggagagaaggtgaatgctttaacatgcctcacatggcccgggctgcctgtgcagcatgatgcttcagaatgca

SEQ ID NO: 98274 - DNA, 1008 bp, Homo sapiens
acatcgattgttaattgtccgaccactacagagcagctcgttttaatatagtcatgacatgaatgagacccaagctcccctttgcccctcccctgaggcaccttggatcttggagggagaagggggcacttcgttggctgtggtacaataggggctagtgttgaggtcagcaacaaataaggggtaacattgttttccctgctggcaatcagcaaggcttccttaaggattgaaataacttacatttctggagtgagcagctgagtaattgagaaagaagactctgttcctcttttcaagagaatccctctctctctctctctctctctctcatacacacacacacacacacacacacacacacacacacacacttctctgtacctccaccccactccccaattcctcaattgctgctctcactctaataattatgtagagcaagccagctgtgcctccctaatttatgagggcttgaaacgtgcatgtgaagagtatgttgcttcaagggccactccagtagcaacaaaaacctcaagagcagggggatttggggccaaacatttaaataacccatgtgacagaggccacaaagaaaggcatcttcttcttagtgctacagttctcttttacatacaggctctgaagattgctcaaaaaacttcacaagccccaacgggaccatcgaatctcctgggtttcctgagaagtatccacacaacttggactgcacctttaccatcctggccaaacccaagatggagatcatcctgcagttcctgatctttgacctggagcatgaccctttgcaggtgggagagggggactgcaagtacgattggctggacatctgggatggcattccacatggtgagtgatgtcatgaggcattcctcagtagcttggcctttgcctgttaattgctttagtgatgataaagaggaagaacaaagacttcaaagctcctatgagttcttatatgacccatggtgactttctcttcttccc

SEQ ID NO: 98275 - DNA, 1032 bp, Homo sapiens
cagttcttgtgctttagattgtatttttaatctgtatgatgattctcttatttatccatagcctgatttcttttaggtcccatttagtttctctcagacccagaggggttgtcaagctccatgacttgatgtagttgtttttaaaatgtgagcatataattagggtcttttaaatgaggaagtgcctgcaaggacttgtccctagaagggaggcagcatttgggggatcccgaggtatgaggttggaaggcctaactgcatttgaccgtctgctttccccagactttcagtgcaatgttcctctgggcatggagtctggccggattgctaatgaacagatcagtgcctcatctacctactctgatgggaggtggacccctcaacaaagccggctccatggtgatgacaatggctggacccccaacttggattccaacaaggagtatctccaggtacttgtgcagataccagaggatgtgagagtgtgtatgtattgctggggtaggagggtagctcctcaaatacagtaggcagaggacacaaagaaaataaacacagcatacctgagaactccattcattcattcatccaaacagatgtgtatgccaggcactgggttacatgctggcatacactgatcagagggagcctgcccctgcccttgtggggattactgggcctggggagaagttgtttggccaggatgctgtttgccctatcactatagatatccaaggaacattatataagctgtttggatcttcctcattcttggcacagggaggcatcagggacatggggggcattctcctaaggggaggtttgttgaggtgctagctgcacatgacagcttctcatgatctttgctattggagagagccctgccaggaaggttttgcacagagctatcagaagaacacataggaaaatgtcactaccaggaacagaactcaaggtgccccagatgctcggcagcatctcttcagaccattgtttgctttattctgaataaaccttgcagctcatgttgag

SEQ ID NO: 98276 - DNA, 1031 bp, Homo sapiens
gtgacctctgctctaagaaggatattgcaaagcagacaacaggaaagggagaaacaccacttagaaactccagggagtccacagaggttctaacagtaagccctggggccatttgtcattgtctcttctctctgcctctccaaaaatccatctcctcgcagcctgcaaaacttccagaaagttctgtataactggcatcccctatctttgaccttaatcatatactttcgcctattgctatccacctgtttctcatacgtgtagacagcactatgtactacttattcaaatgtttagtaatgctgagcacattgtaggtcaccaataagtgcttactgaattgaatttagccagtgtgtgctagctacattttggtcatatggagactgccattaagaaacaccatggccatcaaaggaatgacatccagcaatttccaaatgggtttggcattgtgggaggggaagtaccttaaaatgttggccatcctcctcatagagcaaaaggtcaggactcggtgcataagcctaattgcttgggcagactctacatgccctttgaccccttagtgacctgagcaactaaatacacaatggagcgagagggtgtggggaggggatgcctctatgagtgtgacttttggaactagggcattataagtgagttggattgaactggacaggagtagagtggagtagattcaaccttgtttctttaaagcagcatctgcttccacagtccaaggcaggccatcatttactaagaagggattatagctctagatgttcaatgattgagaaaaatcgagtattgtcccttcatatttgcaaaagagagaaaaaagaaaaataacctaacttttcaaggtgtctgatttagtgtaagataatgtgagtttaatcgtccaatggaattgcaaactgatactaattacaagtatgtctcagtgaatcacagatacaggttggaagcaaagtctaatgattgtgtcctttggaaaaaaacaagacactgccctgtgttgggaatgg

SEQ ID NO: 98277 - DNA, 1036 bp, Homo sapiens
atggcaaaaaccacaaggtaaatccatgatcctaccttaaaggcacattggaccagggcaggagggatgggatcaggggagctttaagccgacctcctacaggagagagggccttgtgtagtcaggctcagataattgatggaggcaagggtcgtgctggccttgaaaatcttctctcttaggctaaagcgattggaaaacaccgtttctctgacagccagttgctgttgcatcttgcgcagcagagagagagagcttgcagagtgttctctgacttcaaatgaaggagaaaatatgtccccagtccacttctccccacccaggattcactgaacatttatggcctgagtcccttccacatgctgggttaacaatcacaaaaccacatgatactatagttcaggagttaccgagctctggaaatgaaagggcacaaatcctgagagggaatcacaatgtcctggagaagaaaaaggacaataaataatgaggagaaattcagtttgttggggatgggctctgaactggcaatcatgcttagcggcgaggcattgaattctctctgctggtgcctcccgcatctgcggctcccggaggtgtggtctgtgtgggtgatgtggggcttttgttgtatacatatggatgaatgtctggcactccactttcttaagacatgacattctgggtctgcagctggcacaggcgatgtgctggctctatgtgtatatacacagcacactcagcccatgggggcttattgcaaacagccaggggcttgtgtgggtaggattggggtatctgtgatgggaacacagggcacgatgccccctgcagagcaggagctggtgcagaggtctggaaggagagtgtgatgtctgggggattcctaggggctgcctgtccttccctaaaaaggaggtagggagggaggaagagggtctctcctgtagcattacagttccaccaagccctggtctgtcagagtgtgaattatcaaaatggggcacatgtggccaagcctagggaggccaaagat

SEQ ID NO: 98278 - DNA, 1648 bp, Homo sapiens
ttaccaagcatccgttgggaatgcccagcctgaattggcactgggtgccaggagcttgggggctgagacctggttccaccccacccttttcaattataaaccggtagatctcggaagctcagctagcagacgagggccagaagccaggcaggggtggtccccggggagaggagtggggctcacctgattgtctccctgtccaggcgcaatgactaagcagcacaggcccagagggatactgtagcataagctgttttaaaagcatgcagatggaccaggatgctatttaaaacatcatttgtaggaaatctgcttttggaaataccttagcactgcacattttcatagaatgctgtcctccctggctttatccctggtattcattcttcaggaaagatattcctgaaattgaatttagctttctggttttcagaattatttttctcaactttttcataatggatatattctctctcttttgcctcctctttccccacttggctagatttagttccccagcagccaaggggtaacttgagagtttttttgtttttgtttttgtttttgttttactgaattagtcgtgcccaaataaatggagttggggcagaggaaaagcccattctcttccccattagaaattcatcctttgtgtacttagaaggaggcaggaaaatggagagcctgccaattaggcatcgccccactctccaagctccttcaccccactgcgggtgtggtggacgcccaggggctttccttgtctcccctgcaaggatggtctcagctgccccttcattagcagatctttcgttcagatatctgtatttaatgtgcagattccccctcattcacggtgcgtcagcgcagctctctgggctgttggggttgaagtagttgagtgaaccgtgccaaatagatttgtcaagtctgccgcagtttgatttgatgccatggggggaggtgggggttggggagggacttgggggcagtggaggaagaggcttcgtccatgccgagtgccaccactgagtttctctttgtagctgctggatggtgggcactgtgccaagctaactggtgctaagtggtgggcttgaaagtgaaattcagacaacaggagttagcagaaaagcaaagcagagatgaaggcaaccgcctgctctgctctgctctgctcagagcagagggaaggtttgcaaatgccttcccggtgtgcagggaaggaagagggaatagtgacatttgggacagaaatgtgggaactcgatttcaactccctggtcactgtcaacagcaatgcagcataccaaagaccagggaattggggaagtcagagaaaaacaagtttaatgagtgctcaaggtggcgggggagggctgtcctatgtctttgcaaaacactgtttacaatgtggacccagacggggctgaggcaaggcctaggcctctgaaagaatgccttcctttttactgccagtgggtgagaaagactaaggaactcttttccagcctcccctagccaggcagcagcctgttcttggtctcttcccatccaacaggtcatcatgaggtcgcctatgagaaagtggtcagtcacactgttgctggggcattgcaagcctcctcctggcaaacgcagcctggtt

SEQ ID NO: 98279 - DNA, 1382 bp, Homo sapiens
atatattctataatatatattacattgaattatattgtccatgccttgtggactcacaggaatggtcaaaatgcactgattttctttgcctgggagtgtagataacaaccaaactgggatgctggatagcagctgatttaattggcaggtcccccactcccctagaggtgcaaatcagaaaatccaggaaatgctgatggttttcaggttctgggctactgaaaacaaatcagaggtctcaagaatcaattgaaaaatgctggattatattcagaattcagagaggcacccaatagattatccagaccactttgtgccctgaatcgctttttaaacttggtttgcagagatgcacttgaagaaatctttatgttcaacttagctctttttaaatacgcacacacatatatttttaataattacaacataatcaacactagcatcagaaagctagggtcaccttgaacatacttgtgattttcctttgggtagtaaacaaccatactaagatctttcttttaaaacaaataaaaagtgggccaggcatggtggctcacacctgtaatcccagcactttgagaggtcaaggcaggtgtatcacttgaggtcaggagttcaagaccagcctggccaacgtggtgaaaccctgtctctactaaaaatataaaaattagccaggcttggtggcgcatacctgtaatcccagctactagggaggctgaggcaggagaattgcttgaaaccgggaggcagaggttgcagtgagccaagattgtgccactgcactccagcctgggtgacagagcaaaaccccatctcaaaaataaataaattaaattaaataaataaaaaatatatgtcctctgtgacatccagcttctaaagcagatgttaacattcctatctgagtataacatacaaggcaacccaccgatttttctcagatacctcactgcaaagttgtcatctgaaaattgttggcctgaaggtgggacttgggagtagtcgtggcttttggaacttaaactctcccacctgtgcaaagacccacttgttacttgtgacctggcttacacgctaacatttgtcctgggtgctatgcaagccttggagggagggccagtaaacttaagtgtctatctgcaagcctattatcgactttattttcctgaaggagaaaccaaggtatctaaggtttattgatttgcctataatgattcagtgagttgtcagggaatagggaataaaaccaatttcctggcgtcatttcccatgcacacaaccccttaccttgcaatgcctagactggaagccaagaatccatctcagtgaatttgatcagaaaacatatgaagggtgattctaaaaccacagaagcattg

SEQ ID NO: 98280 - DNA, 1027 bp, Homo sapiens
tatactttgctctagttacttttttttttttttttttttgagcagagagcacaaaaaagcataaggtccatatggcagttattgatctgggccatctggaaagccaggacttgctcccaccatgtaggatcagaagctgttccaaaaagccttccctcccataagagatgtattggtcagatggggacagggatggatttcattacagggcaggactacagtgagaggaagctggagcaggactctgaaggactgtctgcaaccctgaccctgccacaaagatcagagagaaccaagaaagtgttgattgacacagggccattgtaggtagagggtgcccctcatcatcttgtccgctcatgggtgggatggcatcaagtaactaacaaaaacaaccgtgaagcactttgcaattagaaaatgctctgcaaatattcctaggtgcctgcaacatgaggaagagggagtgtcaagttcaagctagtgagtgaggtctggtagccctaaaagatgatatttttacttcattttaaacagatattctacttttctctttcttccttagcttctcaagtgttttccttcttctgcctgctctcagcctggaggcaaaattttccttccctctaaaagtttctgggaagaccactgataattttcaagtagaacagtgtgagaaattaattttttttacagtgtttctttaaaaagcccaaaacaacatacccactgattatttttaagcttgagggaaagaaaatttgacagaactttcccatccccttcaaagactgctcaagtggctgaactacaaacaggggtttcaataacatggttttgcatcttacgctacaggtatttcaagccaacaacgatgcaactgaggtggttctgaacaagctccacgctccactgctgacaaggtttgttagaatccgccctcagacctggcactcaggtatcgccctccggctggagctcttcggctgccgggtcacaggtgaggtgggggctccaatgaggttgg

SEQ ID NO: 98281 - DNA, 1058 bp, Homo sapiens
gatagtgtaacaaccagtacagccctactggtgtgaacccactagacatcaggtgagacaaggatgactccaaagagaactcctcttttgaggagtctcatttgttgagccctcactatcttgcttgtctgctaaaggagaaccattcttatccttagaattcacagctctgatagtttttcctgttaagctgtgtgtgtatgctacagcgaagtgaagatacggcagtcatctgggtgatggagcgcgatagttgggttaatccagcagttacctgtgacttaattgtgtttccctgtgtctttcaccgccaccaatttgagaaagtataacagtgatgattctataagatagtgcactgtatcctctataactggagtgcagatcagagacaaaggcggaaatgtaaaaaggcatcttcaaccgttccctcaaaactcaggggctccgcatttctggatgggtcccatcacatgggaaattcttttcatttatcttcggagtatatccaagttagataaaaacaataattggcagaatccaaaagtcagtcacattttaaatcatactgctaaagtcaccaagtatgaggacatttataagaaaccacaaattttggaacacctggcattttggctagaatgttaagcttgacagcctcaacttacagtaaattactgatcattattaaatgttcattaaacaaaatgagggaagattggcaaagagactagagaagtgatggagacataaagatataggtagatggcaaaatctgtggaacctgcaagcacagccgtttgacagttagaggaactacactgatggagtggatgactccagaaaatggctacaaagaagaatgggaggaaagccaagaataaatgctgaagttatgtgactgaaaaagcaataatttaatgcatatgctttggggattgtgctttcatattattgtgtgggtgggggacactgttggtcggggttagttgaatacagaattctgacattttaatgaacttgtttttgttttatggagagaagaaggagacttggag

SEQ ID NO: 98282 - DNA, 1897 bp, Homo sapiens
acttcgagctgggtactgttcctaaaatggctcattgggagatgactggccttgagtttgatttatacgtctctgagggtgccactgcttctacaccaagtcaatttgagggaccaaaatgctgccacacccatgggtatctagcagagctgcctggcacttggcctctagaagagtattgctgtaagtcctggatacattgttaagcccaccattttagtttcagaaagccagatttcagaagcttctcctggcactgctgacaagaaggggttgcctctatcccttctaaacaggtagcaagagttgtctgctatctctgctgttacgtgctttcacagcagtatgatggtaaatgtttaacaataggctttttagggattaaaaaataaactgctttttaacgtttgtcactttcagtggtgtaaatacccttaccatagctgagcttaagctaccaacacaacatcaatggagatggagttgagaagtcagtaagagagcattatatagtttttttttccattgtgcaaatacagtagacagaaatgactccagaagtatagctactgataaaatgtattaagataactagcaagtgttgagttttgaggatttgttacctttgttttttaatacaatttattgaattatagctttatataatttaatttttactaatgaatacatttaacaactggcttgcaaaacacttgacaagcagctctcacaagctggtacaccttggatctagcacagcactgagtgactttgaattctcctgtacttctggcctggacctgagacctccataagcactggagaggagaggggtgaattccggaaatttagtagatcagtttgccagggtacaataggaaaaggctagaaaataaaagagggaaagggaccttcccttctgcaggcttccttagaactgcttctcaccccaagcactggcgtgtcccttcttcccggtgggggcagtgggacagatgctaggagaacacttggagctggcctcctgacacagtccacacttgcttccctggagggtcacagtgcctgatccggagaaaaacattttcatatttcaagtgtttatctcttcagcatttgagtgctcagagagattaatatctgaagatcaccacagcctcaggcaaaagaagagaacacttaccccagtccagccttaatcaccctcccttctctgttcactgcaataatgtttaattaatataatgagcctcctgcacgttgggaaaaaatacttatttttataacccagcctggatttttcatttcatttccactcctttgagactgcatccaattaattcatggttgttcccaacccccatgttttatctgaatgtaaagaaggtttgtggggtctgtgtaggtgtgggtattctagtgttaatgtgtgtgtgcatgagtgtgtttgtggtttctgtgcatgggtgtgtgtgtgtgtctgtgtggtatgtacctcagcagaggcgcttggaataaaaggatatagccggggtcctctgcaggctggggaggttggctggctcttattcagtgtctgtcctcaggttcattctaatgattctggcctcctcccttgactcttctaagcatattttctctgggagtgtctgagggcagccctacccaggccacaaggccaccaattactgagtcacagctccaggggagcttaagtgacctccctttgaccctggcctggacctctgtttcttcacccgttcaccaccgcctcctcctcgtccagtcctggccttcacccgaaagcccctatggttgacctttgctactggttgggaattctagtctttgtcctccttccagttgattcattataccctgtggtttgggagggctt

SEQ ID NO: 98283 - DNA, 1021 bp, Homo sapiens
tggcttagctgcctggagtgtgttcacaccagcctctggggaccctgttccaaattcagtgacccctgctagctgcggaggaacactcagtgttctctaagaggccactttggctttcctctgtagtgacaatgacataggaagcacccccttactaggagatggcatgtttcctacattctcaggtgctttgaacatagacagagttttgagaatgatcaaagcccagcctttaagaaccgagacaaaaactcatagggcgggcaggtatctaaagctgcagcattgaatattgtagccatgagccatgtgtggcaattttattttaattaattaaaatgattacagccaaaacttcggttctgctgtcccaccagccacattccaagggcacagtagctacactgtattggtcagtgcatagacagggcacgtcactgtatacacggcatcatcacagaatgtattggacaacactgctccagtgctttggacactcacatgagagcaaccaccaggggcccttgatgattctttagttccctggttttggtatgaaccaagaagcaagtaatggagggatgtgtcttctgtgggatcccttgatggagtgttcagtggctggtatctttatagctgtctcattctccctcactagataactacagtaaagtaagcaagtaacatggcattagatggtgtaggaactattgcgattaatcaaaaagagcattgtaagtaaatattaatactaagtaaggtcaataatcatcatcattgtgattgttgtgtcatttttattgtcaggaatgagacaaagaagatgaggtaaagggtactaggccaggtcagcttcagaatcctccagtgtgtgttccccctaaatctgtgctcttttattcgtgggttggccttgtgaaatctgattacagtattacttcaatgactttcaatcatgaaagtgatagaaagaaaacaagcgaagctgatattgaacagagctttgactgcctggtcaaag

SEQ ID NO: 98284 - DNA, 1034 bp, Homo sapiens
agaaaaggatagaggcccttctttaaggaaggtagaaaaacatcccaggctttgcagaaaaaaataacagcaggaagaagctttctttaccctttttttttttttcctgcaaatcatgattggttgagtcccccagcagtgtgtggattgataacgaaggggcagaatgacaagacagcctcaatggcaaaaccttcatgaaagccggcagagtgaaaaaacagctctgggtagattcctgcaagggctaggactgaaaccttcatgtccacaaaatggtctattgtaaaccttgagaacatcttgctaagtttatccaaagtcagtgtttcccttaactggttgctaatttgaggaccttagcagagataggcagaccttggaaggccagctgagggctgactcatgttttaagcatggactatgcaaagagactacatctcctacagcactaaatattctttcagatggtcgttctagtaggagggcaagatgctagccaggagatgtgcgtgttggacagatggtgtgtttggctttgtgatagccaggaggatcaagctggtgatttatttcagggtttggtgaggtgtagacacaactgattccattgctgttgggccagtcgcagtcacgtgttcacatgacacttaagcagctgaagccagatgcggccgtaaatcgccaggtgaaatatcaagagacctttccagagacagcagcaggttaaaatgctgaatggccctgtcctctgtacttcctcttcacccttttgaactcctgttgttcattcccaggcgattgttttccctgtatcattggcaacaacagatgttttgggtcaaggacccagcgaaatgcctcccaagtatgtcaggtccaggaggagaggaattgtatctctgggacattatttcttcaatctctttcagcaatggaacatatttcctttccattgtctttttcttggaagctgtccattgccggcatcatagccatcagctacaagaacaggcagggctggttcttagctg

SEQ ID NO: 98285 - DNA, 1288 bp, Homo sapiens
tggacacagtaaagagcagaatctgaattgggaatggagaatttcattcaccttggcacgttttacatggagatctgagttggtaaccagatgaacctagtgccatgggtctcttctttctggctgagacctgtttgaccacagcatgcaactctgccttgagcaaacttttctgtttgagagaggagaggactgtgtgttccatctaacctagtgactcatatactattcctcttatggtcaggacagcaggagtcctctcttgatccgggcataaaatcagccttttcactcaaaaaatggaaacagagaaatcagggggcaggcaaggtatggaaagttgatgttgaaacactgccaaccataggcatttacattgttatacatttttcaaattagagtgtttttcttttcccttataaattaatcatgcaacaaaggtaatctcattctttgggagcaatcactgtacaggtaaatctttagtgaaatacaataaaagtggcctttggacctggagttattagatggtcgcaatcttttatatttggaagtatctttcattttccgcctcttactgatttcttgccatgcaatattattttaaatttaaatcatcctgtgttttctgctgtgtgtgtgtatatacatacatacacacacacacacacacacacacacacacacacagacacattgtgtgccaggatgtgagtcagtaatgaagaaaagcctggaagaaaaagagatctgtgttgagaagggagaaagagaagaaagaatgaataaactgtgttgtcatgtgattttttaaaaagacccttttttgtggttgttatgagtcacattttaaacaatgtagcctgggtgtgcattcttttcttttcttttttaaagcagtggctataaacatggtgccgtcatgtatctttttctaggatttgagctttaacaaatgaaaaaccgtgtgtataaaggggggaaaaagaaccgaaaagtggtgtaattaaggtgatggattatttcctcttacccaatactttcttttttcaataaaggaaacaagaacaataaagaagccagtaaaaatatatgaagcccataatcagagttctggggtttgttgaccaggtggttatttttagcagctcaccttggaggcaagagtttttgttcgtgttagaggctgtggtttctgagcagagcacgggcagagagacgatctggtgccctacctgttagagactcacggaaatcccagctgggtgcacctgtggaaggtggttgt

SEQ ID NO: 98286 - DNA, 1931 bp, Homo sapiens
ctgcagttctccacagttctcatccagacaaaaccaggagaaagtgcacatccacagctgtctcttgggcatagaggggagcagtattaagagaggcccattttgggggtaatgctggctggcatttgactctattccttaggctttaagttctgtttctttggtgccaactggccaatctctgcattttgcacccccttctctcctttcccattcccaccctcaccctctattgcctgcctcccaaggctttgtccaccagggtaaggtcccccatcccagggcctggcctcacattccctttctccctggactcccttcctcccacgcctccttctcctagaagcacttctgagatgcagagagggttaaatggtgcttttgcacataaccgtctgatgaaaggcagagaagtgttcctaacccctgccggggttccagataggcagctgtagtgtgtgaatcctcctccttgcccccacccccttatgtctccagctgccagattaaggctaggtgttgctgagcaagaaagcatggagatcagatgtgtgaagcgggtaactgcttggcggccatccttccccaggggacacagaggtgttctttgtgaggttcgctggagcatgccacctctcctgctacagaggcctgacacgtcccctctccatcagtttaccactcatgtaaacaactgccgaggccagcttatctatgggtggaagaaaatgtttttcaccaacttttctctccaagaacacagggacaagactcagtttacagaaagtagcataagtgccaccaaagagtgtgaagcgtccgagacttcagccagtcagagatctgaattcggaggcatttaaaaatgcctctagatgtgggagcaatccacatggtttctgccaacttactgaaaacatcccggcgcctcccgccacaccatgctcataaggcagatggaaagagtcgtttctcagggatgcctttgtgcttgtgcgtcttttttccaaacacatcagagggcgtgaccacattcttctactatcttctgtaaacttctctagaggagccaacctttttcgtttgtttaatctcacaaattaaataaacctttatgtgaaatgttcctccaccagcacttcatttttaacctgtacagaaaggactgtgcagacaggccagtcctaaaacaattctgacatgcaatgagccttttttgaaagagaaagagagaaggcttacccttggtgtctttcaaaacacttcttctggaaacctgggtgactcccccaggtccagatgatatttcataaagcagctatagtatatgctttctcatttcagagattcagtgagaaactgacttgactgagacacgccaatcctcagacaggttcagacagaaataggaggcagaaaggaagaggactgtttcctcttccctccctacttggttagagcaaggaatctgcaaacttgttctgtaaaggccagatagtaaatatcttgggttttacaggacatacagtctctgttgcaagtattcagctctgccattgtggcataaaagcatccataagcaatatgtaaacaaatgagggtgtctgtgttccaacaaaaattgatttacacaaacaggcagtgggctggatttggccaataggccacagtgagctgacccctgggttagagcacaggctgggattttgtccacctggttctagccgtgactctgacacttgctagcagtgtacagttcctcaggggaccctgggccatctcttgggtttcactgaatgcttctctgcccttctccacaattatcctccaagtgaaaccaggagaaaatcacttgtcctctcaagtactcaggtctccctttggagggtcatgaggaataaacaaaattgattcatgtgaagcccgtagac

SEQ ID NO: 98287 - DNA, 1475 bp, Homo sapiens
accaagagttgcttgtaggggatcaggaagggtttgctagtcatatcctctcttttctaacattaacgttatttctaacctcttgacattaaaacatgaattcacatagtactatttctcatttctccaaacaaatgcccaaagaaaatgtttaaggagccagtataatgtcccccaagtagcttttgtcactgaagttttctacatgttgataatttcaggggagagaaggataagtagagaaggagaagagggtcttacttaaagtggagtttgtctttcaagtagagcaggattctgagagactatgtctgtgtctctgattctaaatatgtaatccatgtactaggatttcaccttcctccagcaggtccccttgattctctccattgtgccctaacattgtctcttatcgtaagaaacactgtaagagaaacatgaaggcttcatccttctccagcctgagcactttaagccataggttgtgtattttgtgttggaaaccagcattttggctgaaggaaagcagacttttgaacaaagatgatgtagtgatggagggaatgtgggtagttgtgaccatgttctgcttgacaaaaatttctgctcccacctctgtggtctggtcaggtacttctttagagggaaagctaatccctgaggatttatcacctcccttttcttgatgggtgagctgcagcctcattaggggatggccctcactgtggagccacatgaaaatcagagacaaaccccaggacaccctttggggagagaagggatgtctctgaggaactctgggggcatcccttaacactttgatgtttcctgtgcatttttgtaagctcatatcgaaaatccagcagcaggatggttgccaggcagcagatcctcttggtgacctgaataatgaattgacaccagttgactgtgacttgcaagctggccacttcaaggagccatttccagcaccttgctttctcttcctctctttctatgcataatttccaccatggccacaaatatgagagagagagaggcctttctcagctatggtaatgaaactagtaaaagacagaattagtttggggacaaagacaaagagggcaggcaataaggtgggagaagaggaagatgtataaagggacattcaggggatcctgggattctggggtcatttctaccccaggggttgtggatgtggctgtcaaggtgtgtgcagagcaacacatccttgtcaaagctctgccaatgttgtgggacttctggtcacccaagaggtgccaatgaacctgcaccctagcggaaggggattcatacagcaggagaaagcagtgattaagagctaagaagttgagcaggctttgaaatattttccaagaaaaatgttctcatttttctatcacttctgagaagacattagaaggtctgacccacctcccacctattccccagatcaaagagaggagttctga

SEQ ID NO: 98288 - DNA, 2390 bp, Homo sapiens
tctcagcctagcaacactcttctgtgtctctccaccagggggcaccctcctgccagggaccgagcccacagtggacacggtgcccatgcagcccatcccagcctactggtattacgtaatggccgccgggggcgccgtgctggtgctggtctccgtcgcgctggccctggtgctccactaccaccggttccgctatgcggccaagaagaccgatcactccatcacctacaaaacctcccactacaccaacggggcccctctggcggtggagcccaccctaaccattaagctagagcaagaccgtggctcgcactgctgagggccgaagcaagaacagcacccaaaacaaacgagaaagactgcaaacatgttgcctcgattttgcacttttttctcctcgcctagtttctgtgtgaactctcagacatctctttcccggatccccaaccctgagcactcttatcaatcccaaccatcctccttgggttcattttggtttctggtttttctttttcctttttgttgattccaaaccaacaaacccaactctaatgctgcatcttggactatccgaagagatccacccccaagcactccacaactcaaggctcagctggttttgttccagagactggttcgcttgttttttccccttgccttatcccatacctcctctcagtgggcagtctgccaggagacgtgaggggaagcctggatctgtgtgtatgtacatagtagacatgtgtgtgtgtgaatagctctctgtgtgtgggtgtgtgagagagcggctggttcattgtgtgtgtgtttgggcgaggggtgagtgttcagagagggcccctttaactcttatgttacttctcctggggtacattttacaagaaaataatatactgtacaagttttgtttacttggagaagagattgaagctttttgttgccttatctagctctggctgggtttctgttggctgtcattgtcatctccaggtacctaaagaaatagaggccacatgggatgcagtgtggcttctcccatccctatccccaacccacctgacccaagagaaggttcccctagcacactcaaacaagacccccttgtcttctggtgtctttgaaatgtcaagataacagccactgggtgtctgcggaaccacctctccagccctaaagcaaatctgtctcatgttgccttataaaagagaagctcataatgaatgtttagcctttatcagttacatccaatcttggaataagtcatagagaataacaagtctgggactgacgtaggaaaaacagtagtctgtttaagttgagaggaggaggaggtggacgagagaagggaggagagggaagaactgaaatgtctcctcacccagggtggttattgggcccaacttgggatggggttgagtacgaaggttaaaaaacatatactttggtattatattggtcattgtaatagcagttgtaaaatatggggggaaaagggatcatttgctttcctttcatggtgttaatgtgtgcctgaatctatagccgctaaaatgtaaggctgtccacctgacttatttaaatattatcagagaatagaaagtaatcactttttaagtgtacctatgtgctgccccttaaaacattcatggcatctggcaaatagacccttgtaggctggcctggcatattcagatgttgccgcatcatcacagagaaggtcaaatgaagatgtaaccattgctgctcatgtgtcttctctaagcaacaaggggagcgggatgtaagagagaagttgctaatgatactgtacaaaggatggattaaataatgaagtcaatttcattgatagaaaatgcaaattttaagattctcagtgtatgaggtctcagcctcgggagcatttattttttactttcctgctaaaaatccactggggaggtataaaattcactccaaagaagtttgcctgggccaaaagcctccaggttccttctgagaacaaaatactaatgattttttttttttttttggctgcttgggagagactttcagcattctttcacgatatccagatatgtcccttcagcacacacactcaactttctcatctggttcgtttcatcctcccgaaagaacggtgctctcccactcttactctatttcaaagagctactctgtctcaaccacagcagccctgccaagaaaaggcaagatgaaaggctagagcatgtgctaccttgagatttcaagaagtgtcctacctcagctgaagatggagaaacggggagtggagaggggatcagcccagggtaccatgtgatgactaatatgccactcattaagggcttttacctcggctgtccacatccagtcatgcatttggggccagg

SEQ ID NO: 98289 - DNA, 1033 bp, Homo sapiens
agtgaatgagttgaaggcctagctcgggctgataaagcttttgccttagtagaggttttatgtcaacaccttcaggagggaagcccttatttctgggttgaactccccttccatgatattatgctagcaattgccatcacttagttcctggcgaaggcagaaaaagaaaacaaaaaatcagcattgtcattgacaaaactggatgctgaagataaagtaaaattgtcttttcccttgtcccacatttttgggattaaagccagaattgaataggaaatacagtactatttctgaagttgatagccgatctttaagaagaccctgtctttaaaatgaaactagcaggcaaacacctaaataatcgaaaattaccaaagaacaacaacgaaacaagaaaacctaaagatttttacttcctattcttattcctttccttattactgtgacaccccttgcattgctcagttgcctgtgtgtcaaaataacttgtggacgttggaaattatttgaaaatgtattgtgtggaatgtaataaaatgatgatatttttatacaaacatgtgaggttttttttccctttgcctgtgagaacaaagttgaaatgtaggctttgagcaaactgatgcttccaaagtttacacatcaccttctgagctacagggcatttctgtgggaggtaggtgggttttctccttgaggctgaatgccaacttttccttctttttatttttattactgcttgttaggatttttatccaatttgtgcagctgagacaacttttatgattggtgtgggattttgcaaaagttgctaagtgctaaattgctaaatgagattccacgaaatttctcttgatgacaaatccctggagattagattctactttcaaagggctccgggagagtggtaccagctaagctgaatcctgtacccagctctgcagagacagatcacttcctttgaagaagcagcagtgacatcttacccctcacctacccaattattacttccacagggatgtgaatctcccat

SEQ ID NO: 98290 - DNA, 1734 bp, Homo sapiens
tttgttcagaagttgccttgtctccctcaaccatcaccctcttcaaagaaccctcatcagaaaggccctcgtacctttctcatttccttcctgtaaagacaagggaattctagaggagaggagagcatcagtgtttactttacagaggagcaaacagagacccagggaggtcaatgactggtcaaggctctgacacctgaggcagaaccacatgggaggtaggcattccgcccccagcctagggccctccacatcccacgccgcttccttcagtgcagggtgatgctgccactgaccaggcttctgagtgtctctgctgtacactccagatgacaagcctgtcatcagcttcaagcagacctcttaatccactgctcagggttggcatggaagggactcttcaaagaaaccagcacattagtgacctgaaatgatctgtgtcccagggctgtcttaaattatttacccaaaagtaaccagtggtttggggcagacttctcactttcctggccatattgtgaagctcctttacaatgcgggaagtaaacagtgtcgaggccaatatactcatacaatatgctctgtgtagacacagagcgaaggctgagaattttctgtaagaaactgcagaaaagcaaactaatgaaggaatgctaatcccaaataatcttaacttagaagaaggaagaaaatgagggagagaggaaagataaaaaaaagtgtctgtgtgtgtgtgtgtgtgtgtgtgtgtgtgtgtgtgtcagagaaagagagagtgagaaagaatggaaagggccataagagagggccttcttatttgaggactaaatcattctcagtaggaatttccaggcagcaggttggagtgtcttgggggtgtttcccctgagcagcatgtgtggtcttacactaccaggcagtgttccagggaaaagcttatttcattagaagaggttgggtttgtgactggatatggcgttcaccctttgtgccgtagtgttgcaatgtattgacaagcacactagagaatatttgactcttccagggtggagggtgtttctggaacagtcttgtgggtgttttcataactagccaccctggtctctcattccaaaaaatcaggacagcaggagatcagtgagaccttgaatcatgcctcaccgtgtacctactctgtctctcgatgatgcagagagaagggacactgaccaaaataaggtgactttttggcctgagactgatcttcatatgaaaatgaccagagttttgtgaagttgggttgtatttgtttttaagcagtagctactgtgcccacttgattactcaagctctgtaaaaccccttcccatcattcattcagagctgacctctttctctcactgtgctgatctgcaacagctggggaagggatgggtgttggagatcgggaaggcagaggtctgactctcacatagatatatgcaaggtggaagatttgtggcaaagctaggtgatcgctttgaattccttgatgagcctgatacgaatgaatgcaagccaaaagacaagagatcaggtgccatgtttgaaagcatttctatcaatcagacagataaagggaacagaaatcccccgatgcccaacttgcagcagcctcaattccacagtatcctcctctacactcccacattttccttcctgatagtggcccaggctcatttgcccaatccctgccctggactccagcagcacttg

SEQ ID NO: 98291 - DNA, 1104 bp, Homo sapiens
aaggcacagtggcaggggttgcttggcactgaagacccagagtttcttcttagttctgtgttactggttgtggttggaggaagacacaggtcatctgaaggagaacaatccagtaatgtccataatgaatgatctagaagtagaggtgattctctagctgcctgccagaatggggagtcattctcgtaaagattgcctccctgccttttagccatggtgatagaacttgttattaacttgtttttattttctttatattatagtggacatcccagaaatacatgagagagaaggatatgaagatgaaattgatggtgagtactgttatgatttagcaggtaatcgtaaaattcaagtttggttataaaggtgtcaacaaaaataatgctctgggtatcggagggcccaaatctagaactatcagtcagaaatatataaaagaatctggagaaaaatgagggaaccatcaatggatctgtcagggtcaactttagaggtttagaaagtttattgagttcctctgcctaatctgaaacagatcccctctttccagtaactttttacctggatggactttgaatctgaataaaccctttacaagtgaaagatcagctcctccatacgtgtcatagtctgaatcttttgaccttctcccaaaaatggcctgagtgaatgagcataatgtgaatattctcccagacctgctgtggtttctggttccctggcttgggggaaaccttcctcacactattcaagattccaatttggagcttcttgcaagatttcggtttctttttcacactgaccatctcgtatctttatatttattccaagttctatttttccactgcaaacacatatacttcaagaggctagagggctgctgagcaaatatgtagatgtaatttcttccctcaactcagaatagcacaggtctctctctgggcttctctgagtaccagagttgatctccaacagactcaacagcaagattccacttaaagaataactgtagactaagattgatgaatttaagaggaacagtttatagagcagctgcttttaacctgcctttaatcagaaacttcatgcgtagttatagaa

SEQ ID NO: 98292 - DNA, 1234 bp, Homo sapiens
gcactttacaaatattagttcatgtaatcctcctaacaacccagttgaggcagattttactattatccccatttcaaagaggagaaaactgaagcaaagagaggttcaatagcttgcccaaagttacacagctaggatgcggccaggctgggctttgaacccaggcagtctaattccagagctgctgctgctaactactgtgctctgaagagcctctgggctggggaggctcagtcacttcaccctgacataggcagtgcctgcaatctctcatgaattttatgtatcgcagatgaatacgaggtggactggagcaattcttcttctgcaacctcagggtctggcgccccctcgaccgacaaagaaaagagctggctgtacaccctggatcccatcctcatcaccatcatcgccatgagctcactgggcgtcctcctgggggccacctgtgcaggcctcctgctctactgcacctgttcctactcgggcctgagctcccgaagctgcaccacactggagaactacaacttcgagctctacgatggccttaagcacaaggtcaagatgaaccaccaaaagtgctgctccgaggcatgacggattgcacctgaatcctatctgacgtttcattccagcaagaggggctggggaagattacatttttttttcctttggaaactgaatgccataatctcgatcaaaccgatccagaataccgaaggtatggacaggacagaaaagcgagtcgcaggaggaagggagatgcagccgcacaggggatgattaccctcctaggaccgcggtggctaagtcattgcaggaacggggctgtgttctctgctgggacaaaacaggagctcatctctttggggtcacagttctattttgtttgtgagtttgtattattattattattattattattattatattttatttctttggtctgtgagcaactcaaagaggcagaagaggagaatgacttttccagaatagaagtggagcagtgatcattattctccgctttctctttctaatcaacacttgaaaagcaaagtgtcttttcagcctttccatctttacaaataaaactcaaaaaagccgtccagcttatcccatcctctgattgtcttctgacttaagggatttactgtggtgtaggttctgccagccaaccctacaagctgccatttccagtcctagcatttaagtaggatgttgttgcctttaactt

SEQ ID NO: 98293 - DNA, 2895 bp, Homo sapiens
aaattgccattttagggtcagcatgaacagctctttcttgtatgcgatttaaaacaaactggaaaggaaacttcacacgtcaaaatccatagaagcgcctggacgaggcttaaagtgctttgtgagtgaataggagccattcgctaattctagacccacagtgtctggtggtggggcttcccttgtggggcttctggtggtggttttgccttttcttttccctcctccatgttcttctaaaacatatacatatatacatacacacatacacatattcttcaggtctctaagcccctggaagcagcattgtgtgatattctcagaggcaggggaaaatagagggaaaaatagagactattggtatgttctccccatcagcgagttattgtaactggtcaccactggacgggaaggagaacagaggagagggaaagagaagcccaacctctgtgatcatatgagggccaaggctgagcagtgtagacagagaccctttgaaatgcatttgtctctcaaatagactagtaaacaccgacttctcctttgggttacaaacaccatttcaacctttcgggagagtcagagctaggatgtacaagaactgattctaaccagaagtccgcaagtactgtggacaagaatgcttaaccatgctgcttcagccttgagagacctaggttcttacacatatgcacacacgcatacacacatgcacgcacacacacatacacacatgcacgcacgcacgcatgcacaccaatttatgtttttattaagtgccttgaaaaaatgaagaaaaatgtattttccctttatgtaaaaattagtgaatatcttatgaattaaggcattcctctttccctaaccccgatggctccattcccaagtaccccaactcactgctgatcctattaaaggaatgagtcctgctacccgagtggtagtcatagccctagatgactctcaactactcttcaaagggaggcatcaggaatagaatgaaactgtgtgaaggataagattgttcgcatcaagatccaaatcttgatttcatattaacgcctaaggattgcctgtgtgctggaaatatatttgaaactcaaccagtatgcccagcctattgcatatcattgtcagaccatttttgctgctgtggtcacccacgatttcatttgtcttatacccaggtgaaaggggaagggtgaatgggactggctggttcctttaaatgttaacttatggaaatgctagttcaaatggtaatgtcacagtgttttgtatgcagagagcaagagttcaaccaacagctgtttattcatgtgtgtgtgtctttgctgctttgagttctctgtatctactgtgtatgtgaatggtcatgtgggactcagtggtggtgttgtgactttgacctagggtccgagtgtcacagctgatcttggcactcggcactcattggcacagtggtagttagaggtgaaaagtagagctgtcaagcccaagggcttagctttagggctcctcctgagttcggcccacagtagaagcaagattttaactagccccttttcctcttcaccctcccatgatgcgcagtgttcagaaagctggtaagtcctagggatttccagaagtagcctgcagaagaaggtaagtttgaaagccactccaggggtcctgatgctgtcatgctcagtgagccattttacagttctccaaagtctagccctgtttcggacctgcacttcacctctaagttatgtacaactcaacctgcatccctctaaaagtcctatatccatattcaccattggctaatttgaggccctgagtgggccttgaatgctaaaaagaagcagggtacgcagggctacatgtagataccacaccaaggctggaggctggtctgtcataagacagaaagaaagacgctgggcccaattttgacttggccaggggacaccttggtgtgtttgttatctttatctgtgggtaggctagctgacccatctccttgagtcattccctttgggaaaccccactgccagtattgatctcctttttgccttgtactgaatgacacattacctccacactctcccggactaggtggtcaacagggccacagggttgctttctgtctttggtggggcaggggagttgacagggatgagggtccaaggaataagcatgaatgacaagaaaacaagggaaagagttaacctgtcacatagcaggttaactttttcagggtttgcagttagaggtattcgaccattcactggctgagccagatcacgggaacttgagagcttttactgtgattcttcaatgtaaaaaataaacaacaatgtcaaactgtgtttatatgatttgtataaagcctttttaagattactatttaaataaacattataccagagatatttttctgcatcgtggttttttttttttttttttttctctgcattgtctttattggagacaaacagatccgggataagggtgaccaaattgtcccactttgcctgagactttttcaggtttttagcactgaatgtcctgttgaaataggatagttccctcaacccattcacaggactcatgatagggtggcttgcttactcagcctgcagctctcaaccccttgtgggagggggagaacacaggagagcaggcgcagaggccaggatgagcacttttgggcaaccggcaggagcagaaccctgtgcgggcctgcggcagagtctaggggtcgcccatgacccctggagccccagagggcctgtgttacagtgcgctcttctagctttgccatccacggatggcttaagtgttaaacagctcagtgtagagtcatgatgacagcctcttgcacccacactcaggttcttgtct

SEQ ID NO: 98294 - DNA, 4479 bp, Homo sapiens
agtgtcttgcataggactttttcctttctcctccaggctctcatctcagcttcagaatacagaatcctttcccatcacgcacagctttaaaacttttatttaaaaatttccttccccaatgagctttcagaatacttattgtagattttaagagaaaaggtatattaatttatgctattaacatcacctcataaattataagttttatactaaagctgtatcgagtgtaatgaattatgttgcctatgtgtttaatagctaaatatatatgagcttttttttttttttttttttttgacaaaacaaactagtgaagcacctttttacactggatctctgccgtgtcaaggtgtatagctatcctttgctaccttgcagatatataaaataaaaggatatcctggggcctcaaaatgtagaacacctttagaccatttataactgttcctagaactgttgagaatcatgttctttagtaaatgatctgtggtttacacttaagatggctagaagcttagttacagggtacatagaaatacatagatcaagtaaaactccaactactgtagctggaatttgtaaactaagtttgtaagacctcttttatttcctatggagttattctttaatttacagtttattctgtaagttgggaagtaaaatagagaaaataataaatctagatgttctcagtgtcttattcaggaactttttatccctcctcactaaggaattcccactgtgactttaaaatagaactaaattacttgtgtgcatgtatatgtctgtattttttacacacatgcaaaaatatacattgggggcacgtgtgtgagagatatgaatgtgtgcttatataaaaatagataaaggtaaccgaatgtattgtagaaacatgatttatttagttgagggtattggagttactttctcattgtctctgttgtataaatacaccaaattaatcattatgttatcttatgttaaaaggctagctctgatatcatgtgcattttatgttaacctttggattaacttatattatgctatgttcataaaatgacatgagaaacaggaggttctaagatcagcctctcactttcgagcataaaaataagagagggagacagacagccccagacatgagctgtgtttatctattgtggtgatgggaccacagatctattgaatcttttttatgttaattatagatttctttatattcgagtaagaaaatattgttgatcatcttttcttggtgaagttaagaaaaagtataggcctttcataaacaatttttggaaggggctgctttgtttaaggagttggtgggatcatttcaccgtgcatatttcaaagctggggtgatttcatttatttccaaaatttttcaaaaaacttttactcagttctgctgttatttattaacttaagagtgctcccatccccatatttcagctataggaaaattgtgctacccctgattcatatggaattaaaaaaaaatacatccctttattttgagttttaagttgttattttgctatacatttattactggagtatctggtggtctgaaatagtcaaaagtagagttggtattaaatgttccaatgacatttatttttaatacttaaaaaatcatgtactttgaaatatgtcaaagcaacttctgataatatacctgaatttgtagttgtctcttgagcatcatttacttcatcttagatatagtgaagatctaggaaagctctatatgctgttcttttctacagttgtatttttgcagcatctcctggtttcattcactcttgttttgggatttttttttagatctgcatatttcttgtacatatgcatgcaaatgaaagaagggagtttgtactggtgccatttctcccttcagttgctggttaatgggatttgctagaaaaaattctcccggttgaagggtgaaaacagacccttatgtgtatatctgtacagagatgtgtatatgggatgtggtggcactttgctgaatgtgaacttgccttgtcaatggaaagattgaaaagtattatgtttatttatacatttgtataaatctatatatacacgtatgtatatgtgtgtgtatagataaagctatatacatatatttcccttaaaaatgtgtgtgtataataggtaaacagcctttgttaagcaagattaatgtctatggaaagttctggattattctgtaagccagaggaggtgacagtctagagtacatcatcagaacatactaaaatggaagtcctttggattatagttttgtttatggatattacacaatgaatgcttgtctgaacagttcttacttgccagttccactattcttcatcttcaccaccttctactggtcagtctttcatcacttaaaaaaaaaaaaaaaatcacacatcattgtggtttttttcccccttaattctgtctcttctagccagaagcatctggcttaagcatatttcatcaacttctctgttatttcttttaaagatctttatctctgaaattttcccagaagatacaagttttggtaatattatcaataggaattttgagacttgggcattcatctttgtctcaaaaacaaacagaaagccaaccttcaaataaaacaaatttgaaagttttagctcaataatttggggacattttacttaaattacaaaagaacataattatgattttatgatcgatattagtgttaggtttatttccacacttactgtcattaatttgtcatttacatatttttatttgctttgtagtttaatcataacttcaccatttacattttaatggaaagcatacaaggtcacatgttagcctcttgaattctgtaactaactcatttttctcatgatgaaactgctttgatgaattcctgtgtgatgaattctgctatatttccttttgacttttctcagtttgtgacattctgtattaactttgctgcagctctctagaaaacttgcatccctatatattgtgcctttaaagctcttatgcacacacagacaaaagtgtatatatacatgtcagagcatgtgtacatatgctttcgtatgtactcacacagtatgtctctagtatatattgtgggagtagatatatagatattcaaaggcaatgaaatattgctctccagatatatatgtatataaatagtgttgatataactgtatatacacatgtatatgtatgagttttaaatggcaatcttttacatttagcaaaatgctgcccctactggaatattgtcactgcagtggcagttgtatgtaatgatttaaaatacattatcaaaagttatttaaagaacatttaaagtctcatctaaagacatccacacactatttatttatcttccttttccttttattgttgtgtttttcttaactgaaagggagactgtcattttaaaaatgccatctgtcccatgagagtaagaaagagctggagattcacttgaggagctttgtgcatttttcctctctctgaagtggagatgttccacagaccagactgtttatttcacttataaagcaatcctaatatttccgttagtgtatgtcagccaccatctcctagatcaacttaattcaccaatttgcctcctcctttcattaataaataatgattattgagatcattttgcctgggggaagttaactactcccatgctgcagggaaatatatcacctaattgttattttgccttgttcaaaattcaaatttgaaagaaggcagctctctcatgaagctgtcttaagcacattttagttaagggccctcccaaactcttttttctttctttctttctttcttttttttttttttttgcgagttccaagttgcatgtgcttgaaatagatttaattcttattccccacagtttaggtatttttcattagtacatcaatttgacacactgaatgcaagactattaaggaagaacgattaaatattattttattttgtgaagagttggcagcagattacatctcaagaacttgcagagagaggaaggtagatggacaatcctaaattgtaagatgttacaaaaaacagtgaagtaagagtactcctgaagactaaaatagagaggctggggtttgagccattttactgagtagcttagctggaacctgatatcagaagtagcctttaacaaaaagcctcttggcaattgtatggtactaacaactagagtactgaagtgtaagttgaaaccaagttgcagtgggaaatcaaaggtgaggtagcttatttgaaaccagcaaatgagacaggttggacagttttaaaatctcttctaacaaagaaactgcacggtagcaaggactagcggttctcaaagcccttctttttcagtgttctcattcaccttggcacccaagtatgtttaacaggccatgcattaaaaataaatacaaaaatataaaagcc

SEQ ID NO: 98295 - DNA, 4832 bp, Homo sapiens
tcccaactaccgaagaggctgaggagcttgaacgggccttgcaggctgtaacttctctcgagtgcctgagtaccattggggtccttgcccagtcagatggtgtgccagtccaggagttgtcagatagaggaataggggtgttctccacaggtactggagcttcaggaatacaatccttgagccgagaggtgaacacagacctaggggagctattgaatgggcgtatagtacatgataatttttctagtctagagctggatgagaacctgctccgttctgctaccttgtcaaacccacctacacccctggcagggcagatccaggggcagttctctgccccagccaacgttggccttacttctgccactctgatcagccagagtgcacttggggagagagccttcccaggacagtttcatggacttcatgacggcagccatgcctcccagaggccacatcctgcccagctgctgagcaaggcagatgacctaatcacctcacgacagcaatacagcagtgatcactcacactcctcaccccatggaagccattatgatagtgagcatgtgccgtctccctacagtgaccatatcacctctccccacacaacatcgtactctggtgataatatggcagctaccttttcagcagagatgcccatcatggcgcagcacttgctcccaacccaacttgaggtgccacttggaggcgtggtaaaccccagaactcactggggcaatctccctgtcaaccttggagacccctctccatttagcaaccttctcggcgcagatggacatcttctttccacttccctatccacgccacccaccacttcgaactcagagaccacacagcctgccttcgccaccgtgacccccagcagctccagtgtgcttccggggttaccacagaccagcttcagtggcatggggccttctgctgaactaatggcctccacctctcccaagcagcaactccctcagttcagcgcagcctttggccaccagctgagttctcacagtggcattcctaaggacctgcagcccagccacagctctatagcccctcctacaggcttcacagtaacaggtgccacagctacaagtaccaataatgcatcttctccctttccctcccctaactgagggtgtctgtgtgtttgcaggcaggtggggaacccagtgttttctatctttgtttcctctttagcacccctctccccttttcctaaagaagatataacagatggggatcagaggggcaccccccttcccagttcaatgagtggccctgcagtggacctcgctacagtgttcacatgtgctccttagcactggtgctcattccctcctggcaggcccactccgccccagtggtttccttagtggttcagcacagtgactggataggattgatttttagcagcaagtcctagaagtggaagatacctcagaataccagtgccctttactatttcctagtattcagatcagtgctttccattctgttgccaggtttttacataggtggttctagatagaatgatcttattaattgagttcctgtataagagacagcaaatggtgtgtggcaggtcaagattctgacctagcaccaactgctaaacaccacagtgaggccaggattccattcgtaattgtgatcatgtttaactaaaagaaaaaaatgtgtcttttgactgcctgtgagtatgcgtgtgcccacgcgtgtgtttttgtgcagtgcaggaagcagctgtcccattagtttgatttttttttgttctccccttccccctacttaatgagtataaaactcttacttttctcctgtcctacatctcacagtcctaataaggttggtccttcttttcctcaagtttcctgaatagggagggtggtggactggtcgtgtgagtagcacaacctttttctgctaaaagttagcccaagaagaaacagaacatagaaagcttggattcccgtcagtgaggtagggatgtcctaaaaagcttgcctgggatgactgcaggctgccggggttctggggcctgatggtcactttgtcttttcagacatttgtttgtttctaaatccctctctcatggaatacatttgcaagatgtaattaaagaaaatattttgatgtgaaaaagcaggataggtcagatagatttgaaaagatgggatctgtcaactccttgatccatcttttgcttttgaatttttcatgtttacagtagtgattctttggtaagatttgtaaaatgttaagacacttgtagaatcagtgtaccagttgtgaagtgatgtgtaatatctgaaggatacacattttaaagtttctttcaaagcagaatatggaaattagatataaattttattcgccctttggtccttttaaaataattcaagtacttgggtttaagtaaatttgaaaatagctttgggaaatgtttttaaaatgccaggattttaggggttaaagatcatatggggtagtttaggaagtttgtgactatgagatgaatttgtgaggtttcttgcctaccttttttcccccccagagaagggtggaactagattttaaaggcatctctactctgcttttgctgagtagtttcactgtcccttgagataccattggctatttatacctgagtctagtctaattcacatatatatatattttaaaagttgagagaacatacctattgatgtggttcaataattcatttgtcagggaatatttgatcttaattcctttctaataggtagtgattggatgtattttcctacttcctgtatgtaatctctttatgccatgctagttctaaccagtcccttcttttgaaagcttttctttctctgctttttaaaggaatgatggtgatcagcaggcattatgcagataccacgtgcctgaggttatggaggggaaatgtcacatgactgtatgaaatcattatatgccctattttgtatttattgatgtttctttttgtgggccaaaaatatgtttgtaatatatttagtttttttaaaatcatggtaattgattggaagatttatttttaatagctttgccttttttgcagagtgcaaaatttctaaattataacttatgtcataaagcaaaattatatttggtatcaccataaatttctattctgaatggtgagaacagataatttgaatatttctcacctgtgagtctatattagtaagcttttttattttaatgtactgtaatgaagtggtcacgagtagttacctcggctcaaaaatgtcatttagtttgttaaactattttcacaaccatcataagcataactagataactgtccattcccagcagttcagtttagtctccattgtgtatttaaaggttgtcgcagagcagcacattgacttcctcatcagccctttgacaaggaagggaaagtcgtgggtagtcgatttgaactttttctgtctacttgtcccctcatgttagctgcttgaaattcttcagttatgatacaaagctgagtttgcagtaagttgcacattttattgtttgcaattttctgttttatgtgcatttaaaagcccttctctgctttctagtaaggaggcatgaaattatcaggaatgttgctagttacagcttcacaccaaaaactttgagtaaatacattttcgtttggatgcccatgatgaaagctgaggaaagtggttgaggaattatcaacaacaaacttttcctcttattttatctagttcaaaacagatatcaaagtttgcaatttgctttgctcttgctgtttcttatgagtccctttttggaagagaggagaacatctataagcccagagagatctgtgtttttcttttacttaatagagccattctcgtctattagtaggaactttgctattaatatgtatagaaaggaatgaagtggcttttactccagaaatatgaaaattagtatcttttaaaatagcacttatgctatcacaaggcaatactggaatgaaaaacaaatcttatataaggtcctaaataggtagaaactagcttttattctagtgttgaacccaggagaaatagtggcaaagaagtttcactctgtttctgcagttctttgggactatttataaaggccagttagattgtgttactgtgatttaatttacaaagttgctgcagttaatggatacattctgtgctctgagaatctgaattccattctaatgtgtgatattcactggctatgatcagtagtatctgaagaaaagatgggctttttctcctttactctctctacataattattaatattattttaattaaagtacttaagacattgttttttcttctgtaaaaatggcttagcaatttgcacatctgggtaggttatgtagctagtaaacaactcaatagtaagtagcaattatacttaacccaccaagtgacagactatgcaatggaaaaattttctaattatcgtcacatagcttagacagcaaaggattattttctctggtgacctaccatgtgtgatataactgctttataaatgacttcctgagcaatttcatgttggcaggcagtgtggtgtgtctagtgcccctctatgagaagactataatttaatcagaaacaaatagtaggcatggggagcaagttggaaagtgaggttattattttttttccttaaaattggtgttactgtctttagtggcttgaggctaaagaaagctgatactttatctttgccaaataattatttataagatttatttttaaataagcccaatctctcacctgcagttaagaatcatc

SEQ ID NO: 98296 - DNA, 1050 bp, Homo sapiens
agcttgttttttgattttggttgtttttttttttgagacagagtctcgacctgttgcccaggctggagtgcagtagtgtgatgtcagctcactgcaacctccgcctcctagtttcaagtgattctcatgccttagccttctgagtagctgggattacaagtgtgcaccaccatgcccagctaatttttgtattcttagtagagacaaggttttgccatgttgaccaggctgatctcgaactcgtgccctcaagtgatcctctcaccttggcctcccaaagtgctgggattacaggtgtgagccactgtgccctgcctgacgttagcttcttttcatgttgaatgaacttggcttggtggtattgatgtgaagataatgggggagttatgggaccaacagtgtcctctttcccaggagcccatccacgccagagctgagtgctgatgagttgccggatgacattgccaatgagatcactgacattccacatgacttggaattgaaccaggaggacttttcagatgtcctgccacggctacctgatgacttacaagattttgatttttttgaaggtatagtcaatattttgactcaaggaaactggttttaaaaatgagtttataagaaaagaaatagtgttttgagatgtgtttatcatattcctcctcacatgtaatgtctttcactgtagataggaaatataatgccactgcagctattttaaccctttcagaagataaggaatgtgcagtttgtttaaccatctcataatttgctgactaggtttataacttgtttcttttttctttggagacagagtctcactctgtcgcccaggctggagtgcagtggcacgatcttggctcactgcagcttctgcctccgggttcaagcgattctttcgcctcggcctcccgagtagctgggatttcaggcatgtgccaccacgcctggctaatttttgtacttctagtagaggtggggtttcgcagtgtgggccaggctggtcttgaactcctggccccaagtgatccacccgccttggcctcc

SEQ ID NO: 98297 - DNA, 1054 bp, Homo sapiens
atgtgatggaaaatcctttatgtaatccctgacttatcaaatgctgtttaggatacttccatagttaaaaaaatacatggtagaaggccgggctcggtggctcatgcctgtaatcccagcactttgggaggccgagacaggtggatgacaaggtcaggagatcgagaccatcctagctaacatggtgaaaccccgtctctattaaaaatacaaaaaaattagccaggcgtggtggcagacacctgtagtcccagctactcatgaggctgaggcaggagaatggcgtgaacccaggagatggagcttgcagtgagctgagatcgcatcactgcactccagcctgggcgacagagtgagactctgtctccaaaaaaaaaaaacaaaaaaacaaaacaaaaatacatggtagaattaatgcgatccctacaaccaaatttctttaggtggttagcaagaaaaaggtggttaaaaaccagaatggttaaaagggcagctcttagataataaactgttagaattcgctgccctatttctggtatgacctatcttttatgaaattatgctatgtgtttcctcataactgtcatgtcatttactcagactttttagtaagtaaaggtaaagaaatgaatttttttcctcaggggtctctagtcacttaaaatttagaagacactggtatattaagtgtctactgatgccatgctaagaaggctgtttttgaaaacactggattaactctgtccttactgttgaaatactgtacttagttcagctctgttggaattctcttactctaattgtgtgaagtatgtgctcacatgccacaaaagttttaaacctgtgcattcagctacatttcctaattctcgtttaccctgtctaaaatgagcctaatgtgtaatcagtttttcctttctctccctgcactttccaggtcagatgatgatgatgcggagagtaggagctccagggtgactcaactttgcacttactttcagcagaaatataagcacctctgccgcctggagcgggcagaatctcgtcaaaagaa

SEQ ID NO: 98298 - DNA, 1007 bp, Homo sapiens
tagcttagcctttttgttgtaatgtcattttaaaaacccgattgtgtggccaggcggtggctcacgcctgtaatcccaacactttgggaggccgaggtgggtggatcacgaggtcaggcgttcaagagcagcctggccaatatggtgaaaccctgtctctactaaaaatacaaaaattagctgggtgtggtggctggcgcgtgtagtcctggctactcgggaggccgagacaggagaatcgctgaacccgggaggcagaggttgcagtgagccaagatcgtgccactgcactccagcctgggtgacagagtgagactctgtcaaacaaaaacaaaaacaaaccgattatctttgtaagaatagaaatgagattcatcaggagacatttattcacaccatgatagtacttgcaataggtatgttgggttatgttattttgtgtagctttttagtttaaattttgaataaaagtaaactttttctaatttgcaatatctcctgtctaacccaggtttggactggtctgaagagagcggagaggaaccagaggactcagagcaggcctcgccctaccaggttgcatggtccatccgggaaaccctcagatatcaaagacatgcgtaagtcttctgttctgtttttattcttttttttttgagacggagtctcgctctgtcacccaggctggagtgcagtggtgtgatctcagcttactgccaccaagcctgactaattttttttgtatttttagtagagatggggtttcaccatgttggccaggctggttttgaactcctgatctcaagtgatctctccgcctaggcctcccaaagtgctaggattacaggcatgagctaccacgcccggccctagtttccttcttgaatgaccactgtagcagattgatatttcccactatatatgctgatacttttatgttattagatctagttttattgtaaaataaaggtaaaaaaagacttcactctaaaaaattggtggtaaaa

SEQ ID NO: 98299 - DNA, 1401 bp, Homo sapiens
atagagacggggtttcgccattttggccaggctggtctcaaactcctgacctcaagtaatccacccgcctccaaggtgctgggattacaggcgtgagccacggcgcccagccaacttaatgttttataatgtctcttattttcttatttaacctcgttattgggatgttgatttacagtgaagaatccattgcattagtaagggtgatatcttagtattttgcttcctgggtgagctagctttgcttatttctgtttgttaactaggccttttgatatttttatagacaatctgcttcatcctgattctgcggcattccaaactgtggtatccttgggggttctcttaacattgctatggtgcagaagatttaaaatcaggtatggctgtggggccagaagtccctcagtgaaattctcaacttaaatctgccttatactctctgatttatcatttgggtttctttttttgtggtggccttttagctgatgttcacaaggaatagagtcacgtgatgtatgaagggaaacatatacacttctctgaggttgacaataagcccttgtgctcatatagccccaaactgtgcaagcagaggcgactcaacggctacgccttctgtatcagacacgttctggaggacaagactgcccccttcaagcaatgtgaatatgtggccaagtataacagccaacgctgcaccaaccccatccccaaatcagaggatcgtaggtaagggctaatcatgagaatcaatccttgatttcattaacaggcttggaattttttcttttcttgttttttcttctcttttcttctgtccttcatttctccctccctcccttcctccacctatataaatgttgaattctgggggtaatctaagtaatctatggaatacttttaaagatgaaatatggcaattttttaaaatagagtaataaatttggggaattacttaaagtatgtttgagtgtcttctatttaattgatttcatggacttctagaatttttaaaagattttttttccctcaaagttgctgcttgaagtcttgaaacggatttgtttggtttatggccttataaagtaattcctgacttttctacctagttttctcatttgcctaaatgagagaaatttaaataactaattaggtgttataattaatgatagcaattttggagtttaaaatctatgcctagaagttagtaaaggatatatacttactgaagaaaattttaaaaaactacttgaatcagttagatttatttcctatcagacttctcaccagtgtttggcatgttttataaccttaccttttttggttaaaaagtgttccaaatagagtatgtttgccataatttggaaacactattttcacattaagggtcggttttgc

SEQ ID NO: 98300 - DNA, 1150 bp, Homo sapiens
gctgggactacaggcgcccaccaccatgcccagctaattttttttttgtatttttagtagagatggggtttcaccatgttagccaggatggtctcgatctcctgacctcgtgatccacccgccttggcctcccaaagtgctgggattacaggcgtgagccaccgcgcccggcttctaatggtagttaatattaagtgattactatatgctggggttacagttcatgaaatacctaatttaattatcctaggcaactcaatgagatacatacaattacaatcttccctttacagatgagaagactgaagcctaaataacttgcccaaggtcttatacttagtaattagcaaaaccagatttgatccccctctctgatacctaccagagccagtgagtgatctttctgctgcataaactatccttacctttctaatatagcagggaaggaactagtgtaaagttcattgaaattcctaatgcaaacttacttgtacagtgctgtctgagtacagtatatggcacatactagacattcaataagcattattttaaaatattctggttcaaacttgattataatgaatgttgtttatattttcgagtgataagcagttttctcactgcttctttctcttccagtcacatcagttgatagattttcatcattcctcagtctgattttactattttttacataggtaatatagatgtttggttcttaaaatcaatatagtcatctgtttagtgtcttattacattcttatgcttcatcaagttgaattaaaactcatttaaaaagtacataacatggaaaaacgtttttaagactttatgatactctaaatatgattttaacagtatccactctttctgggataagtaaatattcttttcatttgcattaagtatattggaaaacaaacattctgataatttagtaggctcatgttagttttatttattttattttttgtcgagggtttcattacattgcccagcctggtgttgaactcctgggctcaagtaatccttctgccgtggcctcccaaccttctggtattacggtatgagccactgtgcccagcctcacactaggtttttttttttttttttgagagggagtctcactctattgcccaggctggagtgc

SEQ ID NO: 98301 - DNA, 1038 bp, Homo sapiens
ttgaagtgtttttgtgagtccccgtggacggtagtgttgcatggttttgaaggcactgagcagtttgtagaattgataggctcactttagagtcctgggcatgtttacctgacttgattggtaggagcagctgctggttcattcatttaacagattagcttctctgttgtagctctgagctttgcaatagagacacgttctctgcccttgaggagtttttagtctattggagaagaaaaataagctgacatttacaatgccaatgtgaatgttaagtaatagcttagcctggaggaatattcttctattctggcctaaagggcaggctaggttttaaagtgagggctttgcaggggaagtttctgtcctaagcgaatgggaggagttcggcattccataaggtgtgacctgtaagtaggaatcaaagtttagggacaaaagagtatcctgtgttgcaaattgtggttctgttacctcccaggagttggaggaggaggggaataaatagtgagagggaaaggtcagtctggccaggtcctaaggagtttctgtgttaggggaaggagtttggatttcttttacgtgacaagcagaccctgaaagtctttggccacataaattacttgagatttagaggatttgagttatacagagtaggaaaaaggaggacaagactgtaattagaccagtgaggcagctcctgacaagagatttgaagagggtttgaactaaggtggtggcaatggcaattgagaggaggtagcagtggcagaggcatgttaaggaggtaaggcgatctcataggtggactggatgtaaatgtgggactcatcctcacagacggctgctgaaatggtagaagtagacaaatttgggctagtcagtggttcttagtcttggacacttctccagaaaaatccacatatgcagttgtatacatttggtttgaaacctggggtaggcttggtaccatggctcacaactgtagtcccagcactctgggaggccaaggtgggcggatcacttgagctcaggagt

SEQ ID NO: 98302 - DNA, 1023 bp, Homo sapiens
atatccggtcatttagcattgagcttaagaaaatcttgatatttgagattgtatggatctgatacaaaaatgcaaattacatttaatggttgttttaagtttattgattaattgaaattgtttattgacatggacatttttttaaacatgtgtaccaaaaatcgttacttctattatagtttgtccttatttttagagcatatactggatggaaaaaaatcattcttagtcatttttcttggaacattttaaggtttgaaaaaaattgttattgccttataatttgatattttaaaggtatattgttgacttcacattcctaagctttccaaaactatgtgtacaaataccaaaaaagttttgtactttttcccaccctacctcaaacatgtattaatttcctaacctgatcgcctaatgggctactttatttcctgaaggaatgacaggtttgatgtttttaaaagttacattccatttgaaattaataaaagattttcagggcaaatactgaattaactttaaactactaagggaatatgcttttttattattaagtgttagtttaaaaagtaaatggttagtataattacaagtctgaaataatcaagttttctttcctctggaagatttttaggaggaaatttgtatatcccattccaactttttctcagcaaatcatgttgctactatttttagagaaataaaaattttagtttagaaggaattaaacatttctgagagcacccaaaattaatgacatttcaaaaaaatgctaaactatttattcatacctgagatgttctctgagggttagcagctctcactatccaggtttggtacaatggttatggctaatgaaaagtcatttatatttgaatacagttagagcaatattctcagacacttttctttccccctcccccacacctggtaactggtaaaacaatggttgaataggtgagactgggttggaggcagcaaattgtccccagtgctaagtcagtttaacttacacatgca

SEQ ID NO: 98303 - DNA, 1037 bp, Homo sapiens
agagagctgctcctctgccctccgaaacgacaactttcctaccatcttggaggcagagcaaaggggggccagggggaaaagtgcacccgctcccgataaagtacaaatttttacttctcatctctggaaaaaagtccacaccggccgtctacacccgcgcctgggggagaaagcagggaagaaacggggggtgcatgagaaacgttttcatttgctccagggggaaaaatgtttctgcatcttctgatggaaagaaatctttacaagacacaggttttccggtggttattgttttttattttctgtttttaatttttttcatgttagtgacagtgatattttaatatttttttaagccagtaataatttttctccattacagggctaagttctgtggctggtggtcagtttgtaaatttatacttaaagagacttaatagtaacttcatttatttgtctggttatgttattgtatatataaatatttatgttttcatatattgcatataaaaatttgtgttacatgttactctcagaacagattgctgtaagacaattgtaaaaaaacatgtctttcgtctgtttctcaaagcaatgtaaataaaacctatggactgtccagaaaggcatgatacagtgtgtcattttccacagtgcagataaaggcagctatcactggggatttaaaaacggcccctgtttctggaaattctgttatgctgcccatacagaaaggatacagtaaaactggaaagagattttaaagacagccttagatttttcttgaggtaaaatagcttattaagaattatatccgggcatttaatttttttatttatttagattctttaaactctagctagatctttggtgcattacacatgttgctatctgctttttgtgtcacagaattgagaaatgtggctatttttgttagttatgttagttcagaacttccaatgtgctgccagcctgtatgatagactttttgtatattgcagtggatgtcatgaatttacttttttaaatgagcaaag

SEQ ID NO: 98304 - DNA, 1032 bp, Homo sapiens
cttaaagcacattacagacacttttcatcttaacaattggaaaaaacaagtactagcaagtgaattgcttaagattacatagactagcccaattctagagagaaataattcaagtgtatcttattgtcatcttgttgttaagtacagacatattcagatttcaccagtttcccactaatgttctttttcttttttcttttctttttttgagacaggttctcactctgttgccaagctggagtgcagtggcacaatcacagctcactgcagccttgaactcctagacacaagtgatcctcctacctcagcctctcaagtaattgggactgctgacttgaaccaccatgcctggctattttttattttttagtagagatggagtcttgctgtgttgcccaggctgctcttgaactccttgattcaagtgatcctcttgcctcagcctcccaaagtcctaggattacaggcatgagccactacatttgacctaatgtcctttttctcttccagagagttaatctttccttgtctttcatgaccttgacatttttgaagagttctagtcagttacttggtataactgtccctgagtttgggcttgtcttatgttttctcatgattagatgagttaatatatttttggcaagaatctcagacatgatgtcctatcagggagtacatgatgtcaaaatgtgttattacagacagtttatgtagttttgttttctttctttctttctttctcctctcctctttctcctcttctctttttccttttttttttttttttttttttttgagactgcgtcttgtgctgttgcccaggctggagtgcagtggggcaatgacagctcactgcaacctccacctcctgggtttaagtgatcctcctacctcagcctcttgaatagctgggactacagtcatgcataaccaaccctagctaatattttatttcttgtagagacaggttgcactatgttgaacatgctgagtttgaactcctgggctcaagccatcctgccgtctcag

SEQ ID NO: 98305 - DNA, 1031 bp, Homo sapiens
gagcttgcagtgagccgagattgcgtcactgcactccaggctgggtgacagatcgagactgcctcaaaaaaaaaaaaaaaaaggctgggagcaacctagccttgatctgaggtatatcgttatgtggataaagttaaataataatagaacatatgcctttctgtagctcctccagctacaattcccataaagcataaagtggaaatgtattgtgtacttagcaggaactaaacagccacaccctttcatgggatggggcttattttgtatctgcaaacctgggggaaatggagtaagggaaggtgtatgcgtgggcagctgcattcccttgggaaaatggggttattcctccgtaactcctgtgtgtgtcctctgtgaccgttactctctccttgtttatccatcactctcctagccaagtgcatgtgtcaatcttttttcaaaccttttagttccatatgagatgggatgggctccttactccttttactccccatatctctgatggttttcctctaatgtgcttacctaataatttcctctcacatcattcccagtcatacatgaagtgcatcttctacaggttcattgacatcgtgtgtattatagaagtgataaacaactattaaaagtttactttgtctgcacatccttcatttggacttgacttataaaatatattgccctagccagacgtggtggctcatgcctgcaatcccagcactttgggaggctgaggtgggtgaatcacctgacattaggagtttgagaccagcctggccaacacgatgaaatcccatctctactaaaaatacaaacaaaacaaaacaaaatgccggtcatggtggcaggtgcctgtaatcccagctacttgagaggctgaggcaggagaatcacttgaacccaggagacagaggttgcagtgagccgaggtcgcaccattgcactccagcctgggcaacaagagcgagactctgtctcaaaaaaaataaattaaaaaaaaaaaatatatatatatatatatatacaca

SEQ ID NO: 98306 - DNA, 1047 bp, Homo sapiens
tattttaaatgggtaagaatgggattttttggccaggtgtggtggctcacacccgtaatcccagcactttgggaggccaagacaggtggatcacctgaggtcaagagttcaagaccagcctggccaacatggtgaaaccccatctctactgaaaatacaaaaattagccgggtgtggtggcatgtgcctgtagtcccagctacttgggaggctgaagaaggagaatcgcttgaatccaggaggcagaggttacagtgagccgagatcacgccactgcgctccagcctgggcgacaaagtgagactctatcgccgagaaaaaaataaaataaaataaaatgggttttttgacattgttgaaaggaaattattccaaaaatcacatttaattttttacattgaaaatactgcagttatggtaaaattccataattgctttgcaggattgcaagtcaagtagctgctttggaccttggctataagcctggggtggaagcaattcggaagaaccctcccaaggtgctgtttctcctgggagcagatggaggttgtatcacacgacaggatttgccaaaggattgtttcattatttatcaaggtaagtatcacctgtgacaccagaaacaaaagagagtagtacattatgtatgttagaaaccatttagtaatatatttagtgaactgaatgttttccatttgagaattttgcctcccccactcctcctcctttttttttaaacaaaccacaagtgttattagttacataattgatactgcttttaagaattattacctgccgggtgcggtggctcacacctgtaatcccagcactttgggaggccagtgcgggtggatcacctgaggtcaggagttcaagaccagcctgaccaacatggtaaaaccctgtctgtactaaaaacataaaaattagccgagcgtggtggcgggcgcctgtaatcccagctactcgggaggctaagacaggagaatcacttgaacctgggaggcagaggttgcagtgagccaagatcatgccattgtactccag

SEQ ID NO: 98307 - DNA, 1034 bp, Homo sapiens
tttgtgtttttgagatggagttttgctgttgtcgcccaggctggagtgcggtggcgcgatctcgatctcgggtcactgcagcctctgcctccttggttcaagcagttctcctgcctcatcctcccgagcagctggggatacaggcgtatgccaccatgcccagctgatttttgtattattagtagagatgggatttcaccatgttggctaggctggtcttaaagtcctgactgcaggtgatccgcccacttctgcctcccaaagtactgggattacaggcatgagccagtgtgcctgggcatgttgtaaaacttttaatcagaagtctgttaactttttttgtacttgaaaacaagtactgttttattttctgaacatttcattgtggtctttgctgcgtgtaggtttcttggtgatgcccttttcatctgtttctagttgcagagttttcaaggcaaagatgtggcagcaattgcaggtggcttggtggatgctgaagccctggtagctctcaaagatttgcttaatagagtggactctgacaccttatgcactgaagaggtcttccccactgcaggagctgggtgagaaatatgaagctaggatctaggctttcctttctttttttagttacaagttatgtataaaatgtgacaacctggattctccaacatatcccccagtttattttcatatatagaccaagatcaaaccagaagttgtaggaaatagaggaatccacttatcactaagtatctcaggcacagtggctcacgcctgtaatcccagcactctgggaggccaaggcaggcagatcgcctaagtgcaggagtttgagaccagcctggccaacatggcgaaaccccgtctctactaaaaatacaaaaaaattagccagacgtggtggtgtgcgcctgtaattccagctacttgggaggctgaggcaggagaattgcttgaacctgggaggtggaggttgcagtgagccaggatcacgccactgcattccagcgtgggagacagagtgagactct

SEQ ID NO: 98308 - DNA, 1847 bp, Homo sapiens
cacctataatcccagcttttaggaggccaaggtgggaggattgcttgagaccagtagttcaagaccagcctggtcagcataatgagacaccggctctacaaaaaatttttaaaatgtggtgagaggatagtttgagcccaggagttctaggctgcagtgaattatgatcatgccactgtagcctgggcaacagagtgagaccccagggcaaaaaaaaaggtggggggttcttttatttaattgcagttcctctaagcttcattttttaaagtaattcagaaagggaattaattgtaaaaaaaattttttggtaaaccaggtaacagaaactttctttattcccaaaagcaccatagtaaacaccgtatgtgtttctcagaaagacagaatccattgatgtaatggatgcggttggaagtaatattgtggttagcacaagaactggagaagtgatgaggattttgccacgtatgcatgaggacatcaatgaagagtggatctctgataaaaccaggtatatgctatattgttttccttaacttttacagtttatttaaaggaaattttataataattttgaagaattatcttttatatttgcaaattagttactgaatatagactactggaatctgagttgcttatataatgtgataatactgactttaatagtcctaggtcaatccctggatattgtatttactttgagaaagatattttttcctcccacatggagaaattcaagtagattgatacattctcaacttatttcagtttgttcattagagaaaagaagctaggctgggcgcagtgactcacacctgtaatcccagcactttggaaggccgaggtgggatgattgcttgaaaaagaagctgaatagaagagtttgcacaatataattttgataaaatatttagagatactcatgctttgtaaataaaaatgatttgacttttttagctgtcagatttttttgtgttgtaattttaagattgttcagttagctgaaagtataagaaatcaaacttttttttgtatgatttaagggaagaaatcaaactttcagatggtattttagttttaggtgaagttcataaaatctattagttcatctctaaaaatatctggaataattacttgtatctaggtgtttagatatttgacactttaaccagtactgtatttaaataacatttcttgttgatttaacttgaaaattatagttacttctttagcaagattccacaatggtgtaatttctgttttctagatttgcctatgatgggctaaaacgtcaaagacttaccgagccaatggtcagaaatgaaaaagggcttttaacctatacttcttgggaggatgcgctctctcgcgtagctggaatggtaaaatttgaaataaatagtgttaaatagtgtttgtgattatcaagaaacatctttgccatgaagggggggatgtatatttcttcccttttttacttttaccaagattatgatttaatctccttccattttacagacatctactgaggacatatgctagatattatgctattaagggatataaagaccagagacacatcattcctgcatcctacaatcttgtagtagagaaagttgcacaattcagcaattattatatgcagctatgagtaattatataaggagtaatatgagtgagagcacgtaggaggaatgcctaactaggacaggcatatcaagatgccttccttggaggttgcagtgagccgagatcgcaccactgcactccagtctgggtgacacagcgagactccatctcaaaaaaaaaaaaagctgccttcctacagaaggtgattctta

SEQ ID NO: 98309 - DNA, 1022 bp, Homo sapiens
cagtatttccaaatggctgtataatatataaccaggatgtagagttgccaagtagcacattaaaagtgctgacgccctgccatttttagtagagaaaagggttgcagggaagaagttcactttcagtagtttaatttcattttggtgtatgcaatttttttattcaatagtgcctgctaatcaaagcagttatttggtgttctgtttcagagcagaataaaaaattgcattgactattagaataaacctaaaaaccaggatgttttatttctgagataaatgcaaagtactagatcatcgtattatgaatatgaaaacttaacaaaattcagttttaaaaaataccctattctttgcctgttatcaaatgtataatttaatgtttttatataatttaacatttttatatattgagttgcttgtaatcacaaataaatacaaatacacatttttttttttcattgaaatcccaggttgtagctgcttgtgccatgccagtaatgaagggttggaatatcctaacaaactcagaaaaatccaaaaaagccaggtactttattgttattcaatgtagtaccctttcataaagcagaaaattgcacattttggtatttagaccttcccatagattaagaatttaatatcaaactcggaagaagttggtgtgctcagcttctaggagcaatagaagtgagtactacatagtagagaaggtgaagtcaggagtttatggtattgagctttaggatcagcattaaaaatccttctttagtaacttgctcaacttgtgaagaagggtgaatctggacttactaagctactactatactatactgggattgattgtgtttgtttttattttgaattaatgtgaatattttctgaggaccattcagcaacttttgatcattcggtattgttaaaagttacaattttctttattttttgaaacgaggtctcactatgttgtccaggctgggcttgaactcctggcctcaggtgatcatcctgcctcagcctcc

SEQ ID NO: 98310 - DNA, 1023 bp, Homo sapiens
gcataaggaatgtcagctaggatgaaggctgggacactatctgtctttttcactactatacctgcatcctgcacaaaggaaagactcaacacatttttgctaactaaatagtttaaacactggaaattgatgagattgctttagaatgaaggctgaggatgaggaactaactctagaggaaatttgaacatgtttatagactaaaaggaggaagaaattgcagagcagggtaggtgataattggcagagcagggataatcccccttactgggcaaacagaaactgggaaaaccttcagccacagtgggaggtgagtcctgggtagcatataggagccaaagacagatagccagctagataatgtgtagtgaaatctctaatccaaaggaggggagcgaggcaaagaagaagtccaggtatgaaaccactggggacattgtggacaatggttcaaaatggatgtgggaagtcaagtcttcagcacagtggaaggatactttatccagtttcttccacataaggtgaagtcacgccaaggatcctgagatcctctgaggcagcttcagaggagacgggttagaatcaaaggcaaagaaagggactgaaataagaatgaattaagatagatagatagatagatagatagatagaagtaataagatgctgtatgtgtgtgtttcagcaataacagcagtgaagtcaggttattctaatgctttttttttttttttttttttttttacttctaggcttgtgagaaggttggcatgcagatccctcgattctgttatcatgaaaggttgtctgttgctggaaactgcaggatgtgccttgttgaaattgagaaagcccctaaggtacttgatacctaaaattctacaccatgctgtagaaggtagaaaactttaaatcttgcagcaaactttatttagaatcaatatcgtagtggagaacctagccctctttacttctatctataaatttaattcttttgtacaattgattctcttcatttcaaaactg

SEQ ID NO: 98311 - DNA, 1030 bp, Homo sapiens
agagcttactctgtgccagcctggtggataggtactgaagatagaaaaattcaaggaattaatgcagtgagggcagaacgggcttataaacacataattggaaatctgtaagataagtgtaccagaaaatagcaatcaagacacctcaaaggcttgggctggtgagctatctcagaatatctcaggaacatttagtagacagctatgcttagaacatgaaatgatagaatgggtattggtaggaaataaaagcagaaaagacaactttattttacataaccattaatgataagctcactgttagtcttgcagtttattttactgtgtggtagtgctttaagtttgatcctttctatgtcatttttttttaaatggcaaaactgctctctgcatagaattagaaagtccaaatgtatacaatagctgctgctgcttagctctttgacattgtacaagtcagtatctctgagactgagaattctcatctacagactaagtgaaaatatcagaacctatgagtgttcaatgacataatgtatgtgaaataatttaaagccataaaacattaccaaacagttggtgattgtttttttccctacaataatataattctttgttttatttttagcaatatgttaaggatacctgtaagaaaggccttagtaggcctttctaagtctcctaaaggatgtggtgagtattttcttaaatttgcattcgtggatattagaccttatttttgtaaatttataagtctatggcatagtttatcaaagaccctaaacccatgattttttaaaataaaaatagaaaccggccgggtgtggtggctcatgcctgtaatcctagcactttgagaggctgaggcaggtggattgcttgaagccaggaattcaaaaccagcctggccatcatagtgaaaccccatcactactaaaaatataaaaatcagctgggcatggtggggcacacctgtaatcccagctacacaggaggctgaggcacaagaatagcttaaacccgggaggtg

SEQ ID NO: 98312 - DNA, 3914 bp, Homo sapiens
ccttgcattcgacaagtttgtcggcaatttccgtcagccgaccagagggcggagctgaggtcggcccagcccggaggcgggaaggacaacttggacccgcagttccgccggaagtggccccagcctcgaggccgggcgtcttcggtcatctccggcgcttctagggctggttcccgtcatcttcgggagccgtggaggtacgaacttaagacatgcctattttattaatttacttccaaacgcaacgaaaggtccatggacaatttgtgggccatttaattcagggcccccaattcgtacgtggagaagtgggaatgcaaaagtactttgacctttaaccttcggtccggcgcggtggagggaaacgcctccgtctctatataaggaattttccggtctcttcgggtcctttttcctctcttcagcgtggggcgcccacaatttgcgcgctctctttctgctgctccccagctctcggatacagccgacaccatgggtttcggagacctgaaaagccctgccggcctccaggtgctcaacgattacctggcggacaagagctacatcgaggggtgagcggacgggctgagtcggggtggcggggaggtttctccgcccggggccggggccacgtggcgcagcgtgtcggctgccgcgggagggagggaggccgggcccggggccctttcgagagggaggggaaagcgccccgttgccgtctcccaaggccctcgtgtggggcgagcccggcctccggggagcggttcacgagcaaggaaaggttaaaatgtgctttatttacacttaattcagccaggtgtttccgcatcgctgcccagttaatacatgttaagctgtagatagagcaacgccagacattgcagtatttgaggtctacttagtggcagacatttctcaggatagcgcggtgacccaaacatatggtttgatttgaaggagctaataagaaaagaaaagcattaaagcaaccctgctggggttagtgcccactaattaatgtgatgcatacggtatttattatttattcgctggcgtttgtttttcaaaggtgtgtgtgaatgtttctgtgtccttggcaggtatgtgccatcacaagcagatgtggcagtatttgaagccgtgtccagcccaccgcctgccgacttgtgtcatgccctacgttggtataatcacatcaagtcttacgaaaaggaaaaggccaggtaaaatcatctttgtatagagctgaagaataagactgctctcgaagtttatcaggatgttcacatgacaaaactggacccaggctactttagttttgttgggatattgtaagctaaatttttctgtaaccttagaaggccaagagactgaagccctccattttttcacagaacaggtagaacatggacagcagcaattcaacttttccccacactgccctgccaatgtgcctcgaccttgacctggggggcccacctctggggtgagagggtggctcattcattcagtccttggccattcttctgaaactgccaacaagggtggaagtttggggaagtggactccagttcactaagaatggaactgagcatacttaatgaaatctcaaacagaaatgttcatactgaaagagtaaatcatagtgagtattgaaaataatgtctcacatggtactaatgcttgtcgggtgaggagttgaacatatgacagtgtttacctgggcgcatgtgaaagggtaaattatgattgcaaaagggatctagtgataagtagtgattaaaacaagttattttgtattttctggaaaaggatgttatactagctcaatagtggttgaatttaaatgtttttcaagcctgccaggagtgaagaaagctttgggcaaatatggtcctgccgatgtggaagacactacaggaagtggagctacagatagtaaagatgatgatgacattgacctctttggatctgatgatgaggaggtatggcgtcttctataaagaacatatcggccaggcgcagtggctcatgcctgtaatcccagcatgttgggaggctgaggcgggtggatcacgaggtcaggagttgaagaccagcctggccaagatggtgaaaccctgtctgtactaaaaatacaaaaaaatgtggcaggcatctgtaatcccagctactcaggcggctaaggcagagaattgcttgaacctaggaagcggaggttgcagtgagccaagatcgtgccactgcatccagcctgggcgacagagcgagactccgtcccaaaaaaaaaaaaaaagaatacatcgatcagcaattgtatcaatgtggttaagccaaattgcctggatttgaatcctggctttaatttatatgcctttttcaaattctgactggttgcatgatgaataaaatcaaatcaccatctttcggctgagttcgtgatggatttgcttttttctgattaagccagtcttttttgtgatgaccccactagctttaagcagaggaacaaccagctttctgaagtggattaattttttttctttacaggaaagtgaagaagcaaagaggctaagggaagaacgtcttgcacaatatgaatcaaagaaagccaaaagtaggtcatttgtttttaacttcatttcatgttaatgtaagtaatctttttcaaagcttgaccttgaagtaatttcctccacattccttgaataggtcaatattttaaaacctgtacaggttcttccacagctactggtctgcagctgttcttatggtagcagttgtggcattcctctgtgggaaagaaactgttaacacaaacacctctttcttagcaaaacagaaagtgggtatatatgtgtgacagacacaagatgtatctgtagttttgtttggctaaggagatagtctcaaaacaaattgagatggatttgtttgtgtcttggagtagggtgaaaaaaatacaattcattatttgaataatgctgtttattgtttttagaacctgcacttgttgccaagtcttccatcttactagatgtgaaaccttgggatgatgagacagatatggcgaaattagaggagtgcgtcagaagcattcaagcagacggcttagtctggggctcatgtgagtttaggctttgcctttttttttttgaaactaacatctggaatttgcctacagtttcaacctttcctacaagacttttctaactaggatttttcttaatgctctttttagctaaactagttccagtgggatacggaattaagaaacttcaaatacagtgtgtagttgaagatgataaagttggaacagatatgctggaggagcagatcactgcttttgaggactatgtgcagtccatggatgtggctgctttcaacaagatctaaaatccatcctggatcatggcatttaaataaaagattgaaagattacctttggctcttgagtatgttacataggagggtggtgtatatattcctttcattttgggggaaggaattaaatgaatatgtgattcctaaataccccaaatttggtttggcattgttgttagaaaattgcagtgcaggccaggtgtggtggttcatgcctgtaatcccagcagtttgggaggctgaagtggctggatcgagaccaggaggctgataccagcctgggcaatggggagagatcctgtctctacaaaaaatataaaaattagctggacatggtagtgcacccctgtattcccagctatttgggagactgaggtgggaggatttcttgaacccaggaggttgaaactgcagtgagccaaggttgtgcgactgcactccagcctgggtgccagagcaaggtcctgtcaaaagaaaaaaaattgtagtgcaactttacccacttgtgatgtccttagcagtgcctgatg

SEQ ID NO: 98313 - DNA, 1223 bp, Homo sapiens
atatcattgttatgactttacttgattctttcattacattgtattatgaaatatttcacatgacttacatgactttgctgaaacatagcaaattctcgggcttctagctaatttaatgatcaatggctctaatcagagagctcatttgtggttactgttttccgtttttgttttttgtttttgtttttgttttttttgagacagagtctcgctctgtcgcccaggccagagtgcagtggcatgatctcggctcaatgcaacctcaacctcccgggttcaagcaattcctctgccctcagcctcctgagtagcggggattacaggcatgagccaccgcacccggtttgtgggtacttttgatggcattttggatctgggtttcatcctgagagaaaacatcaactgaaagactgctgtgagccacaaaataatggtttcctgctgttacagtaaagctacgctgtgttcattccatccttgacaaagtggcatattctgatcttgtgataatgttccaccaaaggagtttatttattttgcagcaaaagatttgtgtagattagttcatttcttgtgatgaatatcagtacaacataatcaggctacttgctatgatctcactgacctgctgtaatccaactggctaaagaagcaatcagttgtttttcttaggaagagatacattttgtttactctcttaagtttgatgaatatatcatttactgattgcttgagaaataactaaaaagaagtggtcataatgtgggaaattagtaaagagcatccagtgattctgagcagattccacttaccatacctagaaaacaggtctctattttcaaaaatcaatcttttatttatttaaggctgaaagatgtgtgcatattcttgtaaatgttcaaataacaagttaaaatagctaaacttttttttaacttactgcattttgggaaatctaacatatttctgaggaagtctcgaaatacgactttatttctttcttttttggaaacagagtctgtctccaggctagagtgcactagcacaatcatagctcactgcagcctcgaactcctgggttcaagtggtcctcccacctcagccttcccagtagctgggactacaggtgctcaccaccacacccggctaattttttttttttttaaatttggggtagagacagggtcttattatgttgctcaggctggtcttgaactcctggg

SEQ ID NO: 98314 - DNA, 1083 bp, Homo sapiens
cttccctgcatttagccatctaccccttgttgggagagcccagataccaattattctaacaagaaattgatagcgagattcaaaaaggcaacaacaacaaacaaatgggaaggcccaacaaaccacaagcctttcatcgtaaaaatggggagccagtggcggggagctgcattacaactcaatttataacttttttcccaccttgtaatctaaagagggcaatatcagctttcatctcggagtaccatttttttctactagtttctcaacagtgagccttccacaaatgatgtttgactatttctagatcacaactccttaaaagacagatttatgagctgtaattatgtaggtaaaagctgagaaaattactgaaagttctttgtccgcccaccccagcaacatgctcattttctctcttgcagtgttttaggattaatcagcagctgtagcgaaccctgtaggatcgtccctaaacacttttgccaagaccaaaaatatgaatctgcagacagagcattttgtaaacgatcaggagtccttttccttttttgccagctggtagttagtcaaatgctgttttgtaaataaatcatctgcaggaatcctcatcaggtccactgtaaatgtgtcagtttgaggaaaacaaacaggaaagcacttaccagttaaatttctgtgaggagagaagctattgtcatgcctgggtgtaccttcccggttccagaatgaaatggagggtggtgttcagaacggctgcattcctcattccacttttatctggcttttgaaatgacagtgtagagaagaatgatgttgggttttgaatgtggttcttcccttcccccacccccctccataaaaattcatcatgcaatcctggagaaaagtaagcaatgaacatactgtacaaattaattctttcgaccagcctatgtttgtgtaagaagtttgttttttgaatggaaaccactgctactagctgttctgctgcagactgaaaatcggtaatggatgggggtcacccagccctcctttgtctgggtaggcttttgcttatgaaaaggcaagttaaattagcag

SEQ ID NO: 98315 - DNA, 4195 bp, Homo sapiens
acaggtgtgagccaccacacctggccgctatctttatttttgtatggtctaacttcagctcaaccatgtgatacctgaaattgcacattgttaggccatgaaaggtcagctgccagagaagcacaggattttgtttttttccgctgttaaagaccaagtctaggaaatctaaagcaggaattctcacggtggaggtcgggggtagggggtgcactttttcaaactacaaatatccctctgccctataagaatgtataggcttccacacctacccgcaatcccttgattcaatcttggcatatttttcagtgttttgtgagaccggatgaatagatgtcgtcagtgaagggggtacttagtagagctctgctagtttccattcctttgcgttagcagtattagtatttactatagtctatactatgttctgtaatccacaaaatcacaatttcatctgtaaaagccattattgaggagaatctcaggaagttttggttactttacatgagtttatttttggctatagagcaggaaccattgagtagcaaagaatatgaaaagcgacaagagaaatgacattgatcaaggattgtcctatgtgccacgcatagtttaagcacagtacacactgaaacccaggaaagtgtaagcatttttatgttttagccaccacctaaaacaattaaaacatatgcttgcttagctttgaaattagtctaagaaacaataaataaaaggaataataaataaaatatctctgcaaatgtgccttatagtttgaggtatgtttgaagagcttccctttgacaccctaaggcatgacttgcagttgatctgttatgcaaaagtagctgaagtgctcaggtgtactagagataagccacctgccacctctgagcattaagggtatagtagataccagccaggctgtttggtgcattggttaagctggtgggtcagttaattggagatctattaagagagccttttgtgtaagtggcagagttggggtttggctccagacgttctgacttcaaataccattatcttaagaaacttaaccattgggctatccatctccttattggaagagatatttatagaattgagtgtatgaggggaagggatagcaaaacttctgccaggtagaaggatttctggacagttttgccactttctaaaaaaccatttgcaaattttctgaaggctgttatggctagtatttcaaggggtttcttttcatattatttttatttttaaaaatagagacaggagctgggtgcggtggctcatgcctgtaatcctagcactttgggaggtggaggtgggtggatcacctgaggtctggagttcaagaccagcctgaccaatatggtgaaaccctgtctctactaaaaatacaaaaattagccagaagtggtggcgtgcacctgtagtccccagctacttgggaggctgaggcaggagacctgcttgaaccaggaggtggaggttgcagtgagccaagatagtgccactgcactccagtctgggcgacagagcaagactccatctcgaaataaaaatagagacagggtctcactgtattgcgcaggcaggtcttaaactcctgggctcaagtaatcctcctgcctcagcctcccaaaatgccgggattacaggtatgggccaccatgcctggtctcaacaggtttttgacagaagaatgtgtgcaagcaggtctatagggccaactgggctcagagatggaagatacacaatgccgctatcatattattctggggactaggatctcccatttcatacaaatagcatttctccactaatgcttgaactatcactattagaaaactgttcttttgaagatattacattgtaaaagagaagatttatattaatctaatgaagctttaatagtgagaaaggtttgggcgattttaagtgggtcatcccctcccctcccatcaaccccatgagaaaaattggggttgccaacttggcctttcatcttttgatatcattaaggttagcattattctttctctttcttgcatgacgttaaatagcacatttctcccaaacatctaaaaactctgatgatagaaattttagaaatagacatttgggagaatattatatcatcaagtcatattaatttttgtcagtgatcattctaatctttttgttgttgtttgaaaaaaaaaatctatccggaacaaaagcattggaagagagatatacaaaaggacactttcttacaaagaagctgatttatgaaaaacaaagacacttcaatttttttcctcctgtcatacagggtgatgactatcttgtgtaaatgcctttcttagggctggctcttcagggtagtcacattggagattagacttaggaggcccttacttggttaaactgtgaggctggagacacacaaagctttttccagagactgaaatggactcacatggcaggctcagtagccctgggggtcacagcgaggaaccatggcaacccagccatacagggacgttttcatccacttaaagcagagaattcttaaaggcttctaaatgaggacgaagccttgtctagattcttgcttctaattctgttttgcccgatgcagaaagtgattcttgaggatacttagtgggaaagtctgcggaggacttagttctccatcttttccactaagatttccgaagttctaattacctgtagaaatgtggggaacagcttctgttttatctctaatttgaataaaccttcacttttaatatgccaaatacgaattcaaaagagatccagatacaaagcatttttaggttggttttcttaactacaatatactggctcagacacaaggcatgcgcggggtgtgaagctttggggggcaaagcaagcactcacctctctgaagttgccggtgcctgtggctgctgcgggaaagtgcgtggccaaagttttcagggctctgggctctgtctgaatccttgtggtttaatgatttctctgggaggacgggtcacagctgccctgagtctaggaagaagtatttcctctctttgcaacaaagggaaatacataatattttaagttattgccctggaaaaggaaatgtggtttgccagtggttaagtaaatctgttgtacatcagttagtcaacagcatctgggtgacaccattgttggccctgatttaagagaaagggctgctgtggacattcaggtcactcccaattacctactctaattatgctacttttctcattaaactgcagataattgtggctatgatgtaagtgtatctggatttttccaaaatgccacattttaggaaaggaaaaggatcagataagacagcatattttctcaacctctttaaacttgttcagctgctacttttgcatttttcattaggaaattggtagcctgggggctcactgcagctgtgaatgtgttttgtttgtgaagcagtgttttctagagtttgaattaatttccaacatttagaagtcagaaatcttagccatctagattatcggctcctcatgaaaaaattagcagatctgggtacactgggcccatgtcccaacagggatactgttcgaggtgtctgcgtagtggcttactcccagcaccacctgcccgcttttggcagggcattgcatcccagctccacacctttctcctctgtcctcctcactcatggacactgtctggatcctccagcaatttacactttcaatttttgtatctttttctaattcttttcctattgagtttcttccatttaggaaaattgaatatgcagaataagtcactgggtgcttatttttactgcataaggagctttagatttgttcattaaaagaaaatgaatccccagtgtttccctagtaaaacctgaatgcattataaagcattatggaattaacaaaaccaaccttgctgagcttaactatggaatggaagtatgacgaaaggccgtgtagtagggagcagtccacctaggtataggcaataaagggactactgtctgtagggaatttaaaaacgataataaaaccaactaaagcccttctgctttttgttggcaccatgtgccagcaattctcaagtcaatgatgaaatactcctcccctcaagagacctcttgttggttttggtttcagttgtgaacaattactgtgat

SEQ ID NO: 98316 - DNA, 1034 bp, Homo sapiens
gctggagtggaatggcacgatctcggctcactgcaacctccgcctcctgggttcaagcgattttcctgcctaagcctcccaagtagctgggattacaggcacctgccaccaagcctggctaatttttgtatttttagtagagacggggtttcgccacgttggccaggctggtctcaaactcctgaccacaggtgatctgcccacctcggcctcccaaagtgctaggattacaggcatgagcactgtgcccatccaaaacctttttttttcaattaaaacagttgcagcgaggcatggtggctcacgcctataatcccagcactttgggaggccgaggtgggagaatcacttgagtccaggagttcaagaccagcctgggcaacacaaggagacctcattttgaaactgacaaaaatcattctcaaccctccccccgccatttagagaaaccagtcttgacattttggcatatttttaatatttaaaaaatatctatgtgagattaggtcatacatggagttttatagcctacccattttacttacatcatgagcattttttcgtgtcattacatattattcacaaacatgcttttaatagctgcataatatcatactctacagagttctttaaggcattttaaaaagtgacaactaaatttattgccacacacaaaagtttcagtgctgtcaaacctgtcttccaagcaattactggtttatcttatgctgaaataaagtattatcaagttgtatcctaaaggataagtacattttaagaaatattaaagtaaaagacaaaaccttagcacaggctgcaatttaggcaaaataaaaagagaatctggtgttatctgtcaacaatttagaaagctttttccataaaattaaataatgacgtgatatgtcattcactgtacttgtagcagcataattacaataatgagacttatttaatataatgagactatattttaaaaatgttattccaagcatgctacttcgtggtgctttgctattaagctacttaatatt

SEQ ID NO: 98317 - DNA, 1023 bp, Homo sapiens
atgaatctgttaagaaaagttcactaggaagattgtgtgaaccagttctttggaagaatgaaatttgtagctgctttaagatcatgcaaacggccaagtgtggtggctcacgcctgtgatcccagcactttgggaggctgaggtgggtggatcacttgagcccaggagttcaagaccagcctgggcacatagcaaaaccccgtctctacaaaaaataaaaaaattagcccagtgttgtgacacatgcacctctggtcctagctacttgggaggctgatgtgggaggattgcttgagccaggaggttgaggctgcagtgagccgtgatcacgacactgcacgtcagcctgggcaacagtgagattctgtctcaaaaaataaaaaagatgatacaaattattacaaccttaggactcggtgaagctcaataacatttattgaatgtattatttacttgggtacataaactccttaaaattgagtgtgaactttttctggagaaaagatttgtagtttcatcagattctcagtggttgggtttgtgatcaccgcccccgccatccccaaagattaaaagccatgagtatacttaaaagataaatactctgggtcacataaatctaccaacatttaacctctgtcctgttgctgtacatgcgtgcatttgtactttaatggtaacagaaacaaccccaccaccaccacctccataatgagcctgaggatcgcattgccaagttgacatccatgcttttgtgtgtatggaaatgggttttatactcagatggatataggttcgagtccctgttctgctagttaataattatatgacgctgattcaggaactttatctcctgtgttttattttctctcctctaaaatgagagtcctacctcctatgttgctgtgaggattagaaagaatgtatgtgacctccttagaattccttctttactctcataactctgttacaggacttaggttgctgtgttgattggggttcacttttagagaacagaatcta

SEQ ID NO: 98318 - DNA, 1367 bp, Homo sapiens
tgtatttttagtagaaattgggtttcaccatattggtcaagctggtcttgaactcctgacctcaagtgatccacccacctcctcctcccaaagtgctgggattacaggcgtgagccaccacacctggccttaatttttgtattttttatagagacagcatcttgctatggtgcccaggctggtctcgaacccctgggctcaagcaatcctcccacctctgccacccaaagtgctgggattacaagcatgagctaccacacctggcctatgtattacttctataattaaaaaatagtaaaagggtgcccgggaggtgatggccaccccccagcagtgtctgggctctcctggcaggtgtgatgcttcagtacatctgtggtcagaccattgtcaagcttgtgaggcctcctgtttaggtacacagtatggaaggtcgctatgccatggctctttattctgctgcatcgaaacagaataagctggagcaagtagaaaaggagctgttgagaatagcacaaatcctaaaggaacccaaagtggctgcttctattttgaatccctgtgtgaagtgttccattaaagtgaaaagcctaaatgacatcacagccaaagagacattctctctccaaccctgatcaatttgcttgctcaatatggttgcttaagcaatacccaaggagtcgtttcttctttttctatcatgatgagtgtccaccgtggagaggtaccttgcacagggaccactgcatctcctttagaggaagccacactctctgaattaaaaacagtcctgaagagcttcctaagtcaaagccaagtattgaaattggagggtaagactgatccgtcaatcatgggtggaatgattgtgcgcatttgagagaaatatgttgacatgtctgttaagaccaagattcagaagctgagcagggctatgcgggaggttgtctaaaagtattggttttctaccatcactgaaaattcttaaacttggagcaacaataaaaagcttccagagcagaaaaaataataataaaaatactacttgaacaaaataataaataataatctttagcccttcaaatttctacttttcagccaggcatggtggctcacgcctgttttcccagcactctgggaggcttgaggtggatggatcacttaaggtcaggagttcaagaccagccttgtcaacatggtgaaattctgtctctactaataatacttggataaaaattactagaatacacacggcagattaacattcagtatctacctaatctctttctagtgtgctctcttatattgaagatgaaagatcaaagaaaaaaaattctacatatttcagactcccttgcagctagggc

SEQ ID NO: 98319 - DNA, 1020 bp, Homo sapiens
ccttgtgatccacacccccacccttggcctcccaaagtgctgggattacaggagtgagccaccgtgcccggctgattttctctttaattccaaagccgccagcaagttcaggagataaaagcttagtcaaataaatttttggttaccatatggaaaatgtcatgttgatataaattatttattctatcacccaactatattgataacattaaacatggcctttctatctgtcattctgccccaatgagactttcatttctttaacattatacaaagtaaaatcatctacctctggaatgattttatcattattaacacacatatacatgcatacttatttatggttctttatatgcactaaagaagctgggaaaattttagaagatagtaaaatgaaatggttcttcctttcttgtctgggaggggctccttgctctggaatgatacttcatatataaatacagtgtttctccgtggtcttccttttggatttttggaggttggatgggaagggctgaatttcggcacacactgaaaacagcttatcttgtaggagggattataatatcccaaacattgtatataagtggcattttgagatttcctcagaaatgtattaaaaacagagagaaaaaaatgattgtagcaagtattcagccattttacctttttattcaaatatttagcaatttcttgggcttctagtaatttagtgatcaatggctccaatcagagagttcattcacaggaatattcacactcatttgtttcagccttaaataaataaaggttgattttttaaaagaggctgtcttctaggtattgcaagtggaatctgctcatattgattgggttgctcttcagtaatttcctacagcatgcacatctcttcctttttatgtttttctcaagcaatcagtaaataacgtattcatcaaacttaagagagtgtcccaacagaatttcgttggaaaagctgggtttctttcttgctgaggtatacagttgatgagttcttta

SEQ ID NO: 98320 - DNA, 1033 bp, Homo sapiens
gcagtttttgttttgctttttcagacaaggtcttattctgtcatccaggctggagtgcattggtgggaacacagctcactacctactcagcctcctgagctcaagcgatcctcccacctcagcctctcaagtggctaggaccacaggcacccacgcactacaccgcctaactaatgttttgttttatattatattattttattttatagagacagaggtctcaccatgtcgaccaggctagttttgaactcctggcctcaagcaatcctcctcccacctcagcctcccaaagtgctaaaatgataggtgtgagccactgcacccggtgattttgcagtttttggaaaccacaagtttgatttcggtgtgaatattttggaagaatctatgaaacaaatgcacttcatctgatttctcagtaatgttgatgatagatttacttctgaacctcttggacgtgtgtatgttagaagttctccacccaattgatacggaattaaatagctgtgaaattactgtaagaagaaccgaagcaacgttggaaatttggtaactaatgccacgttggaagctattcatgccaatgtagcattgcttcatacaggtacttccagatctaattgaatacatccagtgggaaatttcgctttgcgtgattttttggctatccttctcataatggaccccagttttagttgtcagagtaacacaggcacagctgcttgaaggtcttgaaaatgaggttaacaaatattcagcttttggtgggagtttttctcaagttgttggaatagaatttggactcaattcagatgcggaactgggacactgaatgatagataacagatactgtgaaagttcaaggaccatacgaaaaaaatttaccttcttgctgctataaacaatatattgcacatgggaaagatagttacgttatgcctgatagttgttcttgaatgtttgacacagaaactgtacaagtaccttccacagtcatcatgaatcacttttaatcgataaaaattttgtaggg

SEQ ID NO: 98321 - DNA, 1165 bp, Homo sapiens
cccacaattattttaaaataatgatttggatggggcatgtgcatgaatccctttatgcttaaagaaaacattttactttttaaagacctaacatgccaggcttcggggtaaaagctttataatgacctcacctgactgtaaataggtagaatgaagcacacagtaatagaatttgggaaaagacatagtccacactctaaattggtgaaatctcaattcttttatgacccagctatgagatcttgttttttccaaatagcctttccttaagacattagcctaatattagcttaaatggcttacaaaatgtagacattattggagtgctttctagacacaaaagagcaggttttggtgttccttaaaagaaggaagcatgtgaaataacacatactcagcacttttttctccctggaccaaatatgttgggggaggaaatgaagtacatacaaacccaatcctgatctctaaggtcctttaaatatgtttagatgtgtaatgtgtttagatctgtaatgggttaataaagaattgagggggaaattacaacttttggagcttaaccttatagataactaagctctcccacaaaacgtgcccattgccagtagacggaaatctggtttgtgcggactgctgatctgatgcagaatggcactccctttgatgttttatgatagtatcatgttggaagaaaaattttgccaactaaactataacacaatttcttgtaatttagtgtttttctttttttcttttcttttttctctttgagacagggttttacactgttgtccaggctggaatgcagtggtgcgatcacggctcgctgcagcctctacatcccgggctcaggtgattcccccgcttcagcctcctgagtagctgggactacaggcatgcaccaccatgcctggctgatttttttgtagtttttgtagagatgaggtctcgctgtttcccaagttggtcttgaactcctgggatcaagcgatcctcccgccttagcctcccaaattgctgggactacaggtgcgagccaccatacctggcctatttttatttcatactcagtaaaagagcactctcagactttgacacatttattatgcattgatcttgtgaatgcataaaaagagacatataagtaaaattggtttaggta

SEQ ID NO: 98322 - DNA, 1004 bp, Homo sapiens
ataagtgaagtaaattagtggaaaagagaccaaattttaagtaagtaatgtcttacatgttttttgtgtcagaggctggtttaattgattaattttcctcataaatgtgagaagtcagaaaatcaatttctcataataagaagtaataggtaagtaaatattatgctagcattttgacttaatgaagcttttttcccctcatcttatggttttaaggctgtgatttcatttttcagttattgattttaatgattaaattttttccattgcagaaattctcataacatgttatagaatgattgttatatattttccaacagataagaatgcttaaattaattgaaatacaaaattatttgtaattctgttttcggcttaacaaagcagcaaataaactgcattaaattttttacttaaaataatcataaattatatgtacattgtgtcagttaatacattggtagggcatgaaaattactgggggaattttaaaaattctgaatcctaggctcaccctagctctactaaaattttgggtattcagcctggtttgggaaccatgcagtatgtaatgttgaaggattatacttttaggtgagtggaaactggaaaactatttatttgtagagaaatctaaacagtaataggaaaaaaatccctcctatttatctggcttacataattgtcagaagaaaagtgttttgtgtttcagaggctaaattagttgttctgatttttagcaactgtgttggataaattatttaaaaacctgcctctctatgagctgagcagaaaatgccatgtggtgtctttacactcatgataacagagaatgagacgttgtcaaataatctggggtttgatatggaaacatgatggggaaattaatgagctccattagagtatagtaaatataccataacaatatcttagaagtaattggtcttcgcaaattgaatattgtattctttgttactaaatcaatatctaatatctctaataag

SEQ ID NO: 98323 - DNA, 1030 bp, Homo sapiens
ggccggtggctgcatggatgtggggaggtgggtgagaagtaataggcaaagaattcagacaaatcaattctgtattttagattcagggggtatatgggcttgtttgttacatgggtatattgcatacctgctggggattgggcttctagtatacccattacccaaatcggagaagtcgattctttaagacattgtaggctaaggtaaggactttgaattttatttcaagtgagatgggagagcatctcaaagtttgagcataggagttaaatcgtctactttgtgttttaaaaggttcattctggctgctgagggaaaaatagttggtatagagatttaaaaattttgttattgtgatataactcatacaccataaacttgaccctttaaggtgtataattcagtgatgttttattatgttcacaaagtggtacaaccattgtctaattccagaacattttaatcaccctaaaaggaaaccctgtacgcactgagcagtaactcactcctcccttctgtcaccagcccctggcaaccgctagtgtatttcctgtctgtatagatttgcttattctggatattgcgtgtaaatggaatcaaacgttgtgtggccttttgtgtctggcttctttaatgtagcgtaatattttcacggttcatccaggctgtaacatgcatcacgacctcgttcctttttatggctgacaatgttccattgcatggatatatcacattttgtttattcattgagcaatttatggatatttgggttgtttttactttttgactgttatgaatagtgctgctatggatatatgtgtacaagtttttgtgtggacgtatgctttcacttttcttaggtttacatgtagagtggaattgttgggtcatgtggtaattgtgtttaacttttttgagagggtgcctcaccgtttgtcaaagtggctgtaccttaccaccagcaatgtatgagggttccagtttctccacgttcttgtcagcacttgttgttgtctgttttgttttttgt

SEQ ID NO: 98324 - DNA, 1055 bp, Homo sapiens
aactagaacatatttctcctatctagctttaattttgtattcattaattatcctctcccaatttctcttccctgacttcttcccagcttctagtaatcagcattctattctctagttttacgagcacaactttgatgacaagattttcttcttttatggctgaatcgtattctactgtgtatatataccacatttcctttttgtgtgtgtgtgagatggagtcttgctctgtcacctaggctggagtgcagtggcatgatcttggctcactgcaaccttcgcctcttgggttcaagcaattctcctgcctcagcttcccgagtagctgggattacaagagtgcaccaacacacctggctgatttttgtatttttagtagagatggggtttcaccatgttggccaggctggtctcgaactcctgacctcaggtgatccacctgcctcagcctcccaaagtgttgggattacaggcgtgagccactgcgcctggccccttttttcttttatctgttgatggacacttagattgattctatatcttagctattgtgaacagtgctgtagtaataaacatggggatgcagatatctccttgatatactgatttcctttcctttggataaatacctaatcagtaggattgctggaccatatggtagttatatttttaggtttttgagaacatttatactcttttccataatgactataataatttgtattcccaccaacagtgtgtaagaattcccttctctgcatccttgccagtgtgttattttttgtcttttcgataatagctattctaattgaagtgagatgatatctcattgtggttttgatttacacttccttgatgattagtgatgttgaacattttttaatatacttgttggccatttatatgactttttgagagatgtcttttcagcttatttgcccatttttaagttggattatttccttttgttgtcattgagttgtttgagtattccatattccaggtattaatcatcttttggatgaatggtttgcaaatattttctcccattcttc

SEQ ID NO: 98325 - DNA, 2263 bp, Homo sapiens
atttggtttgctattaataatattttgttgacaatgtttgcagccttgtatttcaaggctttggagaactgtaaaagcagtgaagtaatatggggcccatatctagtgaagtatttaacagaaacaatggaagccaaaagaaagaaaacaactgccacctagaattctctactcaatacgtatatcttttaataaggaaggtgaaataaaactattttcaggaaataaaaattaagggaatttgtcaccagcagactctcactaaaggaaaaactaaaaaggagttcttcaggcagaaggaaaatgattcccgatggaagctcagagatacaggaagtaatgaagaacagtggaaaggtaaatatgtaggcaatcaatctaagtgaatactgtcttgtgggatgaacaacaatggcatataaattgggaggggagtaaatgatgttaatttctaaggactttgcattgtttataaagagaataaaagtaacaagtaattttaggcgttgacagttcagggttgctcattgtaatctcttaccaaaatagactatgaaaagtctgtaactaactacagagttaacagaaaaggaaaaattgaaatgatgaaacgtagtccacaagaagacaagaaaggagaggaaaagggatagttgtataggcaagagtaacagattgaaaaagttaaatacaactctatcagtaatacattaagtgaaaataggtttgatgcttgaattacaactgtattcaatattttgtcagaggtcctagtcaaagaaataaggaaagaaaaataaaaatgataaagattggataagaagaaataaaactattatttatacacaacatgatggtggacataaaaactaaaaagatatctagataaaccattagaatcaataagtgattttaaaaggttgttacactaatgtaaaaagaaagtgtatttttatatacagataccatgcagaaaatgagataaaaaatcatttacaatagcatcaaagaacatcaaaatctagggaataaacataagaaaatgtaagatctttaaactagaaactataaaccttgaaagaaattttcatgttcatggattgaagaatcaatattgtaaacatgtcagttctgcctagattgttatatttatccaatgtaatttcaatcaaaatctcagagaagtatttttttttaatgaaaagccaattccaaaaataaatgtgggaaagtaaaaggctcagaagaactaggataatcttaagaacaaagtgaatagatgtcctctatcagatactaaaacttatgaaactttagtctttagtctttaaaatagtgcagttttgctgcagagttagaaagaccatggaaaaaaaccaggaattccagaaacagacacatttatggatgtctgatttgtgacaaaggtgctgcacagcagtgaggacaggactttcttcaataaatgatactgggtcaattgaatattcatatggagaggaaaatgaaactttattgccgaatcaccctgcatataaaaatcagttagaagtagactatgatttggctacatgttgtagccaaaatagtaaagcttctagaaacaggagaaaatctctatgactttgatggtaaagagagatttctggccacaaaaagcactgacaaagaaaaaaagataaaaccggactgcaataaagttaaacaatggaagatgattaagaaagtgaaaagaagctgcagagaggaagatggtacttgaaacacatataattgagcaaagaactggtgtcctgaatagggaatttctacaagtccataaggaagagacagaacatccatttgaaaaacagagagacttgaacagacccaatgtaaaagaggatatccagatggctagtaaatatgaaaagctattgcaaaaattacagattaaggccacagtgatataacaataaacatccttacaatagctaaaattaaagagactgacaatagcaagtgttgataaggagataggaatactgctggtagggaatataaatttgtacagccactttggaagactggtcggtagggagtactaaagctgaacatatgcaaattttatgaccccgaagtttcactcctaataatgcactcaacaaaaatgcatgcacattggcaccaaaagacacatacaagaaggttcttcatagtattattagtaatagccaaaagctagaaacaacacaaatgtccatcaagagtagaatgaataaat

SEQ ID NO: 98326 - DNA, 2767 bp, Homo sapiens
gttacagccagatgtggctcgaaaatattaaatggaaaattccagaaataaatgggcaaataaattgcatgttattctgagtagcttgatgaaatccttcgctgccactcattgtcccactcaggacatgaatcatccatttgtccagcgtattcctgctgtctgcccattagtcactcagtagctgtcttggttattagatcaactgttggatatcacagtgcttgtgttcaagtaacccttattttacttttattacagtatattgttataattgttttatttcattatcagttattgtcattaatcccttactgtgtgtagtttataaattaatctttatcataggtatgtaaggaaaaacatatataggtttggtactatccaccgtttcaggcatccactgggggtcttggaacaaattccctgcggataataggggactactgtaatttcttccatttacttgtctgtatgtttttaaactgtagtttgacatgaaaccatacgtgtggtttttgcattcctcatttttttctaaatccagcgccatagactgctcggccacaccacactcattttttcttaatatgtaacgtttccccatgttattaaaaattttctaaatccagcaccttagaccactcggccacactaccacactcattttttcttaatatgtaacgtttcccatgttacttaaaattctttgtattattttagatagctgcatagtattacatcttagagcctattataattgaagtcttttactgttagaaacttaggaggtttccagttttttgttatgctatgataatggcatcttttttgcatgaatcatttacctttaagactatttccttaggctgtacttagggaaatctcattattttacctaagggaaagtagttttatggtttttagatgcaaatttcagaattgctttatagaaaagctttcaattcataattttaccaagagtatagaaatgaatccattttgtcgaactctcactactgaatactgtccatttaaaaatattccatttcttttttctttatagcatttgttcagtgctcagcacaggagtttgaccagacagagtagacgtcaaatatgtaccagtagtttgatggaacgtttcttacaggatgtactgcagcaccacccatatcattgtcaagagagcaggtaaagtagttgattggaataatatttatacgtagttatatgttacagtaggtgtttgtgttcatgtcccaatcaatactttaagtgaatctttgagtcaaggaatataaagtaaaattttagtaactttcatttgcaatttaaaatttttcttagctgaagtaagaaatttcactacagaagatatggactacactatgtttttttctaaataaaagtcttaggctaataattatatatcattaagatgttttataagtatgttataggattaagcagggggaaaaggaggaagagatagttttttttgtttgtttgtttttgagatggagtttcgctcttgttgcccagggtagagagcaatggcacgatctcagctcaccgcaacctccaccacccaggttcaagcgattctcctgcctcagcctcccgagtagctgggattacaggcatgtgtcaccacgcctggctaattttttgtatttttattagagttgaggtttcgccatgttggtcaggctggtctcgaattcccgacctcaggtgatccacccgccttggcctcccaaagtgctgagattacaggcgtgagctaccacacctggcaaaatggtttttaaaaggttagcaacagaaaaactggtgacaatagcagagtaaggacaatcaagtcaaaactgagtcaaatccacattaatagaactctttgctaattctgaggaaaagaggtagccaaaagaattgggtttttaaatctgtctgtattttgatagcttttcttgtatccatttgttttagttgtttttaataaaaataattattttgataacatttaagagttaatgccctatgttaaagaaaaacattggtagaaaatcagattaaatattataatatgtttgtagctcccgctgtacaagataaggtaaaaatcgatcattagcacatctgtgcagttaactgagatgtgcaccagttagtagaaaaagggataaacttctttgccttgcaaatcactaacatagaccttagaaatggcaaaaatattttaatggggaaaagttagaggaaaacaagatggtttcttagctggtgggaagatagaattagcctatcctggggtcagtataaatttccaggttttttttgtttttgtttttgttttttgagacggagtcttgctgtgtcacccaggctggactgcagtgacatgatctcaactcactgcaacccccacctccctggttcaagcaattctccctgccttagcctcccaagtagctgggattacaggcacccgtcaccatgcctggctaattgttttgtatatttagtagagactgggttttgccatgttggccaggctggtcttgaactcctgaccccaagtgatctgcccaccttggcttcccaaagtactgggattacaggaatgagtcaccgtgcccagctccaatgtataactctcataagcagtgcttcagcaaacatgtttttacatgaattttttttttcttttttttttgagacagagtctcggtctgttggccaggctgtagtgctatggcacaat

SEQ ID NO: 98327 - DNA, 7279 bp, Homo sapiens
taaccagtacccagttactgagtattcaggttgattctagtcatttgctattacccctccctccgctcaaaagtagcagtaactattcttgtacgtgttcattaaacacatgagaaaaccaaaagtggaattagaggtcaaagggtatgtacattcttaattttaatagacattgccaaattgctgtttgtagaggttacaaatctacatagaggttaaccagtaactgttaactgatctatattcctatgaacaatgtattaaagtgcctttgtccttacacccgcaccaaaacaatgtgttaagataataatagctaacatttgtgaatgcttactgtgtgccaagctgtttctttgttttaatgctctttacatgtaacaattaatttactcatcaaaacaatctcatgagggaaaatagtgtaagattccctttttttggaggcagaaactgaagcatacaaagttaagtaacatatgtcaaactttttgctatttactactctgataactgaaaaataatatatgattttatttgtttagtttttcatgtttaggggccatttgtatttaagtagcaattggtggagccacctccaccttctgcagtaattccccctctgtggtccatgcagtgttcagcctggggtgactgcctggattccttgtcctttaaggatagtccagaacagaaagcaaataacatttattatgcctctattttaatattttaaacagacattagaatatgtttatgagtttcccccctttcgttttagttcaacacaagatgagacacatgtgaatactgggtcatcgtctgaagtggtgcatttggatgatgctttttctgaagaagaggaagaggatgaggataaggttgaggatgaggatgctaccgaagagagaccatccgaggtttcagaacctattgaagagttacattccagacctcataaatctcaggaaggcacgcaggaggtttcagttcgaccatcagttattcaaaaactggagaagggacagcagcagcccttggagtttgttcataaaattggggccagtgtgagaaaatgtaacctagtagatattggtcaggctacaaataatagaagcaacttggtacgccccccagtgatttgtaatgctcctgctagttgtttacctgaaagctctaacgatagaccagttacagctaatacaactagtttaccaccagcagctcatttggattcagttagcaaatgtgacccaaacaaagttgagaaatatcttgaacagccagatggggcctctagaaatcctgtgccatcatcccatgtagaaactacttcattttcgtatcagaaacataaagaatcaaataggaaatctttacgcatgaattcagataagttggttttgtggaaagatgtaaaatctcagggtaaaactttatcagctggcttgaaattccatgaacgcatgggtactaagggctccttaagagttaaatctccttccaaattagcagtaaacccgaataaaactgacatgccttctaataaaggaatctttgaagatactattgcaaagaaccatgaggaattcttttctaacatggattgtacccaagaagaaaagcatttggtttttaacaagacagccttttgggaacagaagtgctcagtgagttctgaaatgaagtttgattgtatctctcttcagtcagcatctgatcagccccaagagactgcacaagacttaagtctttggaaggaggagcaaattgaccaagaagataactatgagtctagaggttcagaaatgagttttgattgcagttcctcttttcattcactgactgaccaatctaaagtgagtgccaaagaagtaaacctttccaaggaagtacgtactgatgtacagtataagaataataaatcttatgtttctaaaataagttctgattgtgatgacattcttcacttggttaccaaccaatcccaaatgattgttaaagaaataagtcttcagaatgcaaggcatattagcctggttgaccaaagctatgaatctagtagttctgaaacgaattttgattgtgatgcttcacctcagtccactagtgactacccccaacaatctgtaacagaagtaaaccttcctaaggaagtgcacattggtttggttgataagaactatggttccagtagctctgaagtaagtgctgattctgttttcccactgcagtcagtggttgacagacccccagtggctgtcacagaaacaaaacttcggaagaaggctcataccagcttggttgataactatggatcgagttgttctgaaacaagttttgattgtgatgtttctcttgagtcagtagttgatcatccccaactgactgtcaaaggaagaaacctgaaaggtagacaagtccacctaaaacataagaagcgtaaacccagtagtgctaaagcacatcttgattgtgatgtctcacttgggacagttgcagatgaatcccagagggctgttgaaaagataaatcttctgaaggagaagaatgctgaccttatggatatgaactgtgaatcccatggtcctgaaatgggttttcaggctgatgctcaattagctgaccagtctcaagtagccgaaatagagcgtcagaaagtggatgttgaccttgagaataagagtgttcagtctagccgttcttctctgagttctgattctccggcttctctttatcattcagctcatgatgagcctcaagaagctttggatgaagtaaatcttaaagagttaaatattgacatggaagttaggagctatgattgctccagctctgagttgacttttgattctgacccgcctcttctgtcagttactgagcagtctcatctggatgctgaaggaaaagaacggcacattgacctggaagatgagagctgtgagtcagatagttctgaaataacttttgattctgatattcctctttattcagtaattgaccaacctgaagtagctgtttatgaggaagaaactgttgatctggaaagtaaaagtaatgaatcttgtgtctctgaaataacttttgattctgatattcctcttcattcaggaaatgatcaccctgaagtagctgttaaagaagtaattcagaaagaagagtacattcacttagaaaggaagaatgatgaacccagtggttctgaaataagttcggattcccatgcccctcttcattcagtgactaattctcccgaagtagctgttaaaaagctaaatcctcaaaaagaagagcaggtacacttagaaaataaggaaaatgaacctattgattctgaagtaagtttggattataatatcatttttcattcagtgactggacgttctgaagatcccattaaagaaataagccttcacacaaaagagcacatgtacttagaaaataagagtgtttttgaaacaagtttggattctgatgtccctcttcaggcagcgactcacaaacctgaagtaattgtcaaagaaacatggcttcaaagagaaaagcacgctgaattccaaggtagaagtactgaattcagtggttcaaaaacaagtttagattctggtgtccctcattattcagtaactgaacctcaagtagctgttaacaaaataaacagaaagaagcaatatgttctagaaaacaagaatgataaatgtagtggttctgaaataattttggattctaatgttccacctcagtcaatgactgaccaacctcaactagcttttttgaaggaaaaacatgttaatctgaaggacaaaaacagtaaatcaggtgattctaaaataacttttgattctgaacaacttcaggaagcggttaaaaaaatagaccaatggaaggaagaggttattggcctgaaaaataagattaatgaacctagtacttataaattaatacatcatcctgatgtttctgtccaatctgtggctgatcaacccaaagtagctattaaacatgtgaaccttgggaatgaaaaccatatgtacttggaagttaagaacagccaatatagttgttcagaaatgaatttggattctggtttcttgggtcagtcaatagtcaatcgacctcaaataactattttggagcaggagcacattgaactagaaggtaagcacaatcaatgttgtggttctgaagtaagttttgattctgatgaccctcttcagtcagtggctgaccggctgagagaaaccgttaaagaaataagcctttggaaggatgaagaagttgacacggaagataggagaaatgaagctaagggttttgaaattatgtatgattctgatgttcttcagccagtggctggccaacctgaagaagtagttaaggaggtcagtctttggaaagagcatgttgacttggaaaataagattgtcaaacctacagattccagaataaattttgattctcatgaaccccttcagtccgtaactaataaaattccaggggcgaataaagaaataaatcttttgagggaggaacatgtttgtctggatgataagggctatgtgcccagtgattctgaaataatttatgtttcaaatatccctcttcagtcagtgataaaacaaccacacattttggaagaggagcatgccagtctggaagataagagcagtaattcttatagtcctgaagaaagttctgattccaatgactcttttcaggcagcagcagatgagcttcaaaaacctgtcaaagaaataaatctttggaaggaagaccatatttacctggaagataagagctataaattaggtgattttgatgtaagttatgcttctcatattcctgttcagtttgtgactgatcaatcttctgtacctgtcaaagaaataaacttgcaaaagaaggatcataatgatctagaaaataagaactgtgaagtctgtggttctgaaataaaatgtcattcttgtgttcatcttcagtcagaagttgaccaacctcaagtgtcttacaaagaggcagaccttcagaaggaagagcatgttgtcatggaagaaaagaccgatcaacctagtgattcagaaatgatgtatgattctgatgttccttttcaaatagtagttaaccaatttccaggatcagtcaaagaaacccaccttccaaaggtggtacttgtggatctggtgcccggtgatagtgattatgaagtaatttcagatgatattccccttcagttagtgactgacccacctcagttgactgtcaaagatatcagctgtataaatacagaatgtattgatatagaagataagagctgtgacttttttggttctgaagtcagatgtaattgtaaagcctctactccctcaatgacaaaccaatgcaaagagactttcaaaataataaaccggaagaaggactatattattctgggagagccaagttgtcaatcttgtggttctgaaatgaattttaatgttgatgcctctgatcagtccatgacttacgagtcacaaggacctgatgagaaaatggtgaaatatattgattcagaagataagagctgtggatataatggttctaaaggaaaatttaatttggaagacacttctcatcgaacgactcaccgactgcagaaagctcacaaagaagccagtcttcggaaggatccaagaaatgctggcctaaaaggtaagagctgtcagtctagtgcttctgcagtggattttggtgcctcttccaagtcagcgctccatcgaagggctgataaaaaaaaacgttcgaagctaaaacatagagatctagaagtgagctgtgaaccggatggttttgagatgaattttcagtgtgctccccctcttccatctgatactgatcagcctcaagaaactgttaagaaaagacacccttgtaagaaggtatcttctgacttgaaagaaaagaaccatgattcccagtcaagctctgttctcaaggttgattctgtaaggaacctgaaaaaagcaaaggatgtcatagaggataatcctgatgaaccagttcttgaagccttgcctcatgtacctccttcatttgtggggaaaacatggtctcagataatgagagaagatgacataaaaattaatgctctggtgaaggagtttagggaaggtcgtttccactgttactttgatgatgactgtgagaccaaaaaagtttcttcgaaggggaaaaaaaaggttacctgggctgacttgcaaggtaaggaggacactgcaccaactcaagctgtgtcagagagtgatgatattgtctgtggtatttcagatattgatgacttgtcagtggccttagataaaccatgccatcgtcatcctccagcagagaggcctcctaagcaaaaggggcgtgtggcttctcaatgccagacagcgaaaatcagccatagtactcagaccagttgtaagaattacccagtgatgaaaagaaaaataattagacaagaggaagacccaccaaaaagtaagtgttcacgtttacaggatgacagaaaaaccaaaaagaaagtcaaaattgggacagttgaatttcctgcatcatgtactaaagttttgaagcctatgcaacccaaagccttagtctgtgttctttcttctttaaatattaaactgaaagagggtgaaggccttcctttccctaaaatgaggcaccatagttgggataatgatattcggtttatatgcaaatataaacggaatatctttgattattatgagcccttgattaagcaaattgtaattagtcctcccctgagtgtaatagtaccagagtttgagaggcgtaactgggttaaaattcattttaataggagcaaccaaaactccagtgcaggagataatgatgctgatggacaaggctctgcttcagcgcctttaatggcagtgccggcaagatatggatttaattcacatcagggaaccagtgactcttctctgtttctggaagaatcaaaggttctgcatgctcgtgagcttccaaagaaaagaaatttccagctaacatttttaaatcatgatgttgtcaaaatctctccaaaatcagttagaaataagcttttggaaagtcaaagtaaaaagaaaattcatggaaagagggtgacaactagtagtaataagctaggttttcccaaaaaggtttataaaccaattattctccagcaaaaacccagaaaagcttcagagaaacagtcaatttggattcggaccaaaccaagtgatatcattagaaagtatatttcgaa

SEQ ID NO: 98328 - DNA, 1181 bp, Homo sapiens
aaaaatctgttgtcagtaggctaaagaaggcgaagagaacagctaaagtgcttttgaactcttcagttccaccagctggtgccgaagagctgtcaagcgctatggcaaatcctcctccaaagcgacctgtgcgggcttcttgccgcgttgcaagaaggaggaagaagactgatgaaagctaccatggccgacagaaaggtccttctacacctgtgagagcatatgatctgagaagctcatcttgtttacaacaacgtgagagaatgatgactcggctagcaaacaaactgagaggtaatgaggtaaaatagaagttggttttgtgttcaggctagttgaggattcagtacttcagttgaaatatatttggtactttgtgcacacagctttcccagctttggtgagaaaactaatcttgaactattttgctataaatattatttttcagaatttttatattcatttaaaattagtgtttagagtcctttcattttaagattcagaaacagcctttgtccaacattttctgtagaagaacttcatcttaatttatgtcacaaaataatttagcaccgtatatagaattttgttcctcaaatcatatccctcttattttttatgattatctctctcatgccagcaaatttaacattgtgagaatgaatatagcaaacttattaaaaagaaggaattataatgaattatgtcaacttttgaatggggttgacttaaatgaatacaaacaaaatataagttttctttctttttaaagcattccagaaaatgagattccataatctttaatacagtttttaaaaactggtgattttttttatgcatagcacaaactcctcctgcttcatttaaattggatctgcaagtctctaacttttatcatttggacacatgcacacatacagtctctaggttttttgggttagccttattagatcttaaaggggaaaataattttgcccatgtgtttaggcattcccccccttttttttaaccacctttactctcttctacatgaagagttggtggcttaatatgaaaatccaggttattttgtggccttatcccctaaaaatattttaggcattaccatatcagtttttatttttatgtttatttattattattattttttgagacagagtctcactgtcttgcccaggctg

SEQ ID NO: 98329 - DNA, 2246 bp, Homo sapiens
gttggtacagatgcattcagttgtcattcattcgtgttaagccaagatcctggatcttctatcattaatgttaagaggaaacatgaattacaactatattgtatgactgccatattttattgaaactaaggtcaatgttgaaccatatcttgatttcagaatttaaaatgtgttaccttagaaataatgaaatatagtgtaacagttggtttctaaatgtggttttatttcaggggccattatttaacctgtgtgtatgctatgatggagttcttttgtgatttctttacttctaaatttaaatagtaattatgtttaaaaacaaatgtttttgtctttagttgcaaagcagcatatatctcatttccttcaaccttgcctcctcatacacaaatatattttcatttcttaaaagatcactgggccagtagttcaaaataatcctccaattttaatttaggaacaaagctttgtcctactgactaggaagtaaacaaacagctgatatataagatatttgtgggtattggtgtcttttttccctatggaatagacacatagttcccttaaatattattaatagacattctacagtctttcagtgtaagtttaaaagcaagagatcaaatgaaaatgtgtactatgtacctatgatgtgtcatatcgtgattacatcatgcagagagaacagttcctgtaattcaagtaattaaaatttcaagttgtaaaaatgttaccattttcacattggaagcccttctaagtaccattttcattgggggcagggagaaggtttatatttaaattttatattaccagacataaaagtacagtgcagtactgatgattttgtttaaagtttttgaaatgttttgtttactaagttcttgtaatcattattttagacaagcttgaaaacttgaaattgttgaaacttataatttaaattaaattggaaattactttcagaatttggtagtatacaagatgtgcccctttgtctaaataaatgttggcttaatttgcagaatagataaaacaattgatgtttttgtgtgttcaagaatgcattaaattcttttaatagtaaaaagtcaaattacgaccataatgagtattttaatcttgttcttgttcagtattttgcgtagatttttattgtaattgtcctgagttctacagtatgtgaacaatatcgtgtgaagtgtgtttttgcatttgtgcatttaaattatttatgtaactagggctgtgagtaacactttttttttttttttttggttaaagaaaagctatatttaaatattcaaataattatatatttccatgtaaaactaatgtgaagactaatgtattttttatattgcagtgtaaaagctaaacttgtttttgatgttatcaagataaaatttattaaaccttgaaatttgtctgttctctcttcatgttagaaactttttctgggaatacttgaagaataagagaataatggcctgagagataataaatgagagaatgtaaatgttgatgccagtgagaaagtagtttaaccaaagatatacagattatattcgatgcagtagttatttcaaaggattaaaattaaaccatttatttgtctggtggagtggtggattagcagcttttcactttgtgtacctgtattgaaagggcccgtgaacaagactgagttcatgaggctgtatctatatcactgtttgacacctactggggagggagaacttgggagcctccactaccacagcaagtattataaaatacaagaaaacatgagaaagtgtatgtgtgtcagtgaggtaggtgcctttggcaccagtagtactgacttccagagtttgttggcctagatgttattgccaggataaacaacatcctaatctttttttttttttcctttcttgaggcagagcctctctttgtcgcccaggctggagtgcagtggtgcaatctcagctcactgcaacctccgccttccaggttcaagtgattctcctgtctcagcctcctgagtagctgggattacaggcatgcgccaccacacccagctaatttttgtatttttagtagagacggggttttaccatgttggccaggctggtctcgaactcctgacctcaggtgatccacccaccttggcctcccaaagtgctgggattacaggcatgagccatgacgcccggcccctaatctttataataaaaaatcatggtcgggcgcagtggctc

SEQ ID NO: 98330 - DNA, 1605 bp, Homo sapiens
agatcaagaccatcctggctaacatggtgaaactccgtctctactaaacaaaatacaaaaaattaaccgggcgtggtggcaggtgcctgtagtcccagctactcgggagggtgaggcaggagaatggtgtgaacctgggaggcggagcttgcagtgagccgagatcgtgccactgcactccagcctgggcgacagagcgagactctgtctcaaaaaaaaaacaaaaaaaacaaaaaattactacagtgaaaatgtaaaatggaagtccattttcagcaaagggcttctatgtaaagaaaatatagtttgttgttgaatctttaagtaatataaacttaaaattttctgtgtttataatttattacatgaatgttgtaatttatttccaggtttaattattttaaggttaaaaggtgtgtgtgagtgaacatcttgagcccttgctgagtgccagagattgttctaagcttttaacctgttatctcatttggtcttcaaaggacctttatgagttagatactgtaattttcgcaatatattaaatgagaaaattgtggcatattgtagtttatagttaatcatcattcccaccccccagttccaagccagcactaatctactttctgtctttatagtatatccttttctggatagttcatatgaatggagtagtaaaatatgtggcctttttgttggcttctttcatttaccccgatgttttgtcattgtgttgtagcatggatcagtattttgttcctttttattgcagaataatacttacagttcgtttttaatgaaaataataacacagacctggtctcctggtagcaaatatgagaaaaccactaggtttgggcctagctgttccctttatgcctctcctatgtgttatccttggtaactgcccagacccaagaccagacaggaccattgccttctagagttctcttattccatacctggatgcttgtgcttcctcccttggactttttgtccctttactacccttcctggcattcttttcactgttctgtgaattctcattttcagtgtcaacacattaccctgtgttctcagtgctttcacagtgggttgctggcaggtaattggaatctgagaattttatccaagttgcccattattctaatctccataagccacagagccaggaactgctgatggtgtactggttgtggcgaacactcttttttgaaaattactctcttacataaccacagcacatgccatcaaaatcaggaaatcagcgttgatctgataaaaccatctactccacagaccttgttcgggtttgggggattattccagaatgttctctcctggtccaggatttgatccaggatctactggcatgactctaattttcttcagtatggagcagttcctcagcctttctttgcatttcatagcaaacttactgaagataactagttttttttttttttttttttttttttggtggaaactcagtttaatgtttctttataatctgcttttgtaggggaggagcaaaaattctgtattcttagtgttttgtaactggagccgtgtgatgtcaatttgagtaaatatgatagaagatatcca

SEQ ID NO: 98331 - DNA, 1005 bp, Homo sapiens
ctcgtccttctcctgctgcctccgctcgccgcctcgtcccggccccgcgcctggggggctgctgcgcccagcggtgggtatggccccgtgccctttgcgttggctttcccgcggggccctgcagaggaaagcgaagggcgcgcgggtccgtgtgctccgggcttgtccccggctcggcctttccttccctccctgcctgtctttccacccttctcgttcccaaacccccattcatcccagttcacttttggaagtccatttctgttgcattcgcgaaaaacccattccaattcttgttggttccactgggaggtgtttagtggatcctgggtccctcagcgatctctgtgcaacttgcggaggggcaaccagtggatgggaaatacagcgagggagcaagttgctacttgcgtggtggaaccttaatgtgaatgcggggaggatgtagtgataatagtggtaatgggctgtttcctcaaatttcgtatccggcgcattcagtgcggttggaattaaggtgggggaggcacacttcggggaccaaagaattaaggtgctgaagacatacttcatgcacgacctttggttctgatttctcaaagtgcttgtcattataatgaacaattaatataataccatcttctatatattgatgattggaagtcactgaaagcagaaagctggctttgtcaggaaaataaaaagaaattgggaagctgccagcatctgtatccctacatggcaaagtatgtttgctcatcttaaagttaaaagagaagggaattgtccattttgttaaaagagtcgattaatattcggtatccataaattcagtactcaagttatcttaggagcgttcttagctcttggatgggatgccactaggcagagtagagttgtgcttctgtggactcagagaaggggtggagatcgggggcaggacccctgaacatgttcatttaatgactcttcttccctcaagttcattctaccccccccccaaca

SEQ ID NO: 98332 - DNA, 2981 bp, Homo sapiens
tgagttcacaaattttactgcagcattttattaagaaagcaattaatattatgataggggagaaactggaaggaattaacttgggatctactgggataagactgttgtttctcttctctgactaaactggaactagaattttctgatacctgaaatgatatccatgtatctttcaggtacattgggcactgaacagtagttaagtgaatgtgtttatgattctaacttgtttctgtgaggctttatgtaagggtgcagtattctgccttgatataaaactgtctcccatgatataaaaactgctttcaatctgcacatgcaagattgcttcaagaagctatttggctgcagtgtctccatcagtctttccacttagaaattgagtgtttaaacagtctgtttctttaattgatcagtaggaggaaaaaaaaattttctgttgtattttcaataggtaaacaatttgacatttaaaaagattatggtgactagacacaaattatttgcataatatgaagaccaattttgattggcataattcttcagtacctactctgcattgattatgagcagttgctttactttcaggttagttcagaaagtggaactgatatttaccaaggtatcagtagaagacaaatgtttaatatccaaagagtttaagggatctttttccctgtgttactattctttacttgaattaatattattttgaaccccgagcagatttaaacaatggattatcggttcttctgttgtttatcgggagcagaaaatagagtctgtatgttaaatgtttcattttgatctgtacttgttcaggtgagaacaacagttagcaattaactgtctaaacatctagaatttaagaaagtatctgcagtttacatcattgttttttattagttttctaaaatataggtgagtggtaacagtatttatccccattttacaaatggggagctagaaatttaaggcttttgggtgattttcctatgttgtaaagcagctaatataaaattcaggtgacctgaatgtttaatttttactattttttacaagttaggtctctgagaaagtgctttcttcaccttgaatattactggagaggtgaactttctttcacattattttgaagtggctgctacccaccgtgagataaatgtgtctctgttctcagccagcccttttctccataagctcctatataacttaatggggtgactaataggtcatgtctaactcatttgtcttattgataggagaaatgggtgttgtctttaaagaagagaaatccaaggcccttttgataaaatgcattgaggcttttatagctttccttatgaatgagaccttttagagttaagtggttagttctcaaactccagcacctttgcttaggatgctggaggaaggaaaaacagctgcctcaaagcctgtttcaaagaatgctcaagccctcctcagcagagacttgaaatttcagtggcactttttaataactcagatgtttgaggctatgactaatgcttgccttatagtttaaccttatgtggctgttttctttggtgggacgtggtttgactgtaatatacctgacttccgtgataataaggtttgttaaacctgtacccaccgcttacctagaggaatagttgggtttcttttatactgtactttgaaaagaatgtttctacagaaatcgtatttgaaagcatttttcttattagtttaactctataaacatttgttgcacctttctcatatgcaagcggtatgctaagtattcaaagataagagataaaggttaaaaggatgaaaagacatgatctatcctccaggaggcaggaaaatgagataagcaagattctaaaagtgctcccgtacaggtatagacagtgttgttgtttggtgggtgccttgaaattaccctttgtgttctgtgacctcccttttacttctgtttttaagcatctcttgaagtagttgataaaaagtgttccatctgctttctgctgtatcttaggatgacttgcttaataacagtgatgagagacacttgccagttctgctgctttagaaatgtttcagtaagaaagtatagaatttcatttctgcttttatgtaaagaagtttttaatatctgtgttatgtacctttttttccctctcctgatttcattgcactgaagcacattttaatgaaagccttagaaatgctgaatcactgtgcctttctcatggatccctagactgggggtagaggtggaaatggaaattcccaaatataggttgcaaggccaagctccacatttatgtctgaagaaatttcgtaaatgttcaatgttgatcaatctttattactttatagctgtgaaagttaacatgtttattaactcttccagaattggtgagtgtaaaagcagattgtgcaaaccacctctttgcatcctaatgtttctgaatgccttaatgtttctttgtcaaacaatgttgaaaaatcttttttatctgcatagagtgatgtataaccagttgtccaaactgtgccattttttaaagtagaagtgggcactcctaataattatgccaggttagtaggcataaaccaaggtagtctagagcaggcagggagttttgacaccttggatccaaatgctgtattccttgatttttggtgcttactcaaattcaagattctttaaagacaattttattttctgatgatttattataaattctttcttgctagctaggaagtcagattcctgccgtgtagcagtattagggtctgaaatggaaaaatttaattttgctttgtgtgatattgtgaaatgtatttggtaattatcctgtttcctggtacacagcttcgaagaccgttggaatctccagagtgatgagtgtctttcatatgccaatgagatgatgggtggctgggggtccctaaatagcttcaggatgggagctggtcaccagaaa

SEQ ID NO: 98333 - DNA, 1036 bp, Homo sapiens
acaaccccaaagagagaggcagaaggttgagttgatcaccaatagccagtgatttaatcagtcatgcctatgtaaggaagcatccataaacacccaaaagactgggttctggaaacttttggatagctgaacatgtggaacttcctggagggtggagttcctggggagggcattgaagatcctcgccctatgtgtctcttccatctggctcttcatctgtattctttgtaatatctgttatgtaaatggtaagtgtaagtaaagtatttcctgagttctgtgaaccgctctagcaaattaatttaagggaattgtggctaccctagtttatagctgatctgtcaggagcacaggcctccatctggggcttgagattggcatctgaagtgggcatttgtaggcttgtgggactaggccttcaaccagtggatctgacgctgtctccaggctaagagtgtcagaattgaattggaggacatcgaggtggtatgtgatggagaatctgcagaattacttggtgtgtggggaaaaccctcccatacgtcagatgtcagaagtgttgggttaagtgttgtgtgagactagagaaggaaaaaacattgcttttttcttatatctcttactttgttatcaagatcgatcgttttcacttgtggagacttttatgggcgtaaatggaattgtatgattactaaatataagcattttattaaccattaatgcaatatattaataaaatggaccatacattttaaaagcaggagaaacactttagattcattcattcattctgagataatcctatgtggtctgttcctaggagagttaaggaagcttttcctgaaactttagtcaaaaactacttgtcctgctgggcgtggtggctcatgcctgtaatcccagcactctgggaggctgaggcggttggatcacctgaggtcaggagtttgagaccagcctggtcaatatggtgaaaccccatctctactaaaaaaatacaaaaattagccgggcgcagtggtgcgcacctgtaatc

SEQ ID NO: 98334 - DNA, 1104 bp, Homo sapiens
tcctgctaactatgtaactattagtgtcattctgtcttcacttattctcaggctttgttagcagggtggaccactgtccttctctttacagttggtgaaaaaataacccaggaggccaggtgcagtggctcacacctgtcatccaggcattttgggaggctgaggtgggaggatcacttaaggctaggagtttgagagcaactcaggcaagctagccagaacctgtgtctacaataagttaaaaaaattaaaaagaaaaaataacccaggagcatttgcccaatggtgatgccctgtgtgaaggtaaatcatgcaggaagagagctctccttcctgccttcctcatctttctcagccatgcccctcagttttcccagctatctaagagtgaaccttgggagtcatctttgactcctccctctcctgcctataaatagtcgctgattaagtcttgacgtgtctcccatgactccatccctcccctcttctctgcattgtgttcttgtcatcgcctctggtctctctctctgtcaatccatcagtcccactgctgacagattaatctttatggaacacttatttcatcatgtgactccctttatccacattcagcaagcataatttcagctagatgaattttcctcttggagccagggagaggatgtaaaagtctcttgagaagaactgctgctttccttcttacaccacacatttgctgttcccttctcctttcagcacttttccaggcctgtttacccaaaggtcagtccatagcaggttataattttggatgattctattcatttctgtccaaaccctggggctagttatagaaaacccctgtgaccagtggcaagaaccgaatctatcaggaatgtgttcttagactttcaagtccaaattctgttaaattcctgcttcagaacatcatgtcatctccatctttaagatctgaataattaattgcttgtagaatatcagttttctaaatgaaaatattttattcctttcaagaatgtatacaattataaggctttattcatacaaagtattcagttcacaattgatatgggcaccctttaaccttatgaaagactcattcat

SEQ ID NO: 98335 - DNA, 1264 bp, Homo sapiens
gcgtagggacatagagccaaatcatatcaaccctggactggtgactatgagagcaggatgtgggaaatccgtccccatgatccagtcacttcccaccaggtccctccctcaacactggagattacaattcaacatgatatttgcatgcaggcacagagccaatcatgtaaaccttggaccagtgactatgttgctcttgagctttgatctgtaattatatagctgggcacactcacttttgcttatctgcatgacagtgagggagtcatcctgccacattaaaaaaaaaatcttagatggtagtgagaacaaggtagtcacgtattcctggaccacttctttttgccctcagtggggctaaagattaaatttagaagtagtcaaatccaagcacagctagagacatcataaagaacattccagagtcatggagatagaggtttttgagtatctgttgaattccagtgcctgttttagaacctcctttcccttagtgtggttatttaataatttactgcatcaagttgtagtctgaatcacttagtcgggtgctttgtgctgtcttttaattgtaagcaggcctgctaataccatatactataatagctgtattgcagatgggctccattaacaatgtgaatcaatcaatgcttaagagagtcctctctccccatgtttatccttgctttttatgttttcaggtaagtagaatgcatgaaatcaactttagctcaactctccaatgcattggtaataaatataatatattgcctttctatggaacctgaatggttttattgaggcactttcatatctataatctcacatggtccttgcagcataactgccaagatgattattatttctgtgttctggatgaggaaatgcaaccagagaatgagtcaaaagcccaaacaagtcaggtcagtttgctagaggtcttaagaattattagcgtgaccaaaacgaccaggactgtggtttatagacttccagtctcttgtttcttttttcacacatctgtgggttgaatagggaagtttctgtcctttgtagacagctttcttcttgatgataaagacctgtgaactaactgcagctgaactatatgcatgtgtacacacctcacttggccttcctctatgaccagctggttttctcatctttttttttccttccctaaatgagtactccagataaataaccttgtttaaactactagcatttttagaatattttgcttatctgcttacctttccttctt

SEQ ID NO: 98336 - DNA, 3709 bp, Homo sapiens
ttgagttaatttttaaatggtgtaggttaggaaccaactttattttaattttttgcatgtggatgtctagttttcacaacaccatttgttgaaaagaccatcctttcccttgtgaatgttttcccatttgtttgtgtctttaatttctttcattctttttcttcttctttttttttttttttttgagatggagtctccctctgttgcccaggctggagtgcagtggagtgatcttggctcactgcaacatcgcctcctcggtttaagtgattctcctgcctcaacctcctgagtagctgggatgacaggcccccaccaccacacctggctaatttttgtatttttagaagagatggggtttcaccatgttggtcaggctggtcttgaactcctgacctcaagtgacccacctgccttggcctcccgaagtgcgtgattacaggcgtgacccatcgcgtctggcttgaagtagtttccttctatctgtttttgcatattttatctcataagtttctttaaaagggagaccagactatgagtagaataattgactggctgtgcaatagatagccagttttgggtaagacacttatatctagatttaaatttcctaattttaaaaataaggaggttgggttagatttgggaatctcaaactttagtgtgagttggaaccacttggggaagttgttgaaaagattttgagtttgtaggtctgtatggggtctggtggtttgcatttttataagtctcaggtgattttgatctggatgcgtttgttctctagaatcccttatggctctaaaattctttgaaatatcctccagtaaaaggcatttgggtatttattagaggacatgaaatgagggtatgggccattgaattagggattgtttgttattccaaatcatggttgcatttgtggacaagctgcctcctgagatttgggcatgttagatggagagtaggaattatgaagtgaggacatttattgcttgaaaatgaaaagagtagctgccttcaggagtggctggtgtgagatgattcagggacaaaagagcttttgcaaaatagaagcagaggagaggggctaaggaacagtggtcagcagagaggctgttggggggatcacactgcctcgatttatcactaggaagtccagaaagtcctgatttgccgccaggaagtccagaaacagacagtctctggtctgggaattctaaacaggagtgctgggagcctagagcaaaggaatgttactggaggtgaaaaactgatgaccaatttgcatacacatgcacacttacacctgtaaagttagtataaatatgtcatataaaattggtggttactctggtatatttacttacatggtctaagaattcagagttcataaaaatataatatgaaaagtgaaaatttctctcccagcacgccccaaaggctgttacatttctgtttttagttctcacaacgttaaataatttatctctaccctatttttagatccttcaacctaagtactatcttttgtctgcctgctctgaaaggcaaagactgtatcacactatggtgttcttccccttttcgccctaccacttcgatttttcttccttacttattttgaatttgctgtggtcattttacatttgaaaaggacttggagcagcgggacttagggttagaattctgtgttcagttgttgtcttctgcccctggggagaaaagtaaacttggagactcagcaagaacagctggaacccaagtacccccatttaaggatttgccgggagctcctgcttggcatacaaagcctcagaaggttgatggtgagggatggagagacattttgtgaaggaaaaattgcatatttcctgctctgttatttttttttaaagttaagaaggggccagaggaggaagagtctatacagattttgttgtggtttcatcaggaagccactgatgggttttaaacaaggaaataacattacctgatttatattttaataagatcattatggcagctctctggaagacggactggatggggcaagagtggctgcagggataccagttgggaggggtttacatttgtccaggcagtgatggtgtggactgcactgggtgatgagcagaggaattgcagggatgcaagtagatttgggatacattttggattattgtaggctagaagaggagaggagttatagtagacagattcccctaaagatgtccacatcctaatctccaacacctgtgaatatgttctcttgcatggcagaagacactttgtagatatgactaaattgaggctactgagatgggagtatatcctggattatctgggtgggcccagtgtaatcacaagggccctgatacagtcagagagaaggagatgtaatgttggaaacagaggtttgagtgatgcgaggaggggcccacaagccaaggaatacagacagcctttagaaggtggaaaagattaggaaacaggctcttccctagaacctccagatggagccagccctgccaacaccttaactttaaactttagactttgattttggacttttgacctccagaagtgtaagatgataatttatgttgttttaagccctgacatccagggaaatttgttagggtagcagcaggaaataatccagcagtcaaaaatgactactattctttgtcctggggaatagtgctgctatgtcccaatgtggggccgaaaaggaaggtttaggaggctgacaggaaactgagcctgttcagctcaggaggactgttggtcatctgtgtgcatatgttaatgacctcgttgtccccgggatcaggggcaggtcaggatgagatggaaatgtgggagccttcaccaggtaaatggtatgtagagacctcggggtttcacccatggagagactgtattacgtgaattgtggaaaaacagcttagtaatttctttcagaggctacatagagacctattccctctcattgcttgctgtctaaattatagttgttttcttttgagtcatcaaatgacatttcaaaagacaatatgaagctgccactttgggagaaagaaagcaatattaagcagctttttcgaagatcaaatttctggactctgtagatagttgcaatatttcttctgttattattttttgaaggatacatatgagctcatttgacagatttaaacctgtagtttaatttggggggaaggcttgtatggctatatatttttaaaaatctagttcttttcagttggattatatttaactgttgaaagaacgaaacttcccatttttgtttgcatcagttacttcttgctgttttgtttcaagggccttggtgacagctgaaaataagctttgaaaataaagttgaattttgactgggcatggtggctgacgcctgtaatcccagcactttgggagggcgagacgggtggatcacctgaggtcaggagtttgagaccagcctggccaacatggcaaaaccccgtctctattaaaaatacaaaaattagccgggcgtggtggcacgtgcctgtagtctcagctacttgggaggctgaggcaggataatcacttgaacccaggaggcggaggttgcagtgagccgagaacgcaccactgctctccagcctgggtgacagagtgagactgtctcaaaaaaaaaaataataataataataaaaagaaa

SEQ ID NO: 98337 - DNA, 1119 bp, Homo sapiens
cctctacttttggaaaaaaattaatgtactgtaagtagcttttattttgagctcttaatcaagtattaatagcattatgttttctctaattatggctaattaaatattgcccagatatagttatttgcttatttcaggtaattaaaaacatcatctgaaataaccgtaattgaaataatataaaattgtaaaaattgctctgtttgttttttattctttggcactattacaaaattttgaagcactgtgaatttttttaaaaattcaagaaaagtcttcttgctgtcatttggtgacttaagtagcagctcggagaacagatgtaggaatgaagtgatttatataatgcttcagaatctttttgttcctgaatttcacaatataaactttaattatgaaattggtaagagattttgagaaacctacattatttagtaggatgtgggatatatcttaatttctgtgacttaaaatgaggtctctaagatgggagatatagttagtaaataaaaataaataagtttatgcctttaaaaattcctaaaatgagatattgtatatgacaatgtatatgatgatgtatgcctaaaagtagtgacatgtttgaaatattagaagcagtagagatatcatgacttccagaacatggaagtgaactttcggaaaatcaaagataaacattatgttgtttcttaggaatgtttaatatatatacattcatgcatgtgatccatgtggtttgttagagagctgtgtcttcatttgctgatcattcttttgaaattttaacatgtatgtgcaagacataagaaagtgatgctcttggacttgaattctttttgggaagtttatagtgcataatatctcttggttttcaaagtgacactgtcctaattaaaaatgttgattttaaaacccgattagtatgttgctttacaattgacttctataattttttctctgttatcttaggtttctcatttaaactctagctctatcagacagtaagttatccacagaattatataccctcctttattcatttactaggatttttttatccctaatatgcccttatttactcattcatatgtctctcatttactcacttgtccatta

SEQ ID NO: 98338 - DNA, 1079 bp, Homo sapiens
ctggggaagcctcagggagcttttacccgtggtggaaagcaaagtgggagcagtcattcacatggccagaacaggaggaagagagatgggacgaggtgccacacacttttaaacaaccaaatctcatgacaactcactactgcgatgacagctccaagggggatggtgttaaaaccatgagaaaccgtcctcttgatcaaatcctcatgatcacctcctactagaccccacctccaacattggggattacaattgaacatgagatttgggtggggtacaggtccaaaccataccatagtttaaaggatttattctttatatctaactgcctattcacaactccacttgggtatgtaatgtgcatatcaaacttagattcagagtcctgaattcctaccaccacctccttctcctgcaattttccccatcttaataaattgcttgctccttttggttactcaggccagacattttagagttttcttgtctcctctatttcattataatccatgtctactctgtaagtgagtcctattgactttgccttcactatcttcccagaatctgaccaagtctcatcaactctattgttatttcccaagtcaaacccctatcacctcctacctggattattttgcaaaagtctcttaaggctactctgcttctcccttgccctctgaccactttagtgcatagtccgcacaatagcttccagtgaattttaaaaaatggaaacctgatcatatcattcctcactcaaaattctcagcaaattactatttcattcagaataaaaggcagagttcatacagtggcccacaaggtgctacacaattgacgcctcattggttctgtgactattgcctgcacaactcctctagtctccctccacttgacccacactggcctttttattgctattctttgaatacaccaagtgtgcccctgcctcggggcttctacaactagctgttccctctgtctgggattctctttccttaggtatttacatgacttgcaccttcacctagtctttgctcaaatatcagcttttcaaagactccttctttgaccatcct

SEQ ID NO: 98339 - DNA, 1053 bp, Homo sapiens
cacacaccctaaaatgtaaaccctggaaggccagggcttctgcttgaaatgtggtagacacacgtgattatttgcttaatgagtaaatgatttcatgtatgatgtagaagccaacaaggtaatatataatctgaggaaatagatatattcctcagatacataatagacatattctatttttatttctatatgtcttcaaggctccatctaattttctaggttcacatttagaaaaaaaaatggagttttaataggcctaaaacattacatggacgtggtgagacctatcatttgcgtatgaaaataggagattctgcatagtggtcagtattctaaatgttagttttaaaaattgtgcaaatacaggttgagtggttgatcgtttccagagctctgtggaagttcgatattagagaacatgaggtcacgtatcaatattagcttttctacatctagctttgggtaaagtatgtgtagtacacatttgttttgagtaaaattgtgaaacaggacagttgtgggcctctatgttgaggaacaggccttaatcatgttacttaggaagtctactggcacctgcatttttgtaaaatggagaaatccatttttggcatgactcccaatgtgaaagttactcttttcatccaaaggggtagaatacaacccatccatagtcgtagatgaggtcagaattcagtgcaaaggacagagccagacatggctgaggaccagagaacactgaacttttcctaatctgtagctgtagttctctgtagataaaagggatctctgccccagtaatgtgcaacttgctgagggtagtcaaggaaagcaaagaccacttaggaatatcattgtcaaacagctgtatatttaacatgaactttgagcagtctcataagcagagcctgaaaaattctgcaaatggaaatatcagctctggtatagagatcccaacataaatcactgggtagaaacagtatgaaacctatcaacaaggatcagtgaatcgaggtatttcaggagaagagagctctggcctggacaggtctg

SEQ ID NO: 98340 - DNA, 1061 bp, Homo sapiens
ggtttgctaggtagaacaatgctaaaatgaactgtataattactgtaccataattttcattttgtatttcagaatttctcattcttaacgaatccttgtgtagtcatcataaagactcaagttaaagaaccttctattgccttggattgatatttgcattgacatgagtccactggattgttatagtcaaaattccaaggaccagagtaggcagactagggaagtaggactccttaaggagggttgcctcacatgaggctttttttttcttttagaatagtattcacattatataagcaaatttaaaaaactgccatgtaatgagtcacagacactaagcatggtgcttggtgtcttgctttccaaaacttatattttatttccattcttttatttaaattatttagtgggtgttcaataattctggctagaaagacaaaatatgttcttgctttatgacacaagtgttagcagagagagaagtgttccttggagttgtgcagtttggtgatgtaggaattgacgaggaaaaagaacaaggtgaatcacacctcagctactagattaatgcaccacattaaatgttactattcaggaaggcagttaccaagaagcttccatggtaactgttgtcatagttgtatttttactcatctttcaaaaaatatatgaaagtgaaataatactgctgtagtgatacttgtgctgctttacccattttaaatagcaagtgctccaaaggcttgtaattcagtctttctccttagttggcattgccagtttaatatccagcaaacattaatcactaacagtaaatgtatagaagacgtttcatatacatgtccaaggatgctttgtcagtgaaagtgtattgttacagagtcctccagggttgctaaataatcactagggaaaatcttagtttgacctcccccatacccaccataagattaaatgtagcttctcttctttggctggccatgaagaattttaaaaagaaatatttagtgtggctaatgtgattgactggaatatgtatttggattatcagtgcctacttc

SEQ ID NO: 98341 - DNA, 1049 bp, Homo sapiens
tgttactgtattcttttttctctttttcctactttactgtctccttcctaaatgactgagctttttcactgtggctgagctacattggtcacattattattattgctattttctttgagaatgggtctcattctgtcacccagactgagtgcagtggcatgatcttggctaactgcagcctcaaacacctgggctcaggtgattctcctgccccagcctcctgagtagctgggactagaggcatgcaccaccatgcctggctaatttttgtatttttcatagaggcagggtttcaccatgttgcccagcctggtcttgaactcctggcttcaagcgatcctcctgccttagcctctcaaagtgttgggattacaggcatgagccactgcgcctggccgtcagttgcattattgtattatttaatcctcgcacacatcatgttgttaagctattattatttgtattttattgaccggaaaacattgaggcttgcagatgtaaggacttctggcataagtatggcacttttttgtcatttaactaaaactaacacctcatgtttcttcctttgatctatgaccttggacaataacattagttaatctctctctgccctttaaaaaagtttcttttctataaaagggtaataaaaatgtctgctgtaccaattgcatggggtgctgtgttctagatagacatgacagtactttgagatgattaaaatgtaagaaatgtgaggcattattatttttatcataacacaaacctgtgcaatcaccagtgtatcaatttagaatgagggattagaacaaaattacaattaaaaatggtctgttgatattttcttttggacttcaaaacttttaagatatatttacatatttggatttttgcattatacagaaaaagattcacaagctggactttcatgtttctctagctacaggataggtccaaactagtcctctttagaaaaacctctgtgattgaaaagaagtgacttcttttcctcaaacttatttcaatttaaagttgacattttattctca

SEQ ID NO: 98342 - DNA, 2268 bp, Homo sapiens
agcttaccacccaggggagggatgggaaagggagagacagggaagcacaaataaagtgcttccaaagccctgaacgtgaagactgtgtgaagaaagacttcatgaaaagcattgcaggtgggacgcctttgaaggatggggagagtttcaatcatcataaatacagggaaggcaaagaggagcatggggtagtattggggggaaggagggaatagaaagtactgggagggagatgcctggtgtgttcatgctggtgtccagttaccatgcatgaagcacttcacagatgatttgcagcacccactgtgccttaggaatgcaattctggaggaaggacgttagtgagtcaaggaagtacagtgtaggtgtttcatttagccttgttctttttttttttttttcctgatagtgtgacaaaggagagttttatgttagctaatactttgacaaaactttattgatttgttaatttgcaatattcaagatgcttctgtgagctataataatctttaacatctagtaaataggattcatgtttagatggaattatctttgtagtttgaattaagacaaaataatgacaatatttataaacatatgactcttaaagggggacataagctctcagtattcacaaaaggccaggttctaagtgctttctgaagttacaaggttgtactctcccattttactgtcatattctgctgatacatcatttagagaacgttccaagaaagttctaattcctgctgaagagcagagcactgacatgatttttcacttaggtgtgcagaaagagttgtttagctttatgcacaaaacgggctgaaatcaagctttaattagtcagacttttgcataattcgtcacggtcactttgtaagtccagcagaatatgctgttggtttttatcttagtgggttcattttcaaggatgtgttgtcttattagctctttgctacccaaatatttagattttcctagcaaaaccatgatattgtatctagtctcctaaagaaatgaattgctatatgatgatacataaggaaatgaactgatacataaaagttattcgtcttaaatatcattcttgataataatctgtcttaaagacaggaaagtaagttaaggttcttctgtctttttgaatccataggctgtccatctggcccaggcaagcttccagattgaagccttcggctccaaattcattcttgacctcatactgaacaagtgagtatttagacataatcttcttaagaagcaggtgcaataaagctttgtttttataatatcggtttagtcaaaataatgtctgttgtttaacaactattttctagcagattattatagagcatgtaaagtataaaattctgaatggtgaattatatatttttttccgaaataaaagatatttaacatgttaagcatctcaaacccagcacttacatattataattttaaatggaataaatatttgaagtaatccagttaattaaatgttaattataatcatcactatatataagaagcatgataaatttactgattcaagtataatttgactacagtctagaaatttcttccatttactctttataatgcaattcgcatgacttctgtgggaagaacagagtaagtgatgacttgcaaatacctattttgagaagattctttgctttataatttgctctaatatggtttcttagaaattttggtcctgatgaaaatttacccgattgtctctgagcatgtgtttgttgatatttaaatgctgtttcctaagttcaaatcagttgtacagatgtctttgtacaaagtgtgaacaagagctgttgacttaactaaggctcttcagcctcaaatagatctagcagtgagcctttctttggtgaaagagattttctatgtggttttcttgagttacagaaattatagtcagtattttaagcttttgtcagtattttgatcaggactgcatctttgcaagaaaaatacctgttaatgctatcaaacactataatgtaagtgaccacaaccaatatttgagaaattgcaaagaattataaagaacaactattaaattttttgtatgccaaattctgtgagctctgcagaaaaaaatgcaaagtcagcttgggtgttccttaccaagtgttattgcagctttaagtcagaatgaatcagcagaactcagaattgcctatgtaaaggtattgcaggttttcctctttggttgagttccgtttcaccatgctgtgtcagcag

SEQ ID NO: 98343 - DNA, 4069 bp, Homo sapiens
agcagacagctacactgatatagtttcagttagcttaaatacagagcccaaccttcttgctgactgacatggttaattcattcttcattcagtcaacaaacatttattgagcttctcgtttgcgtaagacactgtgctgagcaacacgggggaattcagagctgtatgaaagaatttctcgtcttcaagagcctgtggtagagaaatgagattacagtgtacacgaatagtgttaaaacatgatagaaagtgacttgagagatcttggtgatgagggaaggttttctggggaaggtgggattccatgggactcctacaggaggctgccttggttttgggtcccctggtagcagaccctgagacaaggagggaggagctaggaaagggtgagttctcaagctgtttactcctctgggcagctgggattctcactgagagctctgggagtctgtggactcatgccagagagttatcccacctagaggcagggagctagagttttgtccactaactgccaggctgttgttggctgaagtctgtttcttggggcagtaacactttactacctcctcctgggtagagtacaaagccctcaggcccagggtctcaggcagttccagtcagctgccttcagtgtgtggaagtgaatgccaagggcatagtggcagggcccagtggagcccatagcaggtgctttagactttgaaaggtgtgggaaggagaaagacgcagactccacaggaagtggcaggcagaggtgtggaagcccaaaagcaccaaactcctggggtgagtcaggactggtgaggccccctctcttaaagaacctgaattaccaagctgcaaacagaaggcaaactgcctggtgggagtccctggatcctaagggggatattcagctttatttggctaaatgtttttttcagctctgcggatttggagattgaacttaaatatggttgtaagaaggaacatgtggagaagaaacaggcctcctgcctcatttttctcttgtggtcgagtaagaccaggacaggagtcaggagctgtggctggggacagcttgaggcaccttgacctataccagcctgagctgtggtgttgctgtcttacgtcttggtttctaaatttttgtgattcctgaatccagattggcaggccttttgtgtcattgctggcctttttctctccaactagcagcccatcatgctcactgctgtcatttctcttacacatctgagagagggaatcagggaaggcactggccttaggaatttggagtcaagacttccaatttcacctctgcttcagagagctggtcacacactctgggccttagtccgaaggaattagaggagactatgtgaacattgctttccatttcaggagtctcggggtttatgatgctgctaactcgaaggttaaatgctttacttcccagtttcaagagatctgcagaaggaaggctttctattatggtgatagacactgtgccaagccctatgtgtacccatagtctcctatttaagttcctttgataaccctgtgaggaagatgtgattatccccattttactgctgagtaacatgcgggctggcgagattcagtcacatgcagggactccagcatgggctgtctgcttggagtctccttcaccgtggctgctgtggtcacagcactggactaccaatttgcaagtgagctgaacctaattctgatgattgcatatctgttcacattaagtgagaaaaagagtggaattattttggtcaatttgtaactatatgaggaaaacacggaaggtcccaaataggattgaaaataatgctgtttgttgagtagaaccatctgttatgctctgtgtgtctcccactctgcattcgtacgttgaagttctaacccctagtacctaagaatgtaactatatttggaatgaagtctttaaaaaggtaattaagttaaaatgaaatcttttgggtggcccttaatttaatattactattgtcatgaaaagagaaagtttggacacagacactagtgtgttggaggaaagaccatgtgaagacacagtgagatggacggcggctgtctgcaagccaaggagagagccctgtgaataaaaccagccctgctgacaccttgatcttggacttctagccttccgaactgtgaggaaatacatttctgttggttaaactaccagtctgtggtactttgtggcatccttagcaaactaatacaccgttctaattcacttattgctcacctattgcagtgagacattcagcattaagtgctgcttgttaatgggtaaaactgtttgtcccttatactatgattttcaagtgctgttttgagaaattgtggtttcttttgcatttaggtactttaggatgattggaactgttttggtagttttgaaaaagtgtgtgatgataaagaatcttaagaggcaggtatccccaaagttgctgtaaatattgattgccactgtgctgtgtgcaatatgatgtagtcaaatattgcattgtatatgtcctagaggcctgatagtattctaagctttctagtgctggtaggaatgagttgctatggatttttctctcctgaagccaccctttcctgtctgcttctaaactttttaattctagagtgccaggtaactctttttgttgccatattttctctgatcagggtgatcagacatttctggtctgagtcaacccatattgaatgccttgggtattatcatttgcttttgatgactcatctttatgctggtagatcaggtccagaaaatcttgaaaacatatacaataaaagaaatattgtctaaattttagtagattctggttctatttacttagggtgtctatgcaacctactttcaaaatggtttgagaatgacttgcacaattaaacataacaagattattaaaaataaaatcacaaccaaaccattgatacttatatactgattcttgattttcatagatgaacaaaatccagcataactcttgggtggtgaaattcaatggatgtttgccctctgcctgcccctacccctgcttgcctattaacaataattattgtgagtgactgggacccagggagattaagcaccaggctagagaaatgaggagggccacaggagccagatttagattttctaggttctgggagatgagaaaactgggattgcccagaaaagaggaccctgtggctacagtctttagcaggagaataaaaagtatggcaactaagaatttgtagcaaaatcaaaagaatttaattgttgatgggatcatattacactgtttatcttacctaggatataaaagacatctctagtgagtcaggagactatttcttgactggtggataaaaggagaccctttgcgggtatccaccccaatgcagaatgtgggcaaataaaatctgaacttgactcattttttcagagcacttcttggtcttttgaagacaaagacaaataatgtataaaaattccagcagaagttaattgtgacaaaaaattgaaaagcacagagaattagatgtgaccaagcatctgagataagtttattacagtagttactgaaatgagatcttaccttttagtgggttgtgtaattttcattatctgatacaagaattttatctctctagagatataaatgtttccttgtcaaagaggaattatcccttgacgcctgatgtagtagggcattcaatagcataatggttaatgtgtgcaaccattatttttcttaaatgggtttctcatattgaccctctgtgttagccaagtgtataaagttctttctaacctgagttgatggatagatttccattgacagaagccattcatgaatgattccgagcacttttatttcacaaatgtttattgagtgcctgctaagtgccaggcactgtcaaagtttgcctggagaagtccttccctcatgaagcttatagaacaatggaggaggaaagacaaatctgtaggcatttaatgacaatctgagaagtactgtgatggggaaagtacaggatgtttttatcccac

SEQ ID NO: 98344 - DNA, 1030 bp, Homo sapiens
ggctttttatttatttatttttttgagacggagtttcgctcttgtcacccaggctggagtgcagtggcgcgatctcggctcactgcaacctctacctcccaggttcaagcaattctcctacctcagcctcccaggtagctgggattacaggcatccgccaccacgcccagctaatttttgtatttttagtagagacagtgttttgccatgttggccaggctggtctcgaactcccgacctcaggtgatccacctgcctcggcctcccaagtgctgggattacaggcgtgagccaccacacctagcctatattggctttttaaatgaaacaatttctacaaaaagtttcacgtcctttaatataattacaaatatatttttccattttacaggaatatctttcaaataagaaggtggaaatctctaatacattgtagagagcacatttcatttcttcctcctttcttttttgcccaagtgagttcacacatccaataaatcagactaaactacatgtgaccagaaggatctcacagcataagaatagattatatctcttgtaaatctccaggatttcttgtttttcttgaatgtccccctctcatctttattgaagataatggacagataaaaattatgcatatttaaggtatacaaggtgatgttttaatttttgtatacattgtgaaatgatcaccacgctcaagctaattaacatatccatcacctcagatggttatcttttttctgtttttgtgctgagactatgtaagatctccttttgcaaatttcaattatacaatacagtataattaattatagtcaccatactgcacattacatccactgaacttactgattctgcaaaatggaaactgaaaccctttgaccaaccaagggattcttagaaacttactagtgtctgaggctctcccttattactgttcatatttattcattaaggactgagctaatacttgaccctaaaaaaatgtttgctctttaaagctgttcagtggtaaagggtttct

SEQ ID NO: 98345 - DNA, 1140 bp, Homo sapiens
tactatgcagccataaaaaaggatgagttcatgtcctttgtagggacatggatgaagctggaaaccatcattctcagcaaactatcgcaaggacaaaaaaccaaacactgcatgttctcactcataggtgggaattgaacaatgagaacacatggacacaggaagaggaacatcacacaccagggactgttgtggggtggggggaggggggatagcattaggagatatacctaatgctaaatgacgagttaatgggtgcagcaaaccaacatggcacatgtatacatatgtaacaaacctgcacgttgtgcacatgtaccctaaaacttaaagtataataataataagaaaataaataaaataaaaaaaatttacatgtgatcttactcctttgagaggtttagttaactctgttgctgtgaaatcactaatgttctcatgtctgaatggaaacatctagtgacaacagtgcttttagaagtaaataatatgtctattttcatgcagctttgaattcctgggttctttgtatacgtttgattcagtgaactatgaaaaaatgagcaaaccttaagacaccatgaagtattttcaataaaagcagtttgagacaaggttttcaggttggcggattaaaggaatcaaactgttccttcacccagcaccgtgaacaacacccgtactacatttttcttgttttgagtttatctctcctgaagatatgctgtttggaagtatttttttattattaaaatattgcacgacttgtttgaaaatttatttttgctggttattttttatgcagaaaattctttcttcctataaggcccagaatataaggctagcttaatgccttgttgtgttgatcagatactaatatcagtgtagatgatctcgtactcattgttgcattagatctattgtcatggtagccacaccatataggaagcaaaagaaaactagtgtttttgtctctttctttgaaggcaacttcctggtaagtaatgattaaattatatgactctcaaagtacaaaaataacacaattccttagatattactccacatttgtgtagcaccaacatgcaggtagttagccatgataatggatattatgttcatgaaaaatcggtgctcaaa

SEQ ID NO: 98346 - DNA, 1038 bp, Homo sapiens
tgaaagttgggtttcagtgttttcctgtttaaagtcaatatatcaaagaaggctaagaggtgagccactcacttttttttttttttgacttagttgtgtgtagtgtttgaattgcagggatttatacaggctactgaattgaaaagagctttgattgtgatacctcagtgaaaacgattacatgtatgtttgtgtatttgtttcctgtttccaagaacaacttgtagctttttaaaaatgagcttcctttttatcatgacatgttgaggttagataaatctttaaatgtcctgcaatctaactccctagctgattttcgaatctcttcttatccctattgagagctcttctggtgtattcctgaacacttccagacttaggtagctgattcttaaactatgctgattgctatcaagtacttttttttttcatgtcattctgtaacgttttatcccctggtttcaatttttgcacttaaagcaactcactcatggagactgagcattaggctacttcattcagttatcagcacctcctggaaattggttcctgacattgctattgtcccaaagataacagccaaagttctgttcgtatgtgtttacctagaatataaaataagaatacagatcattttccaagagtggaaaattataaaaagaacttttctaaggcatgaaaaatactatattttaagcacataagaagctatttatagtttcttcctgccagtgtccagtgctattaaacagcaggagatttttatagtctgaaaagggatattttgagtctataagaactttttgcaaggtgatagcaatctcaggttgaattctgccagattttgctgtctcaatatgatttacaaatgaattgaagttaatactgtctgttaagagagaagttaatacctacccattattaaatataaaaccaatgtgttaaatataatttagttttatttctaaaatttcattgaaatataatgttttagcattctggttagaattgaaatgcagtaacacaaatatgttttta

SEQ ID NO: 98347 - DNA, 1083 bp, Homo sapiens
tttaaagtctagagttctcagacaagacaaaataatttatttcctgttaaattaacatatgcctcatagaggctaccagatttcatgaaatttcttaccaagtctcttctagacaagccttttgtttttgcctcaccacaacaatttctgcaaacaaaaggtggtatctttctacacggttattctttgtcatatttaagcaacttttgcagaggaaaaggcttatgggtggggattcattaccacatgctgaccctggaccctgtaggatggtaggaaaataaagtagaagcaaagcagaatagggatgcaaaaagtagtaacttcagctgaaaagtgaaatgtagtgggctaagcctttgctctcaaggttcaccaagtggagctgatgtttcgctaggcagaagaaaacttcagtttaggagtctttctccaggccttgtccacctactcacactacaggctgtcatggaccttaacgttcctaggttcccactgtttggtttttactctttcaagcatttcgtcagttatagcttgaaatctgtatttccatattgaggtaaacagagtaccttcatttggattttaccttttagattgcagatctagtctgtttatttttctggatgtttgctctctgaagggtaaagcccgtcatgcttaatcatcatttgcatttttttcttaacttctctgctgttcacaaaacaatctaattctttaagcaggtgtgtagtcatgtcccttggttttatctaagtaaaatgagaaaaatcttgttttccaatcaatcatacttgcattttgacatgaaacagcaggtatttgtcaaaattaattgttagataaacctgtataagtgaaaaagagtgggatggctgaaatcatttttaaaaatggaaaaaggtgctcagaggatctgaaaaatgttggattggattgtaccttaccttgcaataaaaggagattcacatctatttaaggactcttgcttttcaacattcacatagtgagatataaatgcagggctattttttttaactataagaaagtatatttaaaatttgaccattgataaaa

SEQ ID NO: 98348 - DNA, 1053 bp, Homo sapiens
ctgtcctttttatgggatggttattttggagagtcttgtttgcttttctagtgtccacaggctggtatgatctctagcctttataggcatttctcttgacccagaattttgactctgctagaccacaagcttctggatttttcctggagtggccacttcatttttctacccctgtcatgagttaccaaccttggtgtggctttcctggatgtgaatcagttcatttaggacttttctcatatcttctctagtcctaaccattctggttcctggaactgatactgatagtaaattcgccataatggaccatatacagttaatgctagcatttctaccagggttctaaaaatgtctggttttaagattaaattaaaaatagtccctctgaaagacctaaatagaatagtttctctctttttctgtgtcagtctctttgggatttggctgcttctggaatcttacaaaggttttgcttttgatccaaacactgcaaggcactttgtgaatgtgagtaagatagtctacatgggctgaaaatttaagaccatttaatgaaagttgtctggctgcaggaaaaatgctcatttttacaaattgtcttaaagttctgatttatagatctgttctgcatttttctactaccactggattttattactggcacattatatttaattaggatagaaggaatgtgtgtgctcataattatttaaaatgatttcaggacatatatttagagaatcgagtgtaaatacttaataatagttaaaagataaaaattcagttttagtattatgcaaaatgtctagactctataattagcctggagtagattaaattatgcacctctaatcactattttatacatgtctttcaaagtgacatcaattgtcatcaaatttgcttattataagattttgctggatgagtacttatattttcagtatatttattttttagtgtctttgtgattaaaaacatgttagcatgactctcaggtttttaaaatttgttttaattacaattaagtgatggttttctaattgtgttgtc

SEQ ID NO: 98349 - DNA, 1027 bp, Homo sapiens
actcatattcactcttttagacttagaagttttcttggagaccctataattcaacattcttggtttttgtaagggagaagactagttggacaatgttagttacttctctgagatctcagagatggtcagctcctgggtgcctgtttagttcaggcattcccctgtgacaggatatgacagcacagtgaaaaagggccggttagcacgctcataaacaacactgaatctgaaagtccacaccagttggaagaattatcctttccaaagaagctacaaatgactgatagtttttccaatatattctgtaattttcagaggtatcttagcttgttattattttaaaattgtacataatttagaagaatgaaaattctgtttgttagagaaattagttgtgatttaggtaagcaaagcacaatcatgacttttttttaaacaatcgaagtcccagtgaacaatttttgtgatgctatgaaatgtgctcagaaggtgggcttatttgaaggtcatttttctaaatgataacttaaaaaaatagttgccactttgtatgatagtagttttgtacccacatgaagaaagcattaaaaattctctgttctctttctcttcttggtaggttgtgttcttatctaccatactggtttgagattactgtagaagtatgtttctaattgctacattgtgacaattacttaaacatatctactatttaagaagaaccagcctggcaaggtggctatttcttctaataccagcactttgggaagccaagaagggaggattgcttgagcccaggagttggagaccagcctggggaagatagtgagactccatctctacaaaaaaataaaaaagataagccactcatggtggcacatgcctgtggttcccagctacttgggaggccaaggtgggagaattgcttgaacctgggaggttgaggctgctgtgggtcgtgatatttctaccaccttctagcctgggtaacagagcaagagcctgcctcaaaaaaataaaaaataaa

SEQ ID NO: 98350 - DNA, 1034 bp, Homo sapiens
gctgagctgagtagttgtagtggagcccgcatggcccacaaaacctaaaatatctactccctggcctttatagaaaacccttgctgacctttgctttatactcttccttggtgattacattttatgacattccaactgtttagggcataattgtggaatttttataggatctgtctcctcaagttacttgccttttggtttgttctgtattaattaacatatcaatcagatcctgaataatgtgaataaaaagagttcaccgtccgggaggcggagcttgcagtgagccgagatcgcactactgcactccagcctgggcgacagggcgagactcagtctcaaaaagaaaaaaaaaaaaaaaaagagttcaccgttggattgtctgtgtcttgtcttttttttttttttttttttttctgcagattggggagtaatttattcctggatactgtgtgaaactcgatgataacctgtttttgtttctgtactaaccatggactgcagctatttctggtttgcatgcccctcacgttcatttattgagccgattgtttttaaacctccaagtgtcttagatgcagaaatcactctattttctttcctttgtagtggtttgttgtcttctgattatgtggagattcactacgaaaatgggaaaccacagtactctaaggtacggttaccggcgtcggcaagtactctagtataagtgtgcttatcatagagttgatcagtgcacactgcgttgttttgacgtctgtctcagtaaaatcacctgtgctcttttacaatgatactatttttagtgaggagaaatttattaaaatatacaaatgtttgaggtaacgttaggtattcaggacaaaaaatgtttattgttttgattatacatgcagtaccttttgtgatagtataaagagctatacagttccatatcagcacctgaaagtagttagtaaagaaggatgaggctcatggccatcgaatctggattagaagactggatgggctgttagaacggttctttagtgcaa

SEQ ID NO: 98351 - DNA, 1152 bp, Homo sapiens
gtatgtaagaaacagtgacctccgtcagtcagggtgaagatccccagaatggctacagaaagaaactctgacttctagggaatcaacaagtgccactgaacctgagcagtgtcccagttactggggacaccagaaaggaaacaaagtggggaaacctcactggatttttgtttgtctttttcctagattgctaacacatgtcagcataaaagtagcacctttcccgtatgtggacttgtgccatataggtaactgggattttcaatctgatggcttctcagcaaatgtttataggtgtccttcattataaatactgctcaggaggccctggcatgtctcaggatttataacatttcaatttgtaattggacgtgttttccagcctttgagttttgtgccacagattaagaactttcatgtatcattcttattagttgtcagttcttgccttaggttgcatttgggggttgttgagtctccctaaaagttagtgctgtggaaagtgagcagaaaagctaaatcaagcgcgggaacaagcttcctggcatttgtacaaactgaagcttctgtcagctgtgccagggccctgagcactgcagatgctgaatcatgagcctggagtagacaagattgcagggaactttatagactcagcaaacgagccacatttgcaggacacagaaacctgatccagacttctcactaaggcacttagttactttttttttttttttaaagaaacagaatagctaattggcctccagaggtcatttgaggtcccaaaaggagaccttatcattaataagacactccaaatctgatatcagttgtaactaaaacttaaaaggtatttcaactctagcaaaagaaattgtgttcactgcagtttgtttttgtgttcactgcttttctctctttcatgacccattttcttcaaacagctcatatacccaaacttacgtgcttcatagataatgaactaacagtctgttttttatgtgtctgtatttatgtacatcagaaaaacccaagatgatatggtgcacactattttatatcaagattttttaaatgtagcaaaattttaaatattttagcatatattaagtaatcttctaaacctttaatttttaaaaatttcataatattatt

SEQ ID NO: 98352 - DNA, 1055 bp, Homo sapiens
agagggttgtctaggttttcccatttcaccactaacaagcccctctctcattcttacttctcactaagaaaagattaatgtcttggcttttacttttattgcatggacatgggttaaaagtgcttctttccatgtgaagcaaatataggagctcgagaggtccaaaagaagcgtgtaatatgaatgctaggtatcagtccaagaataaggaagaacttttgttctgcacttgatggagcaatagcttttgtttaagttcctaccagtgctttgcacataatatataataaaactattttgttgatttttttacaactttaaaaagtaatttatttacttttcttatttaaacaaatttattgggatataacttatgtatcataaagcatataattgtttttagtatatctacagaattgtgcatccatcaacataatctaattttagaatattttcatcactgcataaagaaaccacaccacctgttaacagttgctccccagtctctcttttaccaaccataggtaaccactaatctattaatactttctatctcaatagatttgcctattctggacataaatgaaataatataataggtgggcctttgtgactagtttcctttttcgtccctagttttaatgagatataattgaaaaatagaaattacatatatttaaggtatgtaacttaaattgtatatataggaattgtatgtattattcaaaacatcaggttgatatgttggtacattgtgaaatggtcaccacactcaagctaatgaacacacccatcacctcacatagttatcttttttttttttgtagtgagaacatttaagatccaccctcttagcatgtttcaagtactatatatttgttgaccaactttgctgatgagcctatttaaataagttaatttttagcatttcagttcttataaaataataagcatcaacaaaacactatgaaagtacttttcaaaattaacatatttctattaagtcttttttggtgagctgctaatacatatttgtaagtgcttactaatacttt

SEQ ID NO: 98353 - DNA, 1026 bp, Homo sapiens
tcatattgtatgatgggaatttgctaagagagtagattttaggtggtcacgccacacgcttaaaacgtaactgtgaggtagaaataagacatgttaatttgattgactatagtaataatttcactatgtatatcaaaatatcatgttgtatattttagatatacacaacttttttttttgagacagtgtctcactctgttgttcaggctggagtgcagtggtgcaatcttagctcactgcaacctctatttcctgggttcaagagattctcctgtctcagcctcccgagtagctgggattacaggcacgtgccaccacgcttggctaattttcgtatttttagtagagacggggtgtcaccgtgttggccaggctggtctcgaactcctgacctcaagtgatccacccacctcagcctcccaaagtgctgggattacaggcatgagccactgtgcctggcctgatatatacaacttttagaaaacaaaaaagcagaaaaaatattgatttaccttgtactgtgacctttttgaggtcatagttcctgttctaggtactagatatgtatcagtgaaccaaacagataaagatccctgcccttatgggtcctgtgttctcttctcacctttattcttttctttatcagtataaccacatcacccttttagaatgttctttgtgctttccttatcaaatcatcatcacagctcagttcaagctcgcttctaagagtgaagggtttttggcagcaggagagcatggattgtgatcaggtggagtaggtctctgtgcgcgtggctcctggctgggaggtagggttgatgcagagtggaagagattggaggagtgcgtgttctgaagaccctgtccagtgtatgagtaagggagggtgggccctgcagaagtcagtcagagtctggccgaggtgctgtattggagtcagggtattttcagacacacgggtctgcctgtcttcccttttctgagtgtttccccacctctttctgcttcctttcctttattttt

SEQ ID NO: 98354 - DNA, 1050 bp, Homo sapiens
ttgatggcagttcagaatttataagcgtaaagataccactgtttgcttcttcagaaccagatggttttagattattctcatatataaagaatctgttttcttacagatgatattgaatttgcataattagaaatttgtatagttgtacatggttctggaataattactttagagactgccactgagtgaatagtcctatctcagagtaattttctaatctgtctgttgaatttcaaacatcagttatatcaggtataatttgcatgcatttgatgtatacttttataatttttatagcctccatgctgcctaatagagtgctggggccacactgggactccatgcagatatgtgaattaaacttgtgacagtgtaaagggatttgttcagttatactctttattttgaagacacaataatgaagctcacttgctatttcttgccatttcctgtgtttgtttattccctcctttgtgtggtttcttttgtgctagtggcatgtttgaagatgataccttcgtgtatatgatagagccactagagctggttcatgatgaggtgagtctatgccatcagttgcctgatggcgttctactcctccagcaactttgtctttgagaagaaaagagaaaagagtgtagatttcaaagtgcctttgtacatgttaacttatttcaaacttagagtagtaccctgagttttgaagttttaagttgcacatgccaggcccatgtacccgtaaaggatagtaaaagacatcaaacataggttttctgaagcaaatcctagtccttcccagtctatgaaaagagcagagaggatattttgttttgtattagccagcctccttactttaaactagctttcatagaagtcattatatgaaaaagatacttgcacacacacatttatagcagcacaatttgcaattgcagaaatatggaaccagcctaaatgtccatcaatcagcaagtagataagtaaaatgtgatacacacacacacacacacacgcacacgcaccatggaatactactcagccataaaaagg

SEQ ID NO: 98355 - DNA, 1050 bp, Homo sapiens
aaattgggctgggcgtggtagctcacgcctataatcctagcactttgggaggctgaggtgcgcagatcacgaggtcaggagtttgagaccagcccagccaatatggtgaaaccctgtctccactaaaaatacaaaaattagctgggcgtggtgacgggagcctgtaatcccagctagtggggaggctgaggcagaagaatcgcttgaacctgggaggcagaggttacagcgagccaagattgcacctttgcactccagcctgggcgacagagcgagactccatctcaataaataaattaattaattaattaattttgaaacagctaacagttagataggctactgataataaaagctgaacagacaaacttttattgtcttggttatggcgatgtatgtatgaatatggggtaaatttcaaagttgatgcagaaaagttttaaagggttggtgtttgaataaacctctgtcattttcaactagtaactataaaaattatcaggtaatgaagacagcccacttagataaagacattttgattaagtaaaatgttatttatctcactccagtaaggaaagataatctgtgtacagcaaaattattcgactcattcagcaaaaactctgactttgatttctggctttgattaatggccctggtaccctaacaaaatccacaaagaacaaaacacagattcccaaataataactatttaagccttagagttttttaaatgtataaaatgagataatttttaatgcattcatagtagggcaattttgtagatttgatgaattaataaatgtaggtgacaatgtctattaaactgtcataaggatttataaatataaactattgttataatgtttaaagcattggttttgcattgtttacttgtgatcatattattcagggcctgattgttacatgcaaattgccttctctttgccttccttcctgttgcctaccttttggttatgtaatgatttgtcctcatccacactatgggtagaggaaaggaatagtgctttaaactttagtcgatttttt

SEQ ID NO: 98356 - DNA, 1050 bp, Homo sapiens
ttctctctcaaactatgctaccaatttcctcttgccagcaaggtgtgagagtgcttttggccttacaatggtaattaactatggatatcgtaatttttaaaacttcatcagttttatggcaaaagttggtgcttcattaaaaaaaatgcatgttgaaggaatatgaaagcattcggcatgtttttacatgtttattgactttttgtgtttcttgtgaatttcccatttatagctttaaagaaagctaagatttaagagtaaccagtaacactatgtttttatctaaactggggcaattagatgatactcttttatttaaaattaagatttcaataagacatacttttcacttttgatagctaaaaaactgacatataaatattcccattttaggaaggacattagagaaagttccaacactgtttcatagaggcttgttcacatcttgctttctaaattgcctacaattgttttgtttcagaaaagcacaggtcgaccacatataatccagaaaaccttggcaggacagtattctaagcaaatgaagaatctcagtaagttttaactaaaaatagcgattatattttatgtagtatgagcttttatctggtggagctcagtagatatgcaggcttgttggaagtggaattggtctgatatcaggggtgaacatcgtggatcagcactggaatgagtggtggctcttgtgtaaagaggcatggagagtcatttccagtgcagactaaaacatgaagactttgagtaaagctgccttgggaaccagaaagtgtggtcaaatttagtacagtgatttacagtgaggttcatcctgaaatcttcctggcagtttgctgctcttgagccagcttggattgcctccctctcatgctctgctccagacacatcttaagtgtgctaatgttggaagaagcttctttttgattgttggggcatgtgattttatttctgtatattactgctaaaagtctttaataatttatgcaaaagctaatgccatacattattttgaatgctaaaatgaattagaca

SEQ ID NO: 98357 - DNA, 1082 bp, Homo sapiens
attgaaattgctttggaattatctttaagtctttgttttactttaaggaaaccaaaattagattagtacatggtatgataaggttgtgcttcatgctaaaatgatgtgaaattctaattagctggccctactcagagaatgccttgaaactagaaatttaaaaaaatagtgacttaatttatatttaaacttttaagtttctactttaatggatgttttccattaactatcagtttaattgtgttgaatatcaatagaatacctcttacttttgtatacacatttattttctgttccagttgcctttaaatatattgcttgagatgttagtaagaagcaaaatttatcagaacacatataatttaagagaggtcctttttggtggaaaggaaagccagatgtgtaggcagtcattttagacagtaaaggctaaaatatgagtttctgaaggactttaatttgcttgaaaccccaagatagtttttttatctgaattatttttgttgattggaacattgagattttttttcccagctgattctcaatcttgagcattgtggcatgttgtgaaattatggcttttgaagcctaagcttttttcaacatccattatataaatacttttagagtagtagaaataataattaagatatattcaatgtctttgaatgcacaaagtgcattctcaaatagctgttaatctatagaatctgttctcaaacctttacttgcaattccaaatctcttgttctaccataatatatcaggaaagtacatgaagctatcaatcaaaagagcaaatctcagtaactgtgcaaaataggaaacagttactactaagtgttaattacaattaaacagttatagttttttggtaattgttaaaacagcatattttttgaatttattttttaacccttctcaatggtaaacatttaaataaccttattcttatgaataataaaatagcatacttcttaaaatattattttatatgtagaaaatttctacacaccatgtcacatgttctgtgatagagttccttatttaggctatcaaatcttttaagggtaaattttaat

SEQ ID NO: 98358 - DNA, 2069 bp, Homo sapiens
ttgggaggctgagacaggagaattgattgaacccgggaggtggaggttgcactgagccaagattgcaccactgcactccagcctgggcgacagagtgagactccgtctcaaaaaagaggaaagcttttatttttgagtggtaataatgcctaaaatagaaattgcctaagatttctactatttaaagaaatagtacttcttggctaatagaactaaatatattccttttgctttaagacagagttacattctaatccataatagtcccaaatacgtatgacattttataagaattttttttttgagagctgaaaaaaattttttgaggtatgctttctatgagatgaaggttgtttttaaatttgattgccacttcagtagtatatcagaacttactggatcaaagtacttaaattcacatgttgaaagtcaaactgaactagaataattaatacatttatttctgaatatgtggggatttgctgctgggctttaggataatcatctcactgagagtactcatcttacaatctttatactatacgatccagaatagttattttgataattctcaccttcgggttgaaaaaccaaattctaatcttattttttttcaaaagacagttttcttaaggattgcatgtgttcaggaaggaaaagcaaccattttaaataaagattgttttaaactgatcagaaatgtgaaagtaagttttgttataaatggtgattgcatatttttctttatatgcaaaattagttctaattcatgcaggaaatagaaacattctgcctacatttgcattcaagcttatccctttaattcagagtgatttaacgttggctgcctgaaaaaaatgcagatatcttattttcaataggtatcacattatcagtggctttccattagaaaagaaaaatccctcaatttggtaaaaagtatcttagtacctggctggtggaacctcatttgcaagccaattatagccttgataagagtctgcaaacatgtctttgagctgcttaagttaaaaataaatattaaaaatcttattctaatagaaaattggttgagattttttaaagtgcataaagtgcatgaaaagcaaatgttttgcgtacgtgttttgctacatacttaactatgcgtcaataaatgtaaatatgtgaggataatttaaatatttttcaatttaaacctcacttggttttccttacttaaaaaccactacattttatatacacctaacaaattttgagttttcattaataatcatgatttgttaggaatatatataaactatttaataggaattgttaactgaaccagcttacctcctccctcaacctagagactagaaggatttaaattctagctgtgtgatcttgagtaagttatttggggataataaaacccacctcatagagttgtgaggagcaaatatttgttttaggcgaaacacttacagtttctactaaaccctaggtgtccaattaaatggcacttcaagttaacaaatctagtggtcattgttctgtccttgtcttactctctcagcaatattggacacagttgattaccctctttttttgaaaattttatttcatctcttggcttctatgacgtggtagctctctcacctcactggctatttcttcctagtctttaaaatctgacctctggaattatgtgagtgccgcagggcttggttcagggctcttttctctttgtatactctctacctaagtaacaacttgcagcctcaagtctttaagtgggatcatgactttaaactcgttattccctacttttagctctagccccttaagttctgtgctcatatacagaactgcctatttgatatctctattttagtgttgatttgaatagaacttctgaatcagaactcttagttccctagtcctaaacttctcttcttctagtctctcttattattttaagtggcaccacaatcccccatccattcaagttcaaaacctaggagttatcttttaattcttctctttcctcaccttccacatcctatacatcatccagtcgtgggagc

SEQ ID NO: 98359 - DNA, 1046 bp, Homo sapiens
aatgagactttttaaagaaacaactgggcttttcttaaatatatggtggtaacagagaagaaaaaatggattgaagcagagtatgtttggagaatataggtaataccaaaaaaaatttttttaaggacacaaatatattttcttagtgttcccattggtgtgatatttcatacttgatttctagatgatggaaataagtgcagtccccaaataaaactaatttggaagaataaaatatgtatctccttacaaagacttctaactgtacaaatcttcaatattgatatgttttcctcacttattttgtgaattacagaaaatgcttaagattttctgcctttttcctgccttaggttagaactctatagatatgaacattatatattatgttccaatgaatatttaagttgactagtcagaaattaaatatagaatattactccatatgttgtaatgtaaagtgctattttgcttagctaaatatatttttatcgggtattttattgtgtgttccttcttaaatgcgaaaaaaaccccaccattttttataagttgccaaatatctaaatgatacttatttactccaaagagctgccttcttttctgccttttaagcagtccacaaacctccaatcatgtaaatattcataacatatgtatgttatgtacctggtgggcacagctgcacaaaactataacatgagtggatgtgcgtcgagtatctcatatagagttaggatagcatctcagtgccaatttacacctggtttattaattttctttaatttcagctcttgtttatcttctcagaggaaaaccacaagtgaatgtggaaaagagaatcttaaccacatcttttcctctgcaaaagctgtttacttggtagcatctctgaattagtcatttcaacatgattgaatagagttacatcatgcaaagtgtaatttttattttgggttaccacataaggttctgaagctgaccactaatttttaaaagacattacatttaacttgtttttgttgtaaagtcattatataatagct

SEQ ID NO: 98360 - DNA, 1870 bp, Homo sapiens
tcagatttacaaggagcagctcaacaccagggttgtcctggtggctgtagagacctggactgagaaggatcagattgacatcaccaccaaccctgtgcagatgctccatgagttctcaaaataccggcagcgcattaagcagcatgctgatgctgtgcacctcatctcgtacgtactcatttcagcctttagtgtagtctttggtctgacatttatccttatcccttttttggttcagttaagttaaatatcagaaaatagtgacttgaacaagatttctgtgggttcctttgtctgttagataagaagcatggagttaggatatcccatgctgggatgctgatggttctgtagtcacaatatctacctttagagcccataacttccatcctcaagatcaactcacaatctaggatgcctgctggccctccagccttcattactggcagcgggcatgacatgtggggagaagggcaaaagggtactccttccagccgagctgactgctgtaaagcaggtttcctgaaagcttgcacatgtatgtttcatgaacaaatcatttgctaggtgttagtcacatgggccacacctagctacaagagaggctagcaaaatgtagtccttttagatgaactattcagttgagtttctactactaaggaaaaagggttctatactttctttttaatataataagctattctcttccccagtcatggcaaagctattttcagatagtcctctaaggttctgtcctggaatcaaaccaaccaaaccactccttcttttcctcccaccattaccgttgacttcctgttttttcagtctttaatcagcaatttttaataatcagcaatattaattctttttaatcactgctagatattctctactagaaaaaagtcaagagctgtgtctgtttatcttggtgttttcaattcctgtgctagtacatgatgcttagtaggtacttggtgcttgctcaattgaaattacgtaacataacaaatttaaaggtaattatgtcataaattttaaggtagttgaaataaagtttttgatttcttggaggaggatggtttgggggtgttccatgtaggagggtagacatattttgggagagtatgaaatgatggtccaccacgttggttttctgatagcactgctttttcttaaggcgggtgacatttcactataagagaagcagtctgagttactttggaggtgtctgttctcgcacaagaggagttggtgtgaatgaggtaaattttaccaattagagtttcatctttgcatctgttctcttttttccctatggcccagtttacatcctttctcgtgcttgtttagaatgatgacatggcaaatgtagcatgagtggcttatgttattaataaatagaacccaacgtggtccttttggttcatagtgacatattttggtgtcataatgacaatttttcgtatatatcaggcaaatgcagctgaagattggcctggagacttttaggcctctatagataagatgttaagcttttataagcttattaatccttctctgactttttttttgttataatgctcctctgtctatgttaaatttaactcattaaaatcaaaggatttctgatatcagtactgtatgtttttttctccctatgtatatattttcattttcatgccttctacctacctatctgtagaatgaactcaaacacctatttccttaatctcattgttcagattttaatactttcagttttataaaggaaattcttaattggtaacagcacccaaaaagcataaccaattatatctaaactcttgtcaatactgaaatatattataccaggttatctcaatagcctaca

SEQ ID NO: 98361 - DNA, 2331 bp, Homo sapiens
ctcatgatctgcccacctcggcctcccatagtgctgggattacaggtgtgagccactgcgcccggcctaaaattctttatttctttgtgacttgtttgtttaggtagctatttcattggttctaaactttgagtttaaaaaatccatttggaagtctatctttgcatatacctctctctctctatataggtatatatagatagatgtatacctctctctatatatatacgttgatatatattgctctctctatcgatatatcgatagagagagaggcatagaaaagagaaacaggaaaaaattaatgaagagaagagcccatcacaatatcaatatgtcagtttctggtatcgaagttaagttgtaattgtttttaagtgattatgtacacttctgttttagattgctctctttcactaaaccttttagcatagtgttcattcaagtctcttgctcatcctcacttcaactctaacaaattgaattctcttctctaacttcgagcattctctgttagaaaacttcagtgatgatatgttgtgtttgtgcaacagagctttaaaattcacagcacataggtacaccgtctagtgtgaaccccacaaccactctgggagatagacaaaaaggtgttattcccatttagaggtagaaacactgagacccaggaaatgctaagttacttgcctatgggactctctcatatgacagatcttggactagaactcaggctgtctgatttgtagaccagggtacttttcactaaacattagaactaggaaccaaattgagttgtcagagttacaaaaataatgaagagaggcacaatattacttcttgccagctgttttcttaggaattaacctataattctggaaaggataaggaactattgatttaaaagaaattttgttctgtaagacttcacattccgtgtctatttgactgacatggaattggtaataaagaattattgtaggagttgtaataccaaaaaaatatgtgactttctttgtttcctttttcttctgttgcttttattgttttattggaccagaatgtgactgcacagaatcctggggtggctgcatcatggaggaaacagggtaaattttcattatgcgtgcatttgatatatgccttttgctaaaattgctgtgtagagttagaaacaaggtctctcgggtattggtcttttaggctaagcacaatataaaatgaataattaattgtctgatatttttaaactgaaagatctaatttactttgtattttaattttttatttaaggttggtgataaaagtaaaatgtattaccttctacttcttattaacccttaaaggaagcacatgattaaaggcttctaagtttagtggaggcattaattttttagtacacttagattaaaagttggttatctacctgaagcagtcagtgaaaatcaatttagtcatcaatttacattttaaggaactcgtaaatatatatgtttacggtaataaaaattaaactttactgtttataaatcaataaagctttttaaaaattaagacagacttattgtatctaaatcaggtagtcttctagtgatagacatttgaacattccctcacttttcttttgtgaatactttgggaactagagcagcttccccagagctgctgttgcttcagtgaaccaaggcctggaaatattgccctctttcacagggacccctgcctcatgggagccactgcccccagaccccctaagccataacccactcctagtagaggggagaggtttcctcacccatgtgcctcttttgctttctttgccatgccagacacctgctcaacacaccaaccatttctggtcctacctccgtccctctggttgccagaggccctgacctacttggacagagctcctttgttttcttccaccagccctcctaggagtccaactcctggggaggagtgtgggcatgaaggtttgcacagtaggccattatccctgctactttagaacgcatttctagaaatagagtttaaaacgtgaaacccttagcttccacggttccctattactccatagcttagtaatttatggcttaaccaggctttttgaggactactataagaagataacacctataatattggttctatagggagatgtcttctgtcttctaaattaatctctgaagtttttacaatgactcttcataatatatataacatataatatctttaatatattttatataataaaatatataaaatgttttaaataagataaaatgttttaaagttaacatgtattttctcaagaatacatttctatatatt

SEQ ID NO: 98362 - DNA, 1110 bp, Homo sapiens
tccaatgtaaaatctagtacgttcatgagctccttttattcagaaaacagaggcaaaaaaaaaaaatgcttgactttaatgagatatagcaaataaaaattaacaaactttaaaatacagcctatttgaagaggttttgtaatgagctttttaaaaaacatttcaagcctggtcacaaaagggcttgactgctgaggaggttgtaatgtagcccccaaatctttgattttctttgaaattccatctctgcaaactccaccacaggtacttaagtggcaatttgaacataagtcccttgtcaaaatttgtgtagattcatttggattcaaagtgaacattttgttctaatttaggggttttaattttcttctctgatgattgcttttggtaaattatttacatagttgattctttgtttcctcagggtgtcccattctcgaaaattttcaaagtgcagcattttggagtatagagactttttacagagaggaggtggagcctgccttttcaacaggccaacaaaggttagtaacttagaaagcatactaagaaagtatattatttctccagtgttttacagtgcaacagtgctggatatcagacgcctgtcttggaaagcaggtttcttgtcaatcagattaatatttagttataaaagtccttatcatgttaaagattgagtcctgtttaaatgaatgacaaaaccatagattcagcattctcagtctctggtgtttcagtgctagctagaactcccaaatcctcccttccaaagagcaaacaatccttcaattaaaatatctttgagattttcatgttaagatttttaccctgctgctaagagatggtgggttaaattaagataaaatattattttaactaatttctctgataaaaattccatttctccttgacattctttctagggacaagtattagtccattttcacactgctataaagatactacctcagactgggtaatttatagacaaaagagttttaattgactcacatttccacatggctagggaggcctcaggaaacttataatcatggtagaaggtaaaggggaagcaggcatcttcttcacaaggtggcaggagagaga

SEQ ID NO: 98363 - DNA, 1033 bp, Homo sapiens
gtttccaggctacttgggtgggactccccctgtggaaaagtcctatgagcaaaatcagcattgcacatctctgtgttattttgatcaggaggcaggagaaactggaaaagggaagggctgactagaacatggcctgcactttataccaggctcccccttctttccttcttaggactctgcctccatcctgagacgggtcactatctccaacagtgtggaaaacatggcagtggggaagattcctaaagcacagaaaatatgcacacatataatgtaaaaataatacacacacaacacatgcatatacatacattcaaaacgcttgggggaaaaagtcacttctttgatacatacatataaactattccactggcatccatagttgtttattaaccattgtactacgtagtttaaaaagacataattccatatttactaactttttaaaaaatagatgatttatagttatttttatttcatttccaagttattagaataattttctcctaactcatagacaatttcagaaatccattgatggatctttatgcatatgctagaaaccttaacctttccaaacaagtgagagttgtttcctcaggcatgatgcttataattagctcctaagctacaaggtgggtaaaattagccatgtacattacaattcaaaaatgccagcagctcacattagttcattattacttatttcacccattttgaacactttgaagcttttggatttctgttgcattgaaatcaacgttatgaaaggcaggcaactgactttcacgacgcaaggtcactttgaaagtcctgtttcttttttccacagccatactaagattctacacagatgtcaggcatcaagccaccatctcctgactacgtagtgtcacttaattatgggtttaggaataaattatcctgttagttaccacattagttactgatttaaaaaaaaaggttaacattatttcgctgctctctcagtttgcaaagtattaaacattttgcatagcaatgagctatattt

SEQ ID NO: 98364 - DNA, 1042 bp, Homo sapiens
attcgtatgaatttattaaaatttgattgtctgtgtttagcaaaagaaagtttaatatctatgctaataggtaattcagtgaaggttgggtatatatgtgaattcttcagagagatcttaaatgtttatattatagtgttttgctattttgtcttaagccaaaccagaatttcttctttaggtgatttccgtcacattgttttctgaaaatagtactctgaaacagtgggttttgaaatctgaacatttaaagctttggttgatgattcatctttagtgtagagggtagcatctgggtcttgtttctattctgcaataggatattctgtcttgctaattcttaaaaagagtttggtgttagttatgcgagagtataggcattgtcggtgagtctaagaatgttataataactctgaaatattatgtaatgctaactcttaatattgaattttgatttgcagtttcagccacgagggtatgaatgccgggatgctgtgaacgagtgtgatattactgaatattgtactggagactctggtcaggtatggcgcactgagtttttggtaatacattttacttgtacaggttgagtattccttaccacagtgcttggggccagaagtgtttcagatttaagattttttggattttggaatatttgcatattcataatgagatatcttggggatgggactcaagtctgaccatgaaagtcatggatgtttcatatacactttatacacatcgcctgaaggtaattttatgtaatattttaagtaattttgtgcattaaacaaagtttctgtacattgaaccattgaaccctcagaaagcaaagatatcactatctcagccacccatgtggacaatcagtggttgtttggcatcaccatcattcctgactctgaatctgtatgctaccaataggcaattactttcttgtacttattcacacctaattacttaacagtaaaaaaaaaaaaattggacatgcattaagacattgaaaaaataatatgttcaccaagcagcacagtaacat

SEQ ID NO: 98365 - DNA, 1098 bp, Homo sapiens
tggaacctacattctgctgggtatagaaaggcaagtaaataaaaaatcagatggtggtaagtacaaagcataaaataaggcaaagtggaaagagtatagggtaggatgtgatagatagggtgatcaaatatttctttctggaggacatggcatggaagcagagacacaaataagaaggagcttgtcagtaaatagtgagtacagaagcttaacttctccatgaaatggaatgaaagcaaggatagctggagaatagtagaaacaaaaaggaagtcaagaatcagggcaggtagggacatgtaggccatggaaagaattttagatttcattctaccttcattttaattctgacattattttaaaagcatttccccatactgttacacagtttttatagttaattcttttcacgattgtatgagagtctgtcatgtggatttatcagttgatttatacccagtatgggtatttagattttggcagtttattattagtagtatagaagtgaacatctttgtgcatttttaaaagagtgtttcttgttcagggttagctcctcaggacaagctcctaaaaatggggttacctgttgctaggcattgtgctttccaagaggctcccaatagagtacacttggcagtcaaaatatcacttttattattgaaaatggccaagttgaaggctgtagcttaatgtgagggctaaaagttatctttaagatcccagttcaggctatagcaacaggttactgacaaaattgggtccagaaggacaatgtatggcacggggagcaatggaaaatgcatggtttatgtgggtaggcttgcttataaaagaatggcagaactgtggcggaatgcctagttcttcttcccaagcttatcattggtcagtcactccacctcccaatgatggaagtgagtaaggagtaggggagctggggttacactgagttccttaaccagaagaaaaaatgaggagagagaaagaagggttcctaagtaacatttttgtaaaggtgttgatatatattatttgaaattcaattcagatggaccctcttaaagaaatggtacagtgaaatatgttcaggccgtg

SEQ ID NO: 98366 - DNA, 2851 bp, Homo sapiens
taagtgctttggaaaagaaaaaaaaacaaagaaaaaaacttgtagacttctctaaaaataaataaataaataaaaagcccttaaagcccttatcctaaattggcacagccccagagagtgccagcattggaggggctgcagctttgaagagcataggttctataaaggcctctttgggatgatgatatttgagcaaagctctaacaaaggtgagggaatgagccatgccgaaatccagagcgacaacgggaaagcaaaggcaaaggctgtgggtggcagcatgactggtgtgtccacgtggactcacatcagccatgggtgaacagaaaatgatgtcacagagatgacggggtgagaaagtataggagcagatcatgttgagcttggaaggtcattgagtaagctgggaaacagaagatcgatgtgatttggtatttacctttttaaagagatcactctgatagcaatgtaaactctaaggtgactaggatagaagcaagggactcaggtgggaggctattacagtaatccaggtgagaggtggtggtggcttggacagggtgtgagcagtggaggtggagaaaaggggtcagattggaattatattttgaagatagaactagcaggatttatggacagactagatggaggaagagtgagagaggaggggaatagaagatgactatggcctttggcttgaacaattggaaggatggaacatcatttactgagaaggtgaagactgagggaggacctcagtgcacactgctgtttcttatttatttgccatgcctgcatatttttttctttttgtatttgttttaaactctgtagcagggcctttgacttgatctttttccattctcttaaatgtagtcaataaaatgtacagagagtaactttggggggaaatgaagtatttctttaaaaaatgatttgataaatagacctataaaaagaaataaccatcacatcacagactgttctagtaacatgtctgcagtttgaagaggtcagaactattaatataatggagatatagcacttactttgtgttgaaaggcagagtatttcttctgtttcactaaagtagcctataggtaaaatgtcatgatgtcaaatgcagatttgacattttcagagagctgagcaacttcttgtaaattagtttcttgaatgtgaccgttctatgtaccaagctgattcatttccttcattgtccattttaatctcttctacttttaactctgtaggcaagtgaatgtgacttgttattctggtccatctcaccataaacagaggaaacatataaaatgcatgcactgtgtggcccttacttacttattttaccaataataggataaataatttgaattaataacgtatttaaggagttgcatgtgtttttctcaatgtttctagttatatatatccaccatgcttgcattatatatagtatgtacattatctgaaggtacctagcatgctgaatattaactaaaaagataatattttgcagtgcccaccaaatcttcataagcaagacggatatgcatgcaatcaaaatcaggtatgctgggctataaattttaagtgtaatttaaaaaggattcattggaaagtttttttttccttttttgataaatattaatataactttgaagggaattttactcaagtaaattattatagtgggattctaatttagagttgcttcatgttatgccaaatattaaatatatttacctctggtgacaaattgtccagattaagagaaaaaaaaaaagaatgtaatggctgaagaactgggagtctcatttattgagttgtgaccatctttcagtaatttcagcctgcctggtgtgtgaaagaaaatatgacaatctgtcatgagttttttttcccctgaagccatattataacctacaggtgagtatcatgatgtcaaatgcagatttgatgtttcctaaccatccatacacaaaagaagctaaaaatcattttggtgtctctcacagaaatgtaccaatttttgtttgctgtaaaatttcaaattgtagatgtttagtttacatttagagagctgtacaatgagttctgtttagagttttaaagttttaactcttattcttgagatatttgtgatccttactggtcactataaaaatattagggtatgaaatgaaaaaactttatccaagtgaaccagaaggagacattgtagtaaaaacattggggaagacaaactgactctgtgtgcctcacatgtgtgctcctgtccccagggccgctgctacaatggcgagtgcaagaccagagacaaccagtgtcagtacatctggggaacaagtaggtcgcacctccttgcttggcggttacacataccattttctcttaatagtgttcttctctgccagtcttgctgagagagatgcacagcttggagtgatgttttaaaaaaatctagaaaggatgagaataaagagaactgtgaatcttagtcacaaaaactatagaaaacaactgcttaagttgggtacttgtcagaactgagcagtgccatttaatggctgtggctctcagagaaggggtgttgcattcatttgcaaagattgggttgagtacagtgtgattatccagccacttgtgtgatttattttgtaccttggttttaacatttgaccccctttttttccattaacacacacacaagttagctttctggtttttaccgcaggaaaataccagacttattttttaaattttgtcatttactgtctcacttcaaagtgaagagatgcatgtacttcctgagatgcagataggtacatggctgtgattcttagtacat

SEQ ID NO: 98367 - DNA, 1128 bp, Homo sapiens
ggtaggaagtaaggataggagcaaaaggtcttctccctgtcagtctctaaccttttatccagaaaacaaaatcctcccagccactccctagccagcttctcctcacatcttcacagcccaggggccacttttaactctaggaagacgagaagggggaatggataggaaagtgggcgtcgagaatgggagtaccaagaatagatgagacagcagtcatgatccacctttcagggctgggcactttgctgttccaaacaaaactgtgatcctcttagcaaagaaggaggaggttatcacctaccaatgatatatgatcaaatgtttttgtttagaaagaaagataatattttaaaaatttgaatcaatgtggaccgaatcgttttgattttttgagcttgattcctcctgtctggtctgtttgttttctttacacatgttcagtgatgtgttctgtggattcttactctgtaccaatcttactcgagctccacgtattggtcaacttcagggtgagatcattccaacttccttctaccatcaaggccgggtgattgactgcaggtaacatattaaatattagaagacctaataagccatgagaattacaaatttcacaaaatgaaatttcaaaaaaatcagaaatcaaagatttttctagtttttacaagaggaaagttaatttagattttattatcacctttcatattgacagtcacttaaaaagaaacaaagttgtatattgacttgcagcttacatttgctcaaaattatactagttagtagtaatatggccttctttgtcatcataattttaggagtagaattatggtgttcattctaacccattattaaagttttaagcattagagtatgccactattttgaacactgtgtgtgtatttattttgtgactgaaaagaaaaagaatttaagctatagtttatgaagtgtatgtctggtttggaagatggcttaacaaatacctaatcatatatagaaaatatttattaaaatagtatgtataccgataagcaaacatttgatatccagttgtctgtgagtacaaggcatgtagatatgaggcttatttttgtttagtcggggagtcatattatattccaaataggt

SEQ ID NO: 98368 - DNA, 1022 bp, Homo sapiens
gtttatgtttttcaattatggataatcagatcttctgaagtaagaataataattttcaaaatatttttcatttgctgtttttgttcatcgtctgcttttttctaccatgctacatctgaaagccttggagagctaatgatatatttgcttcttttgttctcatatagatacttctctcctttagtcttaatgttgggtcttgaaaacacgtgaagatttagaatatactttgtgcaaatgacatttttcttgttgatgtgtactgtaataatgataatgaaagagtgtttctttttcatgctcttttattaaggaaaggtagggaaaggggaagaagaagaggagtaagaaaatgctaggagaaatccacatccactgacagcctcttcggttttgtgaagagcaagcctcattcatggaatgatgttctaagtgtggtgcaaatagttatatgggtatctttcttgttttagtggtgcccatgtagttttagatgatgatacggatgtgggctatgtagaagatggaacgccatgtggcccgtctatgatgtgtttagatcggaagtgcctacaaattcaagccctaaatatgagcagctgtccactcgattccaagggtaaagtctgttcgggccatggggtaagtaggtatcaatgtgacagctggaaccttcatggtctggcatggtcacagtgactggactttaatttcagccattctcctagccaacatggtgaaacaccatctctactaaaaatgcaaaaaatagctgggcgtggtggtgggcacctgtagtcccagctactcaggaggcttttgcagaagaatcgcttgaacccaggaggcagaggttgcagtgagccgagattgagccactgcactccagcctggcgacagagcgagactccatctcaacaacaacaacaacaaaaaaggccaaattcagccttgttaatcacaatcatggtattagaatatttcagattaaaaagcttccttgtttgattttatcatctctg

SEQ ID NO: 98369 - DNA, 1569 bp, Homo sapiens
cagttacttctgaacaaagtagaaaaaagtatcttatcagacatttgtatacttatgtaatatcatgattcaatttaatttaagaataacatgaataattcaatttaagaataataataaataataagataaataattgaagaatttcttccttttactctttttctttaattaatgggaaaaaatgttacacaatttgatctatgcattattaccttgtgtctagtgatcaagaccatgggaaactttaaaaagaaattccaaatagcttttaaagcttcctccctgcccccgtgtctcttttacatttatcactattattctacaaaatacagtgaaaatgccatatctgttcctttttcttcacaggtgtgtagtaatgaagccacctgcatttgtgatttcacctgggcagggacagattgcagtatccgggatccagttaggaaccttcacccccccaaggatgaaggacccaagggtttgtgtgattttggtttcaattcatggaatactgaattcgttgacactgttccaatgcaccagtataacattctaattgacttaagaggagacacataagaatatctgtttttgcctttaaagtatataatttatgttactgccaaattaaggattctgatatatcatatttttaaaatgtgtttgaattacttcttagtctagaactgagattgggaagaagtaaatatacacattttctttaatacagtattctttttctctttaaaccttattctctttctgtagtcacaaattattttgcagttcgtctaagctatgccatttttctaatagatcaaatctttttggctgacatgaggctctggttacttttcaatgttggaatctctccggaaggaagttgtcaccttacaagctctttttgaacattcttttgactaggaaggagttggaattcttcatagaactttcattcttcaaagaaaatgtgagagatctggacctttgttttaatcagtcattaagaggagagaaattagaattttgggattagaaagagactcaggggccacctaggaccactctctattttcgcagatgagaaggcccagaccctgaggtcaggtcacttactatagtcacccaggtagtgagagacaaggccaggatcaggacctaagtcctaagtgcctgatctcagactcttgttctcttcccatccattatatcatcttttttttttttttttttttttttttgagacaggatcttgctctgtcacccaggtaagagtgtagtggcacaatcatggctcactgaagcctcaaactgcaaggcccaagaatcctgccaccatgcctggctaattttttattttttgtagagacaaggtgtcactatgttgtccaggctggtcttgaactcctggcctcaagtgatcctcccgccttggcctctcaaagttctgggattataggtgtgaaccactgcacccgcccctcttacatcatctttttttttttttttttttgagacagagtccgactctgtcgaccaggctggagtgcagcggtgtgatcttgg

SEQ ID NO: 98370 - DNA, 1522 bp, Homo sapiens
atcttataatgtagtctgtgttatcaggagtatggtaatcatttttcattattctcccgattctcaacccctcatacaattttcaaagatctagaaaacccatcagtcacaaacaggcctactacagcatctgttacattgtacctaagaaaccaaggaaatactagaaccagtttttatatacagggatgacgttgtacatcagcttctttatcatggtactgctaacagtttttttgtaactgccgtgcttttctctgacaggtaggaaaatgcatataggattagtaccatttagatcagcttagttttggatgaaagtttattgaaactctctgaacttcagtatagtttatatgggaaaagatgatttcagatgcagatgaagctctgtagtcctcaattcctgaagagatttaggctgattcaggcgcatgtgaattgttcagtaatagtgggtgtgttaaaacacattttatgcatttgcttaatatgcccatgatattaaaattctgtaagaatcataatcacaccctcacagtctatttctgttctccttcttctatttctaaaagggaacgtattccacttttacacttagtcttttgttactttaaaactagaacaaaaaattcttggatccaccttctgaagttagatttagagaagatttaagctctaacaagagaagccaaggttcattctttccaaattttctctccacagtgtttctgtgattttttttttaagatctagatgctatttcctcaagtgatgtataaagatgcctcaacggatgagcagagctaaatttacttagactctgcctttttttctttaagtagagtagggggttattaattgtctggttctgtaatatctattccctgttccttcacccacccatgcctaaaaatctttggaggcattaagtaaagaaagtcacattctagagaaagagtactcacagctgccttttgttttgttttgctttactctctccatttaatgtggtagtatcccacactacctttaaaaaaaaataacttttttgatccttcaagtaatacatacttattgtagaaaaatttgaaaatacggaaaatattaaaactcagaggtgctcaagataagccttattgggcctggctcagtggttcgcgcctgtaatcccaagactttgggaggccgagggcaggtggatcatctgaggtcaggagttcgagaccagcctggccaacatggtgaaaccccatccctactaaaaatacaaaaattagccagacacgatggcacatgcctataatcccagctacttgggaggctgaggcacgagaattgcttgaacccaggagacagaggttgcagtgagccaagatcgtgccactgtactccagcctgggtgatagagtgagacactgagccccctactcatcccccaaaaaagaggccaggcacggtggcttacacctgttatcccagcactttgggaggcccaggcaggcggatcacctggggtcag

SEQ ID NO: 98371 - DNA, 5058 bp, Homo sapiens
tgtattgaaatatggagctacataccaatattatacactagtatataaagagtttatttagtatttacttttcttgtcttgaatggtagtggaataataaatccctgaagaaagcactttggtccatggaatacaaatgatgactttgatgcctcctgcctgtgaagtatcaaaagatacaggattttaaccccctttggaatcacttgggggaaataatgcatcttcttatttgagaaactctctaaaaataaggaaaaaaacccactcaatttcaaaacagcacattttcaaaatgtctgaagcatgacatgtctataaaggaattctacatataaaatagaaaatcttaagaaaaggagaaaatttatagtttttgatattttatacttaccaaaaattctgtcttttagcacaagtaaacctaggtagcagggaccaagactgaaaataataataaaccaacaagtaatggaaataagcaagtaaacaaaaatgaaaacattctgctaggtaataaacagattccacaaacacattatactgaaaagtaagtgtatcaaagagttagggagcaaagttaagttcctaataaaaggattgtgttgtcagctagaagctttaagcgttccatctccaggtttggtaggatgagaaggaaaataagatatatcatcgtgtgtccagcatagttccttgaacaaaaaaaaaggtatttagtaggtaatgaatgaattaatgaataaattacagaatagataaattagtgtagaagtagaatttttttcaatgagatgataaattctttgtagctatgaaaagcagctgcaacctttgttttcaaatatgtcccctataaaaatccacccacccgtgagctactcagttaatttatgtcaaggtgatgcacaagttcctacttgccaaaacaaagttcagcactctctaaaggaagagaacaaaagcaaagcagaatcgacaaaaagaaaatcttcacatctttaagagacaaccatgttcagtacaatgacaaagaatcaaatggcactttacatgtatttgcaggatactgtgtcactcaaagtaatgggagggagagagaacagggagggtagggatgcttttgaaaaagctttttttcccacttttaacttgctttagcgttaagagtacttaccagctaataatgtggaggaaattattctttctcattggagattacagaatatatctattcatcttgaatacccacttgaagcctctgtagaaatgtctcgtcctccggttgtatttctaaaacctacatgattttgtcttgtttctgcagtgagaaattacatccatagcaaagacaaaagtctttttaaattatttttatttatctttcatatagttcttacaatttctaaaaaattaacactcatttagtatcacaatttatgggagagggttttttgtatttttaagcatatgtggcttatataaaaattgcagaagtcataggactgtcatgtattgcagctctgagaaccaatgcctgaaacttaagccaaaaaaaaaaaaaaaaagttatgaccaggcacggtggcctcatgcctgtaatcccagcactttgggaggccgaggcaggcagaccacgaggtcaggagttcgagaccagcctggccaatatggtgaaaccctgtctctaactaaaaatacaaaaattagccgggtgtggtggtgcgcacctgtagtcccagctacttgggagggtgaggcagaagaattgcttgaacccgggaggcagaggttgcagtgagctgagatcatgccactgcactccagcctgggcgacagagcgagactccatctcaaaaaaaagaaaaaagaaaaaaaagttataaaataatgtatatcagttaatttagtattctgaaagcaagggttttctaaggtctttttaaaaatgaggcttcatattttgaatacctttcagtcccagtgtttgcctccataacttgaaaatcggagtagttcaggtggttttgagttctaatgtattgtcatagtggggaaacattgctgccaccttctgtgttggtcttcttcccttagccttcaacactctcgggggacttttctgttctctgttgtgtccccatctttttgtttgtttgttttttaagaaaccaggttgtgcttagtcaatgataaaactagaatttctccctcacattattatcttgtgataagataaagcagtatacagttaattaacagggttagaaatccaagattctttctcttcctctgggaaaatatttagctaaaaatgtcagtgagcccaattgtaagccttaaaaaatggtggctttgagtcgtggatctttgtttcgtttcactgtctcagagcacacaatacatgtgaagggcagccttgttgaagctaatctctgttttcatgggaaaggtaatttgaagccagtccttttgattcctatagaaatatgaaataaagtgtatgtatgtccacacacttgtgtgcacacaggcacagacacacaactgcaaacaatgtgtcttccaactttaacaccaaacttcattttgcctttgtagcgggaaccttggggacctccactcattccaggcccattttccaggattggaaagctgtacacagagaagcagtgacataaagttattcagattctcactctgatagtcatctaccacttggtggtctgaagcaattaatacggtttcccagagaccctaactttctataagtttatccacttgagactactaataaacaaaaaacaaaatgtctaaatactatgacagaaatccaaatattgcagacttatctgaaatacgcttttcaataacttcccaggtaaacatgtatttacttttaaagctattctgtcttgaatttgtaaggatctttgcaaaactgaatgatatattctgaattttgaaaagatgtagcttcttaggcatattttacagtttgagaattttataaacaattactaatggttcattacttttgtaattaaaatacagatttgctgttatgcaatttaaattactttttaattttacctcacatctggtaggaactataacaaattgaattatttatgtatttataagtacgtataagataattatgttttttaaaagtagggtgtgcagaatttgaaggtaaattcacagttatcctcaaatatcttcaatgtgtatgtagatcttaatttcaaatcttatagcaaaaaaattcaatatttagccaactttcaaagcatgtcctgaatagattattttgtatgttagtgaaattagtatgtaatttcctttgttaaaaaatctccattttccctccacacagtgaatatggccacaagcaggctaataggggccgtggccggcaccattctggccctgggggtgatttttggaggcacagggtggggaatagagtaagcatccttgccagtttcagagtgtttctgtgtggtgcctgatgtgtgaggcgatgcctgtacctgactccatgtctcgtcctgttgaccgtgtttcctgtggtagtgcaccttgtggtgtgacttggatgttgcttgtgtcctgtggttttcttgtgtcatgtagaaccttctcctgtctggaacaatgtggggcataacataacactgggtgtgcttccgatatcttcataattaaggcaatagtcccaacacttccattgctcctccactttgtagaagtaattttaaaatacagacttttttttaaaccatttattggcaaaaatgcttttatatgtgtgttttcttaggattcttgtaataaagttaatctgtgccagtcaaataaatttacatatataactagcaattatcaacagttataggaccttttaaaggtaataaaaatgatagctactaatgttttcttcatttatttagaatgatataggaggctgcagcttaattttttaaaaagaagatatttagcatactgccttcctatttttcctataaaataggttaataattcaaaattgaagtctacataaatatttggaagcaaggagcattaagaatgaaaaaatatttaatccaaacctgtataaccataagtgaacagctgcaaatcacctggtgggttcgtcttaaaagtagccagggtgtaaataaatatattgtgtgccacttgcccattaagctgtcacagaaatacagttctcctgatgctttgatttagggtgctctgtacttgatccacatcctcagaatagctgtcagttctccagggcacattgcttcctgagattgctaatctgtagattaaaatattatcatgatttttttcttctctctctaattagaaaaagaatatttaagaatggcagacataaccctttacacagtcttttctgtctactgtggtggtggtggtaacacttcaaagtggcccaggaatgaattactagtatcttcaggaatcactagatatctttgactcacccatcccaaatcatgggcttattgtgaatatcagatatgtttttctatagtcccattagttagaacaaatgggtgctcctcttacacactggaattgggagacccggggaccaaaatagcattaagagggaagcaggttcatagttcacaccttgtgttgaagatgacatgagccttctttctcctggattcaaggactttgaccagacttagatcttccaactcacatctcatctctatggactgtgaagctggttagcacaggggaagctagaaatactagaaaagagattttgtttctccttgtgtattagaaaacaaagaccataacagggataaaaatatttagagacaaaaactttgtcctgtaaaatttccccttggatctgttgactggattgtatacagaagaaacattcctttttcagggccagctccatgcatgcatttatgtgaaattcctccttgacaaatggtagttttctgaaaatcatcccaaatgcattttttaacattatacattggctgtaactttggtgtc

SEQ ID NO: 98372 - DNA, 1157 bp, Homo sapiens
ggtttatgagcactagttttctcttagcttactgatttttttccccatcaaattccaagttttagcataattgctcaagaaatatagttttttaaaaaataatgtagtacaatatagattgtctcaacatttcttagtttaattgatagagtaatgttcattcagtcactaagaattccatggacagttttttttttaatttctccttagtttataagtcaggaatcatttttcatgaattatgtgttgattctaatcctagcctgttttctgaagcggacgaagtgcaaatcatatccaaagcatagagtatgtacatggttatatatttttttaatatttgttttgaaatttgattctctgttgaattgtggggaggaaatacatgtaagtagaataaagtttctctaaaacagaagttagcaaacttctgtaaaaggccagatggtaaatagttttagctttcagcctacagggttgtctgtaacaacttctcaacaatgctgtcttagcatgaaagcagccataaacaatatgtaaatgaatgtgcatggctatgttccgataaaacttttttgcaaaagcagacagtggggctagatttggtctgtgggctccagtttcctgacccttgacttataggatatgttttagggtcagacaaatctgtgttcacatcttgccgctatcactcacaaacttctagaagcctgtttcctcatccattaaacaaggatagtcatagttcccacctcatacgatttttgtaaagatcaaaagagatactatatgtcaagtgttcagtactgtgtccagcacatagtaagtgcacaatacggtagctgtttaaactatttttatggctctcattattattattattattattggtgtatctctaaaggcaactgagattcgttctctagacggtcagtggttagtcttaagagcatgtcacaagcccaggagcctaaagagacctgcaccccgagactgtattgcagctgtcctctacctgcccaccaagcactggatggtctccgaataaaaacacattatgcatgcaatttgtgtgctgccaaaagtggcatccatttatgtacacagttgagggcactgatgtgagcagaaaagagaattttttacacagaaatgaa

SEQ ID NO: 98373 - DNA, 3621 bp, Homo sapiens
gttagtaacaatgggaactttaaagctattctcagttgaatctaaggaatctttttaccatttccccaaaattacccaaatgagatttatgcttccttatatcttgcctttggaaccccattttggtctttaccactgtaaggatagtgaagaagtgtatctttgagagcaaggcttcaaaagtcagatctgtattgacttccttctgactgctaagttttaactgtttccaagtggggaattaaaaagttagcattcagaccacttttaggtgctttttggaagggcattgtagcagaatgtgtttcctttcctccatgcccccatttgtgagtcagatggagcttgtctgaatgcgatggtgttctctctgtgcttttacttatttgatacatgatactgggagaggggaagagaagaaggatgtgtaaagacagcaagtggggcctatttgcttcaaattctgtgaaaggtgaatttaatggaacttaattgtcaatggtgcagaaactttagatttaaaggcatataaatccaagcaacgctcaccgtagcatctaaaatgcaattaagctaagtaaataaaggcaatttaaatgtttagccgtcttttacacaggatatttacttcctgaaactgcttaactgcctttcccttgtggtaacgaaagtggttggttcatatgactctcttcccatgatcctttgtcacaggtcctagtgccaccaatctcataataggctccatcgctggtgccatcctggtagcagctattgtccttgggggcacaggctggggatttaagtaagcaacgccgcatgtcttcttctcagtggctctggcatttctcttttctgcttacataaccaagttttgagttcctgctacaagagcttaggttctgtcagtcaaactgcaaaaaataagtctttttattcagaaatgggttagaaatgaagaaacacggaccctcaactgtcattttcaggcaagtggaaatgtagaaggaattcatatacactgatttttaaggagaacaacgaagttctttggtagaagacagtccagcttgtaagagcaggcactctgagatacattcatttctacacaggaaatcgaggaaaccatgtagttggaaataagtggatgtaaattgcttgtatctgtttaaaacttgtttgtagtccactgatattttgaaattttcacaacctaagtaattatgcaatcattacttgtatttttcatatgtaacatagtatatgtagctttgtgatttgaaaagctttatagtttaatgaaaacagattttaaaagtatttgtataatcctcgaccaactgaattggttttaaatcagaatttgaaaaatgtggctttgtgacacttagtattttctaatcaaggactaaatattgacctgacaggtaggcctggtgtgttttcatagtgaccttttagtttggattgcacactgcttactgaactaagattgtttaaatagacacactgggtattcacaaataaacttcaattgtgatcaaaatttttaaagctgatttatccaggctggctatttctacactccagaatcattggataattgctttttataccttttcatgctatagtgagttgatgattatgatttgtaggtaagccctcctgtgcctcctgtgataaattttcagccagattcacagaaacaaatttaagtgggaaataagaccattacccaaattcaaaacccactttgcctgcatctggttactcaaaagaggaagcttttgccctgaactatctgaataattgccttaattataaactttatatgttttatatttgggattttgaattcaatatgtttcagccagttaaagtgttatttttagaagctgattaaagaaaccaaagatgatttaaatacattcaacattttctgctaatttgttatcatattaagatttattgagtaagtctacagttttggagtgcctttaacttgaaatagtattataaaattatacgtcttttctctcggtatatttgtagagttgaacttgtttagtaatgtagtcttggcatcagtgtgttttcaaaaacacactcataaaatggacaactcatatttaaatttattgttttggtattaataaaatattgcccacatagtgagtcacgcatgtggcatctagtaagaaatatgttttcgtttgggcggacctaattcaagcaaaacttttcttagtgttccactgctacaaaaaagtcattgaacattatagtactgccatactcttattattttataatgcttccttgaactttttcattagtatgcctcaagaaaaataaatctggatcatgcccaggcttatgcctcatttggcgttaagaaatcccggtttcaaaggcctggaaaacagtctattacacgtctttgccgtctagccatatgcaatgccaaatttatcattgcagtgtttcgagagaagagcacactattctgtagcaggacctcaaaacagtggcctggcctagctcacagcttgaattgcatgtttctttggggaaaaatggaaaagcctttatcactgtgtatataagtggattaggccctgtaaagattctttatatctgagagagagagagatctcgttatcacaagaacagaaaacaaaaggtgggggatcagcacttagtgagatgagaaacagcctttgctgactgctgcctggttgttgctgtgtagggacctgtactgctgagctgagtcaaagccccttcctgtgccctgtaactctgataatcactttcagggagaactgtgtagaaagacacacaatagggtgaagtatttcatgccccgaagcaaagaaaacgatgaagactaagaataattccagaacatgtaacttcaggagtttaaatttggagaatgtgctactcctgggtgactgttggttgctacatgaggaccttaatttgctttagattttagtagtaactgtgtggtttgtgttcagctttaaataacacttctaccttgtaataaaaggcttttggtgctgaatgataatgtttagattttcccaccacttggacagttctggagattactagtctggagataattcgtaagtataattatttgctatttgaactgaaagcctttgggtttgagttcaatgtaaatgtttaaaaagaaattcctttagaatcagaagttgaaaatagtttgtacaaaagattgttctaaatgctgctattgggaatccctcctgataccaggtttttatttctagaagaaaagttggtaaggtaacctgaacaatttgagggcatgtcaactttttgattaaaggaaaatacagtaactactcagggaaaatactatattttcctaatgtcacatttctttaggtgtactagtgagtagtttagatgtagaagtatcatactatacgtgacctgcccaagtataaatgagaaatacagctatgctctaagccctgaccttgtctgccattctttaaagttctttccttaaactattatttcctctgaaataggtggtaaaaagcatgaaaatgtgtgcatgtatgtgaatgtgtgcacatt

SEQ ID NO: 98374 - DNA, 1352 bp, Homo sapiens
gtggcacaccaatttgctctacttctatatctgcatttattttcattcaccccatgctcctgttcttccccatcacccacacacaagaataaagttatgagctgtggtgcagaggattgcaaacctctgtcctagttgactcatggagactcatgacacctacccaacattaaatgatgatactgcttgattcgactgttagagctgttgcttttactggacattagaaaaagcaggaccattttagtagcatcttccctaaagcttaggaaaggtgaaaagtatatgaaaagagaatttcatatctccatttaaaagtgaacaggattgtcttcagcaccttaggcgttgctatttatctgatattccctaaatttgaatgtagggttttacatgcacattagtaggtgatggtggtaggaaaagagaaattctaggtgatggtaggaaaagaaatgaaggtaatagtgacatggtttgttgaaaattgaaatcaaaaggactacaggatgaacactgagcttttccagtgataccgtaacacctcagtctgtagaacctcatcaccacgtcttactctcccgctacttgccctgtccatgggattcagtggcaaagtggatttcatcagtggccatactggcctggcatagctactccttacattaaaagtgttaatttaatattaataagtctgtgtaattatcatacgtgattccttctctctgagaagttatttgtgttaaaagctcttctgagcctgactctggatttaagagattctgtctggcctacgttccattttattggacatgttaaagaaaaggctgtttatgtactcacacaaaatgaaaaagagctatatctagactattaccagcaaagttaagagttatctgaagctgggcatggtggctcatgcctgtaatcccaggctgaggtggacagatcgcctgaggacaggagttcgagaccagactggccaacatggtgaaaccctgtctctactaaaaatacaaaaattaaccgggcatggtggtgcacgcctgtaatcccagctactcgggaggcagagacagaatcccttgaacccgggagacggaggttgcagtgagccgagactgcgccattgcactccagcctgggcaacaagaacaaaactctgtctcaaaaaaaaaaagagttatctgaatgtcaagtcagataaaatttgaaaggaacttaatattgttaattatattttctcaaaagagtaaacaccattttttgtgggggccttttgatttttattgaattaggaaattgaattaaatttggctagtctttccacgaggaggataaccagactgctg

SEQ ID NO: 98375 - DNA, 1156 bp, Homo sapiens
catgactgtatcccagttcaaaatgagaagcctgattcccttaatgcctgggactcctgggttaggcactttctctttcatggtaccaggctggccaggaagatcggtgcatttccctgccccagcgccccagggaagtgagctcagtgtatggtggcctaggaggggttgggctagggacacttcgtcagggggtgactcagcatagaatgataagaatgtgctaaccatggataaatatatgcccttgaaagaagaactaaaggctttacggctctgagacggttattgttactgaaagagtcttgctttaattttgtgtagatgttatgtgtataatgtatattgtagacaaaagtccagattatttcagaagtagtaaaaatggatgaaagctgtgaaaatgtaagctttatggattatgctagtgttttataatgatccagaaataccttacaggttatgagaaagttaattaccttcagaatcctagtgagcggagggtattcagaggaaaccgttatgaagaaagtcagcaaggacctgcccgcagtagttgtactttcacattaaaattgaactgaaagaatatttttttcatagagaaaattcagaccgttctcaacatacagtgactgtgatggttttacaatttatgtgtgaggcaccttcacagtccgcttgccacaggagtgttcatctctgtcctcatcgcagtgtggcctcccttgtagaggagctcactttccccctgctgggacatcagtggaagagctaaggtcctggaatgccccattggtgttcagagtccattttcatccagaaagatacagttctgcaggatggctcagcctctctgtctggcctgggaacccagtgatcctgtagagcaatatttctgcaaaaaggtgcaacctaagcttcaaaaaccagcttttaaaaagagcacaagcttttggacaccagcggttgtctgtgtgccaggctgaaatggaatttcctatctccatttaaaagtggactgcattgctgttacgaccttggacatggctacttatcggtcattcccgaatttgaataaaggaatttagatgtgggcaacatgcacagtgctagcttggtttgccctttcctctacatttggatttactgagga

SEQ ID NO: 98376 - DNA, 3350 bp, Homo sapiens
gagttctagcaatacatagctcacaagattggggcctcttgtccttcagggtcatttcacaaggtcaggcagtctctgtttttcctccctgactcacagagtatggctccttaaacctctaccttccagggatatgaacataggtggcagatggagaccctgtgctctgcagcaaactaacttggtggaggatgcattatgggatacttgccttttggtttcacattggtttcttgggcagcatcagcagtgcccgctttcaagaatgttgacttaaaagagggctgggtgggaatgatgaagaaaagtaaacagcattgttgcagatagtgttggctgcaatggttacctgctaggccaatgagtcacacacttaggtcactcatgaagacgttttaatgtaaactttaaaaagaaaagacaagttttctttaaagacttttatgttgatatttcaaaagagaagcatcaaagtgaccatcttgggaaaaataagaactttgcaggatgcctttatacctattttgagctttggtattgtttttattttgaattacttgtgggggaggaggaatatatcgcaatggctttgatacttagggcctgtaagggtatccagctggccctcagtcggtgggcaggggagtgagggctttggggactcctcagtctccagttttgcatgatgcctcggtggcagtagcgttgcacccgcccagtatgcagactaaatgcatgagccccttgcttgatgccccacataaagccagaccatggggaggttgcaaccaacttttactgttgccttgtagtgtcttgctggttctttcttttctctttaaacataggagccactttttaggagactggacactgtgagcaaagcattttaacttgccgattttcaactaagctaaattctgcatttgcttaactaacctgaacctgtgtccactctcctttgagtgtactgtcttactgtgcactctgtttttcaactttctagatataaaaaatgcttgttctatagtggagtaagagctcacacacccaaggcagcaagataactgaaaaaagcgaggcttttttgccaccttggtaaaggccagttcactgctatagaactgctataagcctgaagggaagtagctatgagactttccatttttcttagttctcccaataggctccttcatggaagaggccttcctgtaataattttcacctaatgaattagcagtgtgattatttctgaaataagagacaaattgggccgcagagtcttcctgtgatttaaaataaacaacccaaagttttgtttggtcttcaccaaaggacatactctagggggtatgttgtgaagacattcaaaaacattagctgttctgtctttcaatttcaagttattttggagactgcctccatgtgagttaattactttgctctggaactagcattattgtcattatcatcaccattctgtcatcatcatctgattaatattgtggattttccccctctgcttgcatcttcttttgactcactctggaagaaatgtcaagaagagaaggttcgatcctactcagcaaggccccatctgaatcagctgcgctggatggacaccgccttgcactgttggattctgggtatgacatactcgcagcagtgttactggaactattaagtttgtaaacaaaacctttgggtggtaatgactacggagctaaagttggggtgacaaggatggggtaaaagaaaactgtctcttttggaaataatgtcaaagaacacctttcaccacctgtcagtaaacgggggagggggcaaaagaccatgctataaaaagaactgttccagaatcttttttttccctaatggacgaaggaacaacacacacacaaaaattaaatgcaataaaggaatcattaaaaaaaatagtaaatgattttttttccctcagcctgctggcacttaatatcttctaaatgatttggcatgatttttttttctttactaccgatgacaaactccagtggcatgaagatctaattttcaaaagggtaaaaactgcatggcatatatacaacaagctagcaagccaattctcagcaaaacctgcaacagaattcctaaagtgaagatgacagatgaacacaaagaagctgcctgggcctcttcacttaaacatgtccccacaccccatcctctcggagccccacttcttaccccccacctcccaccctctataatccccactccccattggagaccaggccagggcagaactccacggaccttgctcttgttgattcactttccccattgtgttttctcctggactgagcatcctttggaaatgggagctggaatttgaacaatgatgctattgtatagttcttttataaatgtaaatatggaaataagagattttgacacatcattttcacttgtctgtattgagatattttccttgtaaaggttctctgtaaacttgagttgattttttgctccccatcttttttgtttcttgtctctctttctctgtctctgtccttctctcttgtaacgtgttatacaatgactcttgggcttgcttaaaaagacagatatagccacagatgcagggagtttgggcacaaaacacgtgcagtttaaagttggtgtgcgttaaaccaaaaataaaaggggggacataaacaacaaaataacccatatcaaagacacaaaattatgtaaatggaaatatatgtactaagtttcgaaaattttttgatgtcattataaacctatgtaaataatgtaagaaagtagacaccctttcagattaatcacaaaagtgccaagctcatgattttggttttcggttttgacaattttctttccctgtctttaatgtgaaaggaggataaacttaaagccttaaataaaaaaatttttttaaatgttaaaagcttggaaaaaattaagctttccattttatttgtatttgttagtgtcaatatttcatccatgctcattttcctgcctcaaaatatatatggtagaaccctattggaaaagtggtaatgggaatagaaggagcagttacctttgtatccgcattgttaaaataggcttttatgctgtgctgtgctttcaagaaaccttgtttgacctctggcattttactgatcagtggaccgttgcactggattataatgggattctactatatacaaatccacattgttcttctccctccagccagatttgcagatgtaatctgggctttccaagtccctctgagtttccttcacttttactgatttttttcttctaaatatggtcaagatagcttctgtcacatgtta

SEQ ID NO: 98377 - DNA, 1031 bp, Homo sapiens
gctatgtgtgtatgaatatgaaagttaatgcaaccatatcaattgtaaaaatggattataattatttttgatggtattaggttatgtagtttcaaactctttgctgtattttgttttgcacctgccattcatttgctaatttttgtggcgtggagattcttttttattaatttgagctcacagcacaagtgtatcactgtttaatgttacccaacaagagttagtgttaagtgatgatcaagttcccatttcacctgctctacttttgctgcattaattaatgacacccggatgaggagacgtgcgctaacttcattgctcatctgggatagtgcatgagcccattgaattagagctgctcctactagataactgagcagtacacataagtgcatgttatgaaacatgaatcacatagagcagtggagttttaccaagtggtgtgtgtggtttttgttttttactatgcaaagatgggaaatgcacaaacttttcaaagactagtgtctgaagaactttacaaacaatacttgaaccctttctttaaagttatcccatcatgttttatagtcattgttgcttccattgttagtttccattttcaagtgctttgtaattttttaagtgcactacctgaaattttgtttgaaattaataaattcattcgtatcttgttggctgcctatgaatggagattcagtagtcattgtatgcatctttaagtcaaatgtgtattaaaactttcgttaacgtagaatgttgtagctttatgctttaatcatttcttttaaacccccttttctgtttcctcttgtagtgctgattaaatggccatgtgcctgatatcatcagagttttagcatggatccaaaggcttactgaaaatttaagcagtcagtggcacaaaataaaatctctgattaatgataaatatatgcctgattacgattcagttttattggattcattggaattttttgcttcttataaatcagaaaaaaccctaccttaggatcgcttagagatttttt

SEQ ID NO: 98378 - DNA, 1021 bp, Homo sapiens
cattttctcttctgttaaatgcatttcatttctttaagtaaaagttttgttttaatttttattcttttcattacttcttcccctacaggaaaacgacagcacgtgttctttttcactagtagaagtgacgttggtttcatgttgacaactttgaagccatttggaagtgtttcagtggagagcaaaatgaataacaaagcgggctcctttttctggaaccttagacaattcagtacattagtttcaacaagcagaactatgaggctatgttgtttgggactttgcaaaccaaaaatagttcattcaaactggaacattttaaataactttcataacagaatgcaatcaactgatatcattagatatctctttcaggatgcattcatttttaaatcagatgttggctttcaaacaaagggcataagcactctaacagcccttagaattgaaagactactttatgctaaaagactgttttttgactcaaagcagtctcttgtccctgttgataaatctgatgatgaattgaagaaagtaaaccttaatcatgaagtctccaatgaagatgttcttaccaaggaaacaaaaccaaaccgtatcagcagtagaaaactgtctgaggaatgtaattccctgagtgatgtgttagatgcattttcaaaagcgcccacatttcctagtagcaactatttcacagcaatgtggacaattgccaaaagactgtctgatgaccagaagcgctttgaaaaacgactgatgtttagccaccctgcatttaatcagctctgtgaacatatgatgagagaagccaagatcatgcagtataagtacctactgttcagtcttcacgccatagtgaagcttggaatccctcagaacactattttggtgcagactttgctgagggtgacccaggtaaaataaaaaggagatttaaacatgcatttacttgatttagaatattttgaaagaatgaagggatatagatatgtagccttcttaaaagagactatcaaatgga

SEQ ID NO: 98379 - DNA, 1044 bp, Homo sapiens
cctgggcaacaaagggagactccatctctacaaaaaatacaaaaattagctgggtgtgatgtacttgcctgtggtcccagctacttgggaggctgaggtgggaatatcacttgagcctgggaggtcgaagctgccgtgagccatgatcgtgccactgcactccagcctgggtgacagagccagaccctgtctgaaaataataataataattttttaaaagacaggaattccttggggataatctggcatatatcctgtcttgctatagaattcaataattgggttcatagctatgggaaagtttttaactttttacattactgtgatttccatatgtccttaaggaataactaatttttatttagtgtatgtgtgtgtatttgtttaaaccacagaatatccctgtttatttgtaggctgtgtattagttcctatgtagttatttaaaagtgactaataaatcaccttacctggtcagtgatgctcttactagattttggacagatatttgcatcgggatgacatctgtgttggtgaggtatgagtagtagatttttgtagtcaaaacatctgtatggatgatggtgtctcactgacctgttggaataatgtaaagacattttagaggtgaaaggacagtgtgccatcaatgaatttgcccttcaaacacatagacaagtggtcttttctttcatagtagatatggatggaatgctgtaaaattgttaaggaaaccctttcataggaaagaaaccttttttttcttctaaccataaccatttcttattattacctggttctgacttaagactttgtgattcattggttatgtaattttagcaaaagagcttctctctcttcaggctaagtttcctcagatgtgattttttgtgaggtttatagactagtgattaaactgtagagtactgctagttaagctgtgttgttactattcactttccagattatgcccactatttctggaatcaaacttagtaccctaagtaaagggacctgaaagaagaatctgtggggtgtaggctt

SEQ ID NO: 98380 - DNA, 2107 bp, Homo sapiens
ttgaggctccaacctgggtgacagcacaagaccctgtctcaataaaaataaaagtttaatttattttgtcacagatagtaaattaaattaaaatttgttttttctttagatgaaagccttgagggaattagacagattttctgttttgaatagccaacacatgtttgaagtactagctgccatgaatcaccgatctcttatactcctggatgaatgcagtaaggtggtcctaggtaagaggaatttttctttcatcatttgcaatacctgagcttctgttttagactatttttgttttgttttaaaaactttgcttttatatgaaaaaagaataaagcatgttgtattcaaaacaatcaggtaatttttgtttgtttatttaactcattcttcaagataatatccatgggtgtcctttaagaataatgatcaacatattgcagtcctgcaaagacctccagtaccataatttggatctcttcaagggacttgcagattatgtggctgcaactttcgacatctggaagttcagaaaagtgagtacattaacaatttagaataagcctcacaaacttttaaaacactaattcatgtagcattttaagtatttctctttcacctttatagtagttaagataccaaaatattccaatgctgaattgacttttgaaaaattagctccttattattcctgtctgggggctacttgctaatatgaatagtccccaacttaggatggcttgacttaatattttttgactgtttgatgttgcaaaagcaatacgcattcagtagaaaccatactttgaattttgaattttgttgttttgctgggttagtgatatgttgtatgatgctctcttttcatgctgagcagtggcagcaagtcgcagctcccaatcagctgtgcaatcatgagggtaaacaatgcatattgtattcaataaattacttgagatattcaacacttttattataatataggctttttgttaactcattttgcccaactataggtgaatgtaagtgttctaagcgtgtttaaagtaggctaggctaagctatgatgttcagtaagttggatgtattaaatgcattttgacttaaaatattttcaatttatggtgagtttgttgggatataccccaccgtaagtcaaggacaatctgtatactattctatcctttggtcatctttctatttgaaacaaaaatttgctcttctttttcgttttaaaagggttgtatgggctgggcgcggtggctcacgcctgtaatcccagcactttgggaggccaaggtgggtggatcacctgaggtcaggagttcaagaccagcctggccaacatggtgaaaccccatctctactaaaaatacaaaaagtagccgggcatggtgacgtgtccctgtaatcccagctactaggggggctgaggcaggaggaccacttgaacctgggaggtggaggttgcagtaagctgagattgtgccactgtactccagcctgggcaataaagatcaaaactctgtctcaaaaaaaaaaaaaaaaaaaaagggttgtatggtacttttgttagatatttagcatgatttccgtgtttatactttgttcttgttagatttcaaataataaagatgggtgatgtgacaggcttggggtttttgaagaataaaatgtcactacttaatggtcatgtccattgttttatccagagtaaaagcctttaaaatcaggagctgtgttaagaatataaacatttaatgaagcacctggtaaaaacttctttttgcaatgaaataggtgataactgttagatctctaggttcagtttattttggagagtaaggtaaatattgagtttactgtggaaattggttatagaaagagaagtaataatcctaagtaagaaagattgagaaggaaattggaggtgaacttgaaagtttattttaatcataatgtttcagttccattttcacttataggtatgaatattaaatatagaaattttggggttatgtcttacatgttagaatctaggaagtatttaagtttgggaatgcgagaagttcaagattgagttggtcattttgaaaaccttcagaaa

SEQ ID NO: 98381 - DNA, 1078 bp, Homo sapiens
ataatgaataatctttctaatgtattgttgaatttggtttgctagtattttttttgaggatttttgcatcaatcttcatcagagatactgtgctgtagtttttttgtttgttttttgttttttttgatgtgtctttgtctgattttggtatcagggtaatactggacttgtagaatgagtttggaagtattccctccttctctgctttttggaatagtttgagtaggattagtattagttcttccttaaatgtttggtagaattcagcagtgaagcagtttggtcctgggcttttctttactaggtagtagttctacttttacatttttcaaggaagcttcatactgttttccatgcaccattttgtagtcctatcaacattgtgcaagggttccaatttctccacatcttctccaacacttgttagattttgttttgttttgtttttttgataatggccgtcctaacagatgtaaagtgatatctcattgtggttttgatttgcatttccctgatgattagtgatgttgaccatgttttcacatacctgttggccatttgtatgtcttctttggagaaatatttaagtcctttgcctatttttaaatcatattattatttttgctattcagttacagtatgttataatgtgtaaacatactacaaatatatatataatatatatattatgggatgcagaaaaagcaatcctgacaagaaaacttaaagcattaagttttatataaacttatagcaataagcataaatatatgagttacaggaattccttatatattttggataataactgcttatcatatgtatggtttgcaaatattttctcccattctgtaggttgctttttcactttgttgactgtttcctttgctgtgcagctttttagtttgatatagttctccttgtctgtatttgcttttgttgcctgcacttttggtatcatataaaaaaaatcattgcctaactaagccaatgccatcaggcttctcctacacattttcttttaggaattttgtagttttaggtcttatgtttaaatctttaatccattttgagttga

SEQ ID NO: 98382 - DNA, 1091 bp, Homo sapiens
agcaaacctacagacccttctttaatgacaagtcctacatgtagaaaaaaataaggaatgcatcattattccttttatttatactctatccttctatacaaaggctaactgttcaggctgttctttatgctttgatcagagctgttttaattcctaatccttacttatcacatttgaagccaacctaagtcaatttttgcagctgtaaacacttggtcactcctggcctgtgatgagggaacacctgttagatcaagaaaccaaatagccaccaaattaattagttcatttactcttggaaccaaattaactgttgacttttagtctttagtattaaataaggcaaagcaatattcaggtagatgtacaaaatttgacgatgtgtctgagaatagagtagttcagaattaaaacataaataaataaatgttataaaatcccaaagttgagttgtagagagtcagtcaataataccacgtgctggtttttcaggcagtgtaataatggagaaacagccttgaaccttggaaacctggattctagttccaactttgccttaattacgaggctttttaactttcctgggcatttccttatccataaattgaggagtttagactaaatgacctctaaagatatttgaagccttaaaacattatcaagtgcagggctttgatttagaccctgtggaaaccagggagacaaagagagagtccttgtgataagaaagagataattagaaatacaagtgcatttatgtatatatttattattttataactattactaaatatatactaatatagttttttaatgttgcatttatttcttcttaatgatatactctctttttcatcttttagatgacatgaagaatgcttacaagctgcatactttggatacttgtctaaaacttgatgatactgtctatctgagggacatagccttgtcactcccacagctgccgcgggagctgccatcgtcacatacaaatgcaaaggtggcagaggtgctgagcagccttctgggaggtgaaggacacttctcaaaggatgtgcacttgccacacaattatcatattggtatgggac

SEQ ID NO: 98383 - DNA, 1056 bp, Homo sapiens
caagactaaatagtaatatcaataactgttcttgttttgtttatttttgttttcagagtagctgtgctatgtgtttccagatctgcttattgtttgggttcaagccaccccagaggattccttgctatgaaaatgcggcatttgaatgcaatgggttttcatgtgatcttggtgagaaaaaaatgcaaatgaaatattctttaattactgatgtacattctaacagctgccaggaatcttgtggttgagactggttactaggactagaggaattgtcagcattattggaatgagtgctttagttactgttttctttgaaaaagaacattgctagtacacgatttgggttctgctcagctgattactgtcattactagagcttttacaaatgttgttctggtcagctttaatccttttttgctaagaagaagaatgcaaataatatattttcatatttaagatacacaaaaccatatttaatttccaggttatcttgaacaagggaaggaaagatgttaaagctttgttttcatggcctgtgtgaagctgttacaggatgtttgttgccagaaaaggctggatggttttaagaagatgggtctttctcttccctcttatgcttcaattttattttgtaccccacagcttctcttgaacagcctcttctgatgtttctaggtagtaggaaccttacaaatacatttatatatatgttgctgttggaatctatctaaatgccactcatttggtcctgcgcataatgtaagatgtaaacattccaagtcttctattattatactttagtattggaaatggattacgtgtggactattgagattaagatgactcctttctcttagtgggctactatttaagactttgttttttatattgctgattatatatattctaaggaagattttctcaagaaagcagtttttgcaccatttagaggacctttaaaatttgtataattttcacagttaaagctttcttaaaccctagcatgtagtcttattatgcctttaaaatatgagtagttataaggtcacattt

SEQ ID NO: 98384 - DNA, 1024 bp, Homo sapiens
gtgcttgtcatcccagcacttgggaggccgaggtgggctgatcatgaggtcaggaggtcaagacaatcctggccaacacggtgaaaccccatctctactaaaatacaaaaaattagccgggcatggtggtgcatgcctataatcccagctactggggaggctgaggcaggggaatcgcttgaacccgggaggtggagattgcagtgagccaagatggtcctgctgcactccagcctgaccacagagcgagactctgtctcaaaaaaaaaaaaaaaaaaaaaaaaaaaaaaatacaaaaactatagcaatatgacaacagctgccaggttgtatcaatttatccagcttgcatttagaaaaggttagagctgaaaggaaatttagtgattatttaattgttacttccctcattttatggacgaggaagataaggctcaaagaattttcctttcctgaagtctcagctatgccattggttccacatcatttcatcctcacctgctcttcagcttgtgtcccaggagatcaggcttctggttccagattggacaacctctagttttgtatacttggccaagtgatttaaccttataagcttcagaacaagatgcagatattctgttattaaaggaactaaggttttgtctttaaatgttgagtgtgcatcagttttgagtgtctaattatgactcctcttcaaaggatttgacaaatttgtgaatatttatgaccaccttttagggtagtaattttcagtttgtactagttaacctggcagataaaaaggcatccctcttttactagcattctagtgttagcattcttcattgctttgtgtcaatgaaagaaaaatgggcaaagagctgatgaacatgaaaaaagttcagtctacttgtaaagacatgcacattgaaacagaagagatggttttgcctttcaaattagcagttttttttcttttaagaattacagtgctgatgaaggtataatgaggcaagcacttgcataagctgttggtagactg

SEQ ID NO: 98385 - DNA, 1029 bp, Homo sapiens
tcttaaattttttttttcattgctctatttttctccattccctctagaggaaggggatttttttttggtctgaaaatcagccattaaactgaagaaggctcaaggaaatgaactgaaatgtctcataggaagaaaaatagcactatgaagatgaaaaaaagcccaggataatggagattgatcgctcgatctatctatggcctcaaataaaactgattgaatttaacatgttaggttacagttaaaaagcttagttgcttcagttggggtaatatagtttcagattttcatagggagccatttatttatttttgcatttgtgagtcatttagtcattcccttgtgagtgagaatacatttattttcctactccctgctgttaggcgttctattaataccacactagttgaaataaatggagcagtagaaactgtttggtggtgaatttgtttttcagattttttttgttactgctattttcgtaagtcggctttccaacccctccagtggtttaaatagagtattaacttctcaccgtttctcttctcttgcttcgtatttaattgctgcttttgtttcactattgacaatttcaacaccacctgaaggtgtataatccaagaaatctaacagtggatgtctggtaaaatattcccaatcaagcaccaggattgtcaaaaaattatgggcaaagtgacagttgtcttaaacatcaggtttctctccacctgtttgtgctctacccaaaaggaaaatccaacctaatgaagagaggaattgttcctacatgttatcaagcagtagtagcatgggtcatgttttccagaattctaaaaggggattttcagatgtattttattgtgctggaacacaataagatttgctcatgcgcctttgcactaaagctgagcaaaatacaacgtccttgttattctggacagctgattactgtcagtaattgttgtttgtaatgaacgccacgcgggataaagcagggtgggggtgggggctggggggagggtccgctta

SEQ ID NO: 98386 - DNA, 1038 bp, Homo sapiens
tcctctctgtgtgctttcccttgcaaagcccttcaaatatcctcttctctcgacgccatctcctctccacctgcacctcttgtgccctttgtacatctttgattgcctgatgataacagggtaaaaggacagccaacctcatgcctgattagcagaactgaatcctagttttaaaaaatcttctctggcttcagagaagattttataaggacttttgtttgggataagctttccagattatccatgtctatttgcatcaaaggggaaagaaatggggcttttggatggctcttccagtgcattcggaacattgcctcttgcctttattcctgcattttatggcaaagccaaaagaaactcaagttgcaagaacaaaacccagtgactcgttttgatggttcaaaatggtttcctttatggaagtcacttcataaaatgttaagtaaaaagtgggaagtgcttctgtcttctcttttgcatgagttgcttttaggagcaggaagaaggtaggcaaagtaagataaagatgcaacacatttaactacaaaaatcaggttcattttttagtttattagaatttttttgaaatcttaagagggccagcatttctggctacaattttgcacccagaacattgccaaaatgaacattcagtaaatagaacctgattgaaatttactcctggaagctttcctttgcattttcgggaagtggccacctgccaagcgcaagagttggggggcaggaggggaggactcaaattcagggtgtctggattaaatttcggtgaacatggtgatatctcagtttgaaaactagagggcctatcctgagtatacatcaatgtctctttgatggcctactttcctcagtgaggatctttgggaatacttgagatggaacaacagaaatgtgtgaaaggaagcagaaacttcttgtaaataacgtgacctcccacgacgaactgcctgaggcttcagggttttttcttgcttttaacactcttaaatctcctctgttggttcctaatagatccca

SEQ ID NO: 98387 - DNA, 2032 bp, Homo sapiens
taggcccaccatgacttgtgacctagaacccccaggattaacagaggcctcacatttactctgcaagctgactccaaaggagtctacagtccttacttgtcatgccacactcacacatccagtagtggtctctatctacccgcattcctagctagctggcactggcctcaactccaaagactgcctttaggaccatcaaatggcctatgcaagcaagcggggtggttattaggacagattgtatattttgtatattctgggaccatcccttcaagacacgtctataaaacaaaaatggcgcttggtccacacacggttgctgctccctcctaccagctggctcccctcctgtcctcctttgactgtttgactcattgactgttaaaatgccaccccatacatatttgggatgcaaaactgaagtcaaaaggaaataatataagaaacacaaacacatatatgacagcaaccttcaagatctgggttttcagctttctgcaacctttgttttcactgaaatgttgaaactactcgtctgagggcaaaggaacctcctcacaaatgctatagctgccaattggacacttggggcatttcgaggtctggccctaagaatttactttctccttttccttttttctatttagaccaaaaaaaacaaaaacaaaaacaaaaaaaaaaacaaaataatacaaaacgaaaaaaaaagaaagaacacccgttaacacacacgcgcacacacacacaaaatctgtccatttgccggaggcaattgtatgtatgttagttggagggtattaaaaatcagttttattccaaagatttaaaactagacatgacttaaaaacaatttctggagcactgcttgctgacaatctcgtagttctctgctgcatttgagtgcattttgtggccagtccatcagggcgtaccatgggattatatttgaatgtgtggtgcatccttcctggatgaaggatgtgtgagggaccttgaacctcagctgtattaaactgtagcgcctccagtcagtgcactagatgaaacttttagacaccctgaattctgttggttcctttcttttcctttatgtagcagcctccagcatgaatgcacgcacacgccagtgatggcattaagccatggccaccacgatttgcaaatgttctctcccaagctggagctgctcttgcctctcgaatgctattattaagggtttataatacttaatttaattttcgaactgaccaatgcaaggctctattaaaaagaaagtttaaaaaatgcaaaagagtaatcattgcttgtttgctccctattttcatctgtggtctcatttgaatgtggcagaacaaaggccctttggtcctcatcagtgtctgaaatgttcagtaatttctctctcttttgtatcagtgaggtcctttgtaatctgctcctgacctttcttggagcagggtgcattgaaactcaatggtggtgcttgcttgcttcagagtcatttgttgactgtgagaattggcctaagaatttggtgggtgctaagtggatggctttgaaactgttcttctttagccgagttgacacctgtgaatgatgaccagtcctgatcattttggaaatggatttgtaataaaacgtccatcacctctgcagtggcagagatggttactaagagccgctagagcgagcaggttttccaagaagtaacctgaagacattttgctcccaagaggactggttatttaaaacagtgcattaatggacatttgaaacacattaaacccctttctcatttcagttgttacctcctaaccctccaggggatcccaaatttgaaaggaaaaacccggcctggtgtttctggtggtgtcctaacaagcacgcttttatccagggttcagatttgttcatgtagaaaaagagtttctaagccactgacaattttttttttttgtaatttcaaattatacttctttctcctgccacatgactgtaagtcatagacatggaaacctgaaattataatgct

SEQ ID NO: 98388 - DNA, 1126 bp, Homo sapiens
gattgtcaagtgatttttgttttactctgaaattgtagacctttctcctcattgtccatccatcacatttactggaaggaacggtggctctgggagacctaagctgtttgctttgtcagtcagctacctggctgcagcttgtggtaggagggaaggggagggagaagactaaaaagcctgaaatggcaaatgagtgtaggttctggagaaaaatagaattagaagcatttgtggttcagatgaaaatagcacatttcctttctgcctggactgtgggggtgaaagtgctccggggaatcgaaaataaataaaaattgatccttcaccagtcagaggaaatgctctgactctgggaactaaaatgacagctccagatttgaggatctggtgaaaccacttttgaaggttaacaaaaaagaaaacaaaaaacaaaacaccaggagatttggaaaaaaaacccaaaagacagtggtatactatgttaggaaatctagtctttcaggaatgagttaaacagccctttcccaagcctgaccagcaggcagcacaggctggttgggtgtaatcccttttgttcctgctgctgaccacggtccttccatctcttcttgcaggtgagaagccttataagtgctcatgggagggatgtgagtggcgttttgcacgaagcgatgagctcacgaggcactacaggaaacacacaggtgcaaagcccttcaaatgcaaccactgcgacaggtaaagagaagtagaagttgatgggctagggaggagagatggggaagtgggttggagggtgagcagcacccgtgtgcttggacttatcacaggtctgactcacagacacttggacctgggaatgccttttctccatggagaggaccagtgagaagagggggtgccctcttgcatgaaatcaagaggtggtgtgaattcttggttcagttacacaagcatttacagaacactagctttgagccagaaatggtgttaatcactcggtatcaacaagatgtgacagataactttagtataatatgaaaagtagtgagacagagaatggtcatctgtagggacttctgatctttgtatcaatgtcagtaccactttccctcatctatagtaa

SEQ ID NO: 98389 - DNA, 2284 bp, Homo sapiens
ctcaggatgataaaccactgtctcttatctctgggcctttgtgcatgctgttccttctccaggaaatacttcttgcccttgtccttagtgtccttcaagtttcaggggggctgatcatctctgggacacctgctctaatagtcttaccaagtcttagggattttctgtttcacatgtccacattacacacatctatcaaacatattgagtctcatgttctttgtatgtatgcatggtgctttcctaactgggagctgagctctaacgtgaagagcctttccatttagctttaatctctagcagtgtcattggttggcatatatttgaaccaacaattaatgctggttgaatctaacttgtcacactgaagagactatttctttcattgccggtgagttagaccagaagtctaagcatttgacttttcctgtttacccatggacagagatgaagtgtttcggagataatgcatgttagggtttatgaatctggaaggtaaggtggtaacaaaacttttcgtgctgttggattttgatggtctgatgtctcagttagcaaacattgtattcagtgcatgttacagtgtgtctgagcctgtgctagactttgtgcgtgattacaaagaggccaatgagaaagcatctagcccagtgcctggacatacactagatatttaatcagcatttattccactgggggtataaggtgtccttgttttaaaagcacttttcatttaatgtgtgtggggagaagcagggcaagggatcaaggcataaaaagataaatatctacaggaaatagtaaataactggccaaagagtgaaaacttagataagggtatagttttctgaggaggagaaatccttgcggatggggtgacatgtggagaataggcacattctgagcaggggacatcccagcgagtgagaaaggcttgggcgggagttggggagcgggggctgtctagggatgttggagactagagggttatgtaagaagtgatgggtgataaggtagaaaaataagtgacatggctttgtgtacatcttttcctgagtacataggcagtggtatgtgaagagcgtctatcctagattattatgtgtcaaaacaacaaacaaatgaaaattttcttttggggttactcttagactttatatttgagtaaggtacatatttgggttgctttagctaatggggaaatttagtctctaaaaaaatgtttaatcatcttggaagagaattatgtagacatattgatgttttaaatcttcactgatttgaaatttgcctctaaaaagctctaaaaaacggattaatatctattcaacatgaatggtagctggcccagggagggcccttctctccatgatctggatataaattatctaatttgggctcttcttttttttgagacatggtctcgctctgtcacccaggctagagtgcagtggtgcaaccacagcttactgcttactgcagcctcagcctcccctgctcaagtgatcctctcacctcagtctcccaagtagctgggactacaggcgtgcaccaccatgcccagctaattttttaattttttgtagagacagggacctaccacattgcctgggctggtctcaaactcctgggctcaggtgatctgcctgctatggcctcccaaagtgctgggattacaggtgtgagccaccacatctgatctcatttgggcttcttgaagattgataacattgcctttatttttttaagtttagagaaaattaccatatgaactagtgatatgcttaagctacttctctaccatctgtatttatatcatcaaggaatatcaatttttgttatcattagcttaattaaaacaaatttaggatgctgaagccacttactttatagcttccagaagcagatcttaggtggtttttggattatcctttcttatggttttttttttaataccattgatctatctcttttcatatatatatatatatatatatcgcatatgtagcagaaagttaacttttatccaaataataaatggtttaggtgtatattttctaaatttttggttagcaaaaaagcaaaatttagtgtatccaggaaagtaaattagacattgtcaactaatgtgatacgtaccaatgggtgaccaccatgggtccctgatctgataaggcctagtttagtctcccctccccacctgtcctggccctccatgtctctgcattttctgtggttcacagacacacagtcctctcacctgccctcaggctttccaaaagcc

SEQ ID NO: 98390 - DNA, 1024 bp, Homo sapiens
gggatactcttacctagggataaggggagaatgaatatagaggacaactggcggttgctgctatgcttttagtcttaataattctttttaaaaagcctttaatgcagacattttaacagaaaacttgagttctgaaattctaaatgtatgaaatggtaagggtaacatcctagtacattgtagtttgtggcatattgcaagatcaaaataattgcatgaaaactaggtttctgtggaatggcttaagttctgaatggaaacataatttacattttgcatttcatgagaacattacattactggagtaatatgaagtgactgggaaattaataacttaagcacaaaagcatatggagtcaaattaactgcatcttaatatttcttgcacctctttttcccccttccaaagtataaagtcacattacattgacattttcctcccagaatgccttcattcttcagtagaagaatgaagagaaattattttgtagctgtgagttcagtacagacaaaaattaaggctgtttgaggttagaggtatataggatgacagattgtgtgggggtgtttctacatatgtgggtgtcaatatgtttgtgctgagttgtttgcagattgggggggagggcagggtgtgtgtgtgtgtgtgtgtgtgtgtgtgtgtgaatgtgaatgtagctttcacgggtggtttcagtcattgtgttttcttcccaatgattcctattagggagcagcagaaagaagatgtaggaagatctaggtaactgcttaaaggaaggtatggagatggaccaatagtatatgggtatgttcattcagccaggttaattgagggtctttgacatgtgtccagcattctaagtcttgggaatactaaggtgaataagcctggcctctgcccttaaagggaccatttggttttgtggagctacatagaatgtaaacaatttactcaaacaatatgatagtctcttctagaggaagttaggcgagcagaagaaaggagtgcccaactctatca

SEQ ID NO: 98391 - DNA, 1009 bp, Homo sapiens
tgtacaaataagggaactgaggctgaaagaatcatttttcaaagatttcactgctgaaccatcacagagcctgccctactctgtttttcctttagagatcagttatttcttttgggggcctaagttgaaacaatataaatgaattcagttttgtttatggttcagaaaaataaatggctatttgttgttattttacttgttcagtataactactaattcagaatagctaagaaaactgagtgattatcttgtatattcctacattctgtctattttggttgaacttaagaatccttgatcttagttggttttcccctattttaagaaagaaagctggttttgaagatgcaaacaaacgcaaggtattgattcttgaagtggtatctcagtactactgcatttgcatattttagataattcttgatgagaaatagcaaatagaaacttttctctgaaccccttgaaagaatgcatcttagcaatcctctttattactaagctggaaaacccaaatggagatgccttaaagaattcaaaggaatctatggatgggtggatcttggtgtatgagttgtatgctcctctcagttacaccagagctttgctaggtgaggttgaagaaatgatttatgtgcctttatttttgtttgtatgataagtgtggaattcaggataattttattttatctttgtttttgcccagttgaggatatttataatgggttagaagtcgtaagaataaaaacccttggtaaatacaggaattgtaaatctattcattggcaaagatcccaaactcaggttatgattttgcttgttatgtgcagcagtctctcctctgaattcagaaaagcacacagtgaagaagaatagctgctttctagcattctgccaaaaggatctacaggaacctcagagtgatgggcatttatattatatccagagatctgaggaaagaaaaggtattaacaccaaaagacaaattcctggaaggctgaaggaataacac

SEQ ID NO: 98392 - DNA, 1054 bp, Homo sapiens
tttatggaatcatttctacttaaagtacccttagcataggcagaaggcctccagccaggctaggtgatcgcgagaagatcgcagtgttaacacctgtctaaaggaaaccagctagccgttagtagtgctcaaattgcaaaagaaaatcttgttatcaaagaaaaacttacagagagggtataatattatttctgctatctctgttaaaaggaccagttgttaatcactcaaaagcatttgcccattaaatgaattagccatttacttatgaagaaccatcagaagtcagaatatccctttgtcacttgacaagttttatattctgactttgagagggaggtggttttgtttgagtatttcatctttgttgacagcagactgtcagaataacaactttgcaagtatattatgcatagtccctatttgacttaagcaggatacagattgaaaagttcaaagaagtctggggagtttgtcttacccagccctcttcaccggttgattggatgtggttatacggcctcactgtggtctggcaagaccctggaaacccagggcaggggtctttgaagactgaaggtggtcatggttattaacccagtgataaatgaacatcagtgcatacttccgaggcttcctctcatcgtactcttcttggagagcagatcttttttcttttgatgtctccatgtttaaaacaatagtgagagtgcaggcatacaagcaagcatgctttggggaatgaagaaaggaggtattccatggagttgcttcaacccctggttctcctcagtcctgaaaacctgctttgctaattctcatggccacacaaaactgctagctttgacatcaagcaaaccggttgacagaattggaaaggacgaatctgatggctgctagtcccccagcagggctgctgctaagccacaatatgcttttgtgtgaattagaaaaagtaccctttgcgtggggcagcttccctgtgcttgaggagcagagccagattcagcccctctcagcctgtagctggacaccctgtgctcaaaaccttatg

SEQ ID NO: 98393 - DNA, 1125 bp, Homo sapiens
aaggaagtaaagttagagatgggggtactgagctggaggtgcaggataacgaggcgaggaatgggacaaagggaatattatgaagtagcaggatttagtgaaaggaagcatataaaaatggacataagggccaggtgcggtggctcacgcccctaatcctagcactttgggaggcctaggcaggtggatcacctgaggtcaggagttcgagaccagcctgaccaacacccgtctctactaaaagtacaaaaattagctgggcgtgtggcgcgtgcctgtagtcccagctactcaggaggctgaggcaggagaatcgcttgaccccaggaggcggaggttgcagtgcgccgagattgcgtcactgcactccagcctgggtgacagagtgagacaccgtctcaaaaacaataaaaattaaaaaaaatggacatatggtttattcattgggaagagcacctagtgttggcatgagtgtaaaaatgttcttagcagccaagtcattgcagacctttctctcctactctgtgttctggtcttcatatatttttctttctcacaaattctaccattatgatcatagttgtattcatcttcttgagtcagctaaataatccttatattttgatgaaaagtaaccttcacttccaatattaaaaaaaaaactatgctcattctcagcaaaaatcaatttttaaaaatcttaatagtttctatgtaaaaaaagaaggattttctacatttcttcttaattacttctgagaagagataaaaaacctttcattgaaatggtgctttgtgctaagtaaacagacttttcaaatttgaaaatccatataaaggtacgtccacatttatgttattatgagtgagtcatattggtgaagtcaggacaatggcctgtcattagatctttgattcttgtttgcagtgaagggagatgtgaagaagccatgttctctgaacgtgctgcttggaggactctctctatagactgaagttgctgtcacctaaaccatgggtggtgataagcattctctagattttgtcccgaacaatataacaggatacgtttcaggtggaaaagtaatacaagtgtgcaatttgcttagcattttacattttctt

SEQ ID NO: 98394 - DNA, 1040 bp, Homo sapiens
aagaactcattaccgatagtagtggggttgattgtagctattactgttgttgttgatattagtgatgactgagtgataaaacagctttgtaaaccagaaacaagccagttagccaaagttaactaccacaaaacagcaagaagctttttccctctcgctcccagtggttgatcaatgggatgtggggtgatgacacctgtggatacaagttgtggaggataaaccagacatgcaagcattagcccatagaagttggcaataaggcagaaagatcatggctttcctcccacaacatagaaagcagttaccttgcatccacagaagcattttgcctgtaaaaccttcctcagagacatgcacggaaagtaggtgctacaagaaagagaaacagataaaaggggaggtagagacagggatggagggtggggagaatatgaattaatttggattaaatggatgagaatcagaagtatttatttggaattggtgtgaattggagcacatggggaactgaaaacaaaggtgataatttatgtggtgtagatgaactaagaataatgaaaacagcatgaaggatggaatcaaattaagtgcaaacatataaaggaaatggactggtaaaagctcgagggcaaaggtgtatggagatgggaattcaggttggaaagaggctgctgatacaaggactggagttgggagagctgctgaccaaatgtggaaatgaagattttttaaaaatgggcgctggttggattcaggcaagctattttaacccaggactcactttaattcagtcaaaatatttcttatcttccagttggggaggtgttttgggacaggaaaaaaagggagataagaataccatcccagagaaagaagagaagtatttgcattttgttctctagagttgcagatatatgctgtatctcttctatatggtaatacattgcaaaggagatacagtgaagaaatgaagtaaaataaaatgtgtgtgtcttcctctcatatgcataaaggaagacaatacatgttggtaacat

SEQ ID NO: 98395 - DNA, 1021 bp, Homo sapiens
aagttcgaatatataatatatgacagaggaaatcactgttatgaaccttagagttattcccatgggaggatgaagactgacattgcttccttgcacaccaggacttgggcctgtactgctctaattctgaacttaatttcctgtgtggctcttgcttggttcatgggacggtctcctaacataatgtttatatcccgtggctcaggcatagagacccactcatggtttcccatcagaatttgggttccagttcaccactccacatacacacaccaaggctaatgattcatgctattgtcagtttttgcttctttgatattgttctgaaggtagtttttattgatacttctttctttctaaagtcaatgagtaaagttatggcaagacattggaaagacattgcagtgctcccaggctggagtgcatgactcatctcctggcccctccaggaaaccggagaaggcagaaaagggcaagaatgttgtgttgtctttgggctgtggagttcatgattatggacactttctgaattattggcactaagggcacatcctgcttagcatggaggctggacagctctgggaaagcagagattctttttagggagtccagagcatttttttcttctttcttatcccctctttccaatagagatgtcagaagggtgactgttagggttgatacattatgtggtgctctgtttttttgagcattgtctactcagagtgattaccaaggtggagctcattatgttacctggcacctgcaactacttgcctcatgttggactaaagtggaaagactcctattgggaattcactcagggaggcaccaggcattgttagaaaagcagtatcgcagagcacttaagagctgagccttgtgatcgggtggacttgggtttatgtcctcgcactgtcgcttcctagatttatgacctcagtttcctcatttctaaagtagagacaattgtgtctacctcctagattgttttgaatattaaatgagcagatacttgtaa

SEQ ID NO: 98396 - DNA, 1057 bp, Homo sapiens
cttttgcctctgctttcatttgaaacagaaggctcagactggcagctgtgggccctttgcttgtctcacgcactctaactttttaatactcattgccaacattgaaacaattggagagattccacataaaccccaaaagatttgggcttcctttaaaaacacttgccaactctggacctctgttttctacatgatatcgatgagctggtgctatgtaccaacttccccttttagatggcatgtgctatccagtttaccacagtccccacccctcattattgtcatattccttgactgtttcactaatgtatgttatgctcctagtccctgaatgtgtttgagtttgattcctaacctagatttatgggaagatgtgttaccttttagaggaaagcatcctcagaaatagcatctacctactgcagcaccctaaggacaagtatgtggtcttgtatcatgggaccttgtctaggagactgagcagaaactgcagtccagagtctgaaattgagatacctggagcatggcactgctataagcagagggatcagagtagggaattccattttcctcataccctggttccctaagcaaacaagatttggtcatgagaaatttattatattcacggaggattttcataccattgggaaggatatatatatagtccattttatatatctctatatatatactaatacttttggtttcttgataaagaaaccagagactgaagatgagatgacttgaggaaacgcatagagctaattatgtagaaggagcaggcagaagtcatcctgacttttgtctgtgttctctccatgactccacattgtcttttattttacatacttacaaaaagtctcaaagttgaaggatttggtgtccaagacggatcaggtaccctttacaatgagatacttaattgcctgcttttaacagagatggtcttctaccagcatacatttctgaatcacaatagtcttcctcacccactggcccacccttctttttagtctgttactaacaggtgattatagacacaactactttaatg

SEQ ID NO: 98397 - DNA, 1051 bp, Homo sapiens
acatctgacataatgaaggaatatttctactcatcttcccaaaaatattcttctcaaaaacttttcctgaaagtttacagttaccactcaaaaggaatctaaaatggaacagacattgagaacacttacaactgacacctgtatttcatttatgattagtctctttttgggtttgataacttcccatccatgtatctacctgtaattttcatcttgctaagcaaaaaagttgtcatactttatatagtaggtatattgccagtgttgaatagatgtattattgtttaaaggttcattaaaagaaactctcaacttctttcttagtgtatttgtagtatttcttccattggaaaaaaatgagtgaagaataggaaaagttattgggtctttccatgttacatattaaatcatgtcaaataagagattttgactgagcctgccagtaaggtcttaatgatacgttactgcacagtatttcctaacaaagtctgtatacatgtaagcagcaggtagttatggtcatcagtggtggcaattcgtttttacaatatagatacgagagttccattccttaagttctgccccagaacggactggtgagttgtcactgtccctgttgacaaatgtgaataataactaaaaatacttcaggctgcatttgtctgattctggcttggtatgtggctaaaggggaaaaaaacctttctgggaagtgtgatgcttctttaacagcaaatggattgaattgatgcaagtctgatgtgcaacagggggtacttaaccttctatctagaatcaaacgccagaattggagaagctgaagccaaccacgacttcataaagataagacatttacttgatctgcatgactggaggaaggatttggggactaagatgtgtttgaaaacttagttggtttacttttaatgtcagcagatttgctgccctgaaatgacagatatggaagctgcttggggatagtggcaggatgaccgaaagaccagcacagatcttcaaagaaaggggaagactgagccaccctgtgttcatt

SEQ ID NO: 98398 - DNA, 1016 bp, Homo sapiens
gtcagccgggatggatcatcagagatttcttggactactaacagtgctgccagtagagcagatatgggcaagcctgggatatgggcccaggaggcccctttctctatgttagtctggcacccctgctgaacctcagcagtgataagtgctagaaaaatgtatggctagtctagaagacaaaggcagagcctcctggagagagagtgacagcgctgagtgggggtgttgcttttaacagatttttaattttttctcctcagaaaattattgaagatcatctccaaaaagaaaacacaccagtttcttattattgactatgaaatcaacatgactgggtgggactggggaaaagacagatttatcagtccctaagagctgatggaaactgcatcctttaggtggaacacagagttggctgtaaggagacattcctttgtttttgttgtcttgaacaaaaggaaggacagtagatgacacaggtaatgactgggtatatcatatattaagggcaccaagaatttagagaatggggaatcaggtgagggtggaggggtgataggagatccctgcccccaaagcagatgttggcaaaggaaaagtcagagagcaggagtcataaagatggccccggggagtcagcctggtaatgtcagtgagtgaggaaggcacagtataaggcactagagagtggtgggaactgtggtgacatagaaagtatagaccctatctgaaggggcagttgccattcatctccagccaaatactgctcaagagagttgcagaacctgtcgccagatcttttggtttttcaagagaagctagaaatctgaatttttatttgaagtcccctgattttaaaaaaatatgggcaaaatgaaagtagtatatatgtcaaaaaaccattgtgggctggatctgatcactaggctaccaggatttttgctcattactatctttttgggttgagtagctttgtctttatacatccattcaaagcaaaagcttgcatgtagaat

SEQ ID NO: 98399 - DNA, 2499 bp, Homo sapiens
ggggtgtttttaaaaagtgttttcttttatattggctttcttacattactaaggatatcatttaggttgaccagatggtgatttttagggtcattcttttcctgattaaaaaaagccatttaaaaaaattacttgctgctgggtgttcctccatttttccaatctccgattacttttttttctttttaaaaaattttgagtgccaaataaaggcccaagattattactattttgtgtgtgtgtgtgtgtgtgtgtgtgtgtaaaatttttcaaaaccaatgactatttgactgtgtgaattagctactattaaaatatttctgaaaaatatttctaaaaaggaagagagagaaaaagaaagggaaaggcagacattatgtggtcatagaatgtccttgcacagttttccctgcaaaagagaaccagaatgcaaaccagttgtcctcctacccaagatgcgcctgcctttttcctccagcttttgcacccaggagctcttttttatgccccatatttatagagactaggacttcacaaataccagaacttgaggagtattagacatctctttccgatccctcccccctgccctcctcaatttgcggataactggcctgagcttcagagatcattatttaagcccaagccagtattggaccctcaagaattgtgagcctccttgcaatattttaaacatattcacatgttaacacaaggcatggtgcaacatggctgagggaactgcttctcgaagggtgggctgagttccacagggcttcataagcgcagtgttgataacacagaattacctcgggaggcagttttattcccattgctgttttctttcagtccttttaactcaaggagacagtcagctttgaggtgccatgtctttaacgcctctctaaggcttggtaaactctcctcacccctccttttcaccctccctccctcccttcctttcttcctttttttttttttttttttaataaagagaacaggtcttacactcagagcttttgacaggcaaacctccagttgaaagtttgtaatattgttttgattttgttgtttttaattttatgattatcttctattaatgaacatttgcaggaaaagaatttaaaacacatgcagccttaatatataatgccttagtgaggcaagtaaaaatgaaaacaataggggaatgattgtacagatggaatgctgatttggtaaaaatccgtgaaggtgaaatgaaattgaagtttgaaaaataccggtgtcgtggaaaattcaagggatttggcatcagaaaacctggaatttagtcctgactttatcagtataaaacaaagcaaattattaaattatatttcccatatgaagtgcagggcttatgatagtaggattgctctaatcaaatgctatatggatgtgagagtgctttgtaaactgttacatgctgtacggtgtaattgttttctattctgcagtgggggaggcttttgtttcaagccttaaactatcgcttcttgttggctttcttcctctttatgatttctattcagttttccgagcaggaacttagtgactttttatttgttccagtggggctgttacttgaaccttaattgtggtactttgaaaaatttcctactggttgtctaaatggggacgtaaaactttgtaatttatttcgtgtgtattcatgtgtgtttgctttaagctaaattttgcaaagtaaacttagtctgtggaatacagtattgtataactattggatagatataatatgcttctctttagtttttaaaatacattcttaacaattgtattttaccacattcatgaaacaatcatgtgcatttgtatatgtctgtatgtgtgtgtggttgtgggggagggtggtagtggtattcagggatgaaggaagtctgggttttgggtaaaactgagaattctggggactatttgcttctgaaagtagacatctgtgtggctacagtgactcattaacaatacactgtcacatgttgttagataataagaagacggggacttacctggataggaagtcctggacttacctatatgtctacgtccatggaagcctcctagtttatggcacactggggtcagaatgacagagcagtatgttgctcttggagatgcagactcttgtcctagcccaggataaagttggtagaaggttactgcagcttggaaggaaggttgaactcagacccgaggaccacattgactgtgttggccaagcccctgtgaactcttcaaatgaatatgttgagatttacatcctgcttaagacaggtgccatactgacaaggattggggagcccaggtgtcaggtacaaagctgcactctcatactgccttacctagagtactggttgaaatgaaggcatatctgcagctctgtctgtgagaggctctcccgatgtcttcctgttgccaaaactgtggcaggagtgccttatcaacagtggacagcaccac

SEQ ID NO: 98400 - DNA, 1530 bp, Homo sapiens
gccagaaagaaggaaagaaagaaagaaacattcagttctgtgttggaacactgacctgtgcctatctgtattacccacatagttccaaccttgtttataaaacatacttgagatttactaagttctgttgtgaaaaagctttcagccaatgtcatgttgtgggctggatacttttagggcagatgagtatacaatgtgaatacacatatccataatggccaggaaacagtgcccatgtctgtgccattcggaaatgattagaggtaattaaaataacgtagagccatatgcgatatctatttttgaatgtgggtgtattgacatttcctgagggtcattttgaaagtcaggttctcagccttgtaccaaagcgaggaacatagaatctcagaatttcaaatcttgaaagggtcttggtttcctcaactctaaaatactgggttgaactaagtgattgttaaagccagatgaggcattgcactctccaaggtcacacagcttattaacactgatggtttcagggcccaggactctcagatgcccagaccagtttacttgctttctgtcacctgaatataccttgactcacttctgattcttttctctttcttttttgccttcaaaggaggcaagaaaattccctttttacttttaagactactggttcatggaattttgggattggctaggttctagaacaagttatcgaatattttggagaaggcttacttgtgtaatttgattctttttccacttttaatgtgtgctaaattggaaaatatacactgtaccgaaaaaatagccccagattataactcgagtcttataaaaattattgtcatttaaataataacaaatggagtgggagtatgaagggtgtgcagtggggcatatgtggtagggggttggatggaatatagaactagatggaagtagaaagcaacaaacgtgaaattgctttgtttctggcacctcaccaacaaagagagtgcccgaaactttaccagcaacccatgtaccagttgatgaaaatctttttaaatgtttttaaattcttgagagggttgtaataagcagtagtgaagaaactcaacctctgagaggtttttcaaaaagtcttttgaggtctgatggatgaagtaggcctaatttttaccattgtccctaatgaggaaaggaaaatggaaggctcacttgacttttttgccccagtttttccccagttactttttgcccttccctacctccttgaattggtagttatgatggtgaaagttctctcccagaatgtgtctcacagatctctttcacctctaacatcttagaggttaaaatctccttcccagttcagggcttcttcatctcctcacagctatactctacatctccacctccagatatttccctgggtttcaggccctcatttttttctaaccagaaataagcaacaagcaagatgggctttggggttgttctaccatcacttcagctgaatatgtcctaaacccctaactcatcaacttcttccac

SEQ ID NO: 98401 - DNA, 1036 bp, Homo sapiens
cacaaaggagccttgctagccacactgaaaggataaaataactgtttttttttggtatgtgatttgtgtgttcttcagttactgtaaatctgtttctttatttgaaacagcaacttggtagatgaaataaaaatataactgcccgttacccagaatttatctttatgaagatgcaatcactaaatagatgtaactctacaaatgaaagcacatgtgactgcaatcaatcacacacttagcctttaatagattcatttccatgttcctttaacagacacatctttgtgtagatttaggggcttcaaacattatcattcagtctacctgtttgcagtttggtattttaaagtgggcaaacattataatgcagttattttttactacatctgtccttagtagggggaaaaggaggtcactattctttgttctccatgaacttcccacccccactccttaccctgaggagaatgggatgttggggtcccatccatttaaaaggcagagcagaagatgcaagatgacagccttgccctgaaatgatttatgtatgggtgtgtcagagaccttaagcatccaaatgtgggctgcttctttctgccagcccattctaaacataaatgccagtgggggctaatttgcctctctacttaaatggagatagttcagagagggtcctaatggggcctttaatagccattcttttatgaatcttcacattgtactctcttcagagaattcttgcgttttaacttttggagtacaagaagacattgcaatcttctttaattgctctctgtgcctgttgaggaaagaagaatacaatttcctctggccagtcccatctggctcaagttgataggatagctggtctgattccagacggggtcggtggataccccttatcttttcattttatagtattgtgcaatgggcttttaattatctttgctggaccccacgactggcaaatgcagaaaatcgctctgtgattccagttcactcgatatatcagttagcctatgtgttagaactgcga

SEQ ID NO: 98402 - DNA, 1475 bp, Homo sapiens
ttaaccctctccaactgccagccactctcaccttaaaacccttagccaacttattcagcgtcatgcttatagccaatgctgatgcatagcttgtggggaagcactaataaacaatatatcactccagtgagctttatgttctggactccgtaatcacaactgctctatataaaggcgactaggaccataggtttacactgatgacaaaacctttaacctctagcccttccttcttccccctcccaaaaccgtcttgctgcttctgagtataaggggtggtgatggtgatatgcaactgttagttccaaatcaactatcggataatgaaattttgagactcttttgctcaaaacagctcaacagggtttctgcaaagaaccccagacaggaagaagtttctttatgctctggggtaatcagattttagaggtcaaatgaggagtaattattagatgttcttcttaaagtgaacaatgtacctgggctcatggagatgagcaaaatgtggagactctgataatctgacttggtttctagagaaagagtggcttcgatgataaactcaagaacatttttacgtttgaaaattgaagataaacaatttggggattttattttaaacttaggatatgggataattgtcctgcttaatagtcagtgagcctgtgacaaagtcactgactgtggcagggctccctctcgtcacggagatcctcgttttgacattggattttctggcaatgatgccttagccacatagctccaagtctgaaaataatcgttgctggtataattctgaaatccaaatggacatcacacattaacagctctccattcctgggctctgactgcatacttaagcactcggcccaagtaacatcatctttctgcctgtcatataactgtaaattacactgtgcttatgtggtctattattttatagaattcagctgacgcgcaattcttaagactaccagccttaagcgctttgaaaacttgtaggaaaatttccaagagctgtctgagcaaaagtaggaaaaggtcaagggtaggacagaaaccagagtttcttatggggtaccacttgattatgagtaaagggaaactcattcatgactttttttgccaatagaaatcataatctttttttttagacacactgctgacttggaaaataaaaagaatttgatacaatgcttttattttcttcttgaatatacaaagacttttagaacttttatatgttttatctctagtctgctatttcatgagtgcaggtcaagcagtgatgatctaagtcttatttggacttagctttgcgtcgtgtcattgaggagcatcgcatgtttgcttgaaaagtcttatggaattatgtttgttgttaatgctgattcataattggcagatggggtcagtttcaggcctctctttgctcagagaaaattttccactgctactggaaacaaataaataaa

SEQ ID NO: 98403 - DNA, 1114 bp, Homo sapiens
gagaaaaaaatgcaacctcccaaaataaagagcaaagattgcattaggagcgaacagcgctgcagaaatagatggcagcttcgtgtcagtgagtttgcatcccccttcctgatccacgagctggagtgattagagccctggaagggaattgttactcccgtggagaagtccccttttcctggcagtcgtctgcactgtacacgctggatgcctctctccatccaccccactcactcgctcctctctcacctcctctctccctctcctgcattgatttttttttttcctttttagttgactgaaacaaaacaaaacaaaagggccactggatgtctgccttcttggggggtgagccagacagactgacaaacaaacagccccaactgtgttcgggggagggtttcgcctcccgttttgcccggcagcagcagcatggacgtgttggctagttatagtatattccaggagctacaacttgtccacgacaccggctacttctcagctttaccatccctggaggagacctggcagcaggtgaatgatttaaattacttgtgtaaatcgtgtggtggcggcggagacgcaggggctgcgttggtgtgggctctgggttgaaatttttgtttgtttgtttgacttttttttcttcctttttggctgtctgttgttgaaaatgttttctgaaacagtcatctgcgcttacctctccacccacccctaacctcgtagagtgccgagctgagcagccggtgcgagctgcctgcgtttcagtcgccaacacacatccctgcgcacacgttgtcgggtttgctgtcccctatcagagacctgccgaacttctggggttcggaggagccgggtgggaaggtggtttggggtgttaggagcgattgctgacagggaccacgttctcgcatgcatgagctctacccacttgatacctgaaatcaggttcatctgtttcaactggtgcttatgaccatcggatggggggcgggggagggtgggcaggagcaaagcggagtgtttttcagtaattagcgagtgtcaataaagaataggagcttgattttgagattagaaggtaggcaaaagagagaagagcccactgaca

SEQ ID NO: 98404 - DNA, 1047 bp, Homo sapiens
taaagagcctgaagaaacttagacacctgatccataaaaatggcacctttttctactttctgaaactcatattcttgattaggtctcattattagaaattttgggttcttcatagagaagtagctttatttctctctcattctaagacatttggttttgtttgtttggatacagtatggttatggggttatagtaaaaccaagtatgtcttcctcacgtgtttttaaattctactttttataacagaaaattatttttaacctaatgcttacaatatattaccgaaatttataatttcatttattccataaatagcttatcagatatgagttacataaacttgtttacagccagcttgtgacatagttttgcaaatatcttgatatatggtgtaactttgatggcttctttattgaatagagctcaaatctaaatttaagaatgtaatgagatgtcaagatggaaaaatgcaggatttttttttttcttacccatgtgtaaactcatctgtactgcagtatcacttgagacagcagtttatggtaattcaaatatttatttggcactcactgtgacagagaatgtagttgaaagagcatgaggtttggaatcataggcctaggtctgaatccaagcattgccactgctatcctgtacccaccctaaaggaattttgtgtcctgaaggaagtttcttaatctttctcagcctcagtttccttatatgtaaaattagaatactactacttatttcataagattgcgagataaacataaagtaccttagggctacaactaatgatagctagtcccttaagctttattttaacttcctacctgtgggcccttaggcaagttatcttaacttcttaatacctcactttcctttctgatcagtgtagaacaactacctcagaattgtgggggttaactataaagtaatacatactaagtcccaggcattgtgcaagtgtcaagtgctcaagtgttgacaaggcttttttcttttgttttaatttttttttgagacggagtcttgctctgttgc

SEQ ID NO: 98405 - DNA, 1036 bp, Homo sapiens
ttatttgtcctttaagaggtgttttatgcaaacacgagcaaatatgtatgtacagtctccccctttttgtacaaatggtagcatactaggtatacgctctcctatatcatgctttacccccaccacttaatatggcttagcaattttgtatcagcacataaagagcttcttcattttttaacatacaattggaagcattttattatgtaagtagactgtattaaccagttagtgagctgcttttattcttaggtcttatattaccttttaaactaagggaaactgccatcttgcctttatttctttaaatgaaaaactttctatttgaatgaaaaataaatagtttgtgacaggaaattgttatttaaagtccctcatttcctgtttaactccagtttttaaaagttttagtaaaatgatcaaaatgtacatgaggaggcaagcaagccaggttaagagttaactcacaaggtgaatttaactcttttgttgaggttcttacagttctgaacagactacttctttcaattattattttggcccaaaaggtttttatagctttctttcttaatgagaaagaacatttcatatagtccggtgtttttttgggttttttttaacagacagctcatgggatattattacccagtaaggctgattactatactagatttctccctgcattcatttattttttacatacttgttaacttaccttgacgattttctagtatttcttaatgtaattatgtgagttttatattttgtacctaaatttaaaaatagtgagattcacctatatgattgctgagatgataaactttactgcatagatgatttttttacccccgtggggaaacctttggtcaaccagttggaccaagtaatacgtatttcagccaaagcacaaaatgcgtttcactaccttttttttttcctctagcttttcgaaacagcattgagctacaatacttttttatttatttatttatttatttatttttatttatttatttttttgaggcaaggtttggct

SEQ ID NO: 98406 - DNA, 2182 bp, Homo sapiens
gcctgtagtcccagctgcttgggaggctgaggcaggagaattgcttgagccctggaagtggaggttgcagtgagccagtatcaccccactgaactccactctgggtgacagagcaagatgccatctcataaataaaatattactgtgtgctatttgtacctgctaaatgattaaaatgtttacaaagtgctttgttgttgttgttgttgttgagacggagtctttctctgttgccaggctggagtgcagtggtgcgatctcagctcactgcaacctccgcctcctgggttaaagcgattcccctgcctcagcctcccaagtagctgggattacaggcgcctgccaccatgcccagctaaagagacagggtttcaccatgttggccaggatggtctcgatctccttgacctcgtgatccacccacctctgcctcccaaagtggtgggattacaggcgtgagccactgcgcctggcctacaaagtgcttgtctttacatatttggggatgggggtggggtagatcattgaaatctgtaaaggcagaacgttttttatctggaacatatctgtagactaacagagttaaatgatttcccacagtgtcatggaatcatcagtggattgcctcttggggtggaggcaaagatcattaaagcagcaaactgataatgtgaacgtggttgttttttctctgccaattaaatatatgctagtttagtcattatagaagagccagatgctggtcagcttgttgaagttgtaagtagaaggtgtggttttatcacatctgtaaatgtaggtttttgagacaaaacttaaataagaatagacgttagtttttattcacattcagaatgtctgactccccttaatatatacacactcttgtcttatctactgggtttttttgttgttgttttttgttttgccttttctctctctctttttaagctctgccagacaaggccctatgaagataggttttacaggttgagaatcttttatctgaaattcttgggaccagaagtatttccagttttgggttttttcagattttagaatatttgcatatacatacataatgagctatcttggggatgggacccaagtctaaacatgaaatttgtttcatatacacattatacacatagcctgaaggtaattttatacaaaatttttaataattttgtgcatgaaacagttttgactgtgaactgttacatgaggtcaggtgtgggaatttttcatggcatcatgtcagtgctcaaaaagtttgagattttggatgttttattagggatgcttaccctgtattatattttgcccagatgtttcctcatttgtcttctaggctaccagaaagatgttagcttagaaaaacgtattctggcgtttattccaacagatgagaaggcagtttctccagtgatgaataattacctataatttaatacgtgcattatacatctccagtgatgaaaaatcactgtgtattaaaaaattcttgaagctaggtacataatctcaactcctaaaaaagaaaataaacagtagtactccttgatgaacttacagatgctaagttgccttttcttagagttgaaataaggtgataaaggagtttaccgtgagactagctgtgtgaacaaagatgaaaaacaccctttcagttttcttcctcttggatgattctaggatctctaaaaaataatcttaaaaggggcgaggttttgagaggatgaggtctaaggaattgatggtgagttttttctgaaagaagagaagtgacatttgattagataagaaagggttaaaagggaagttattaataaaatagtttaggagtagagtggatctgaaagttgacttataccaatgatgatagaatgtgtcttttcccaaaggttagtgcatcttctctgaaatgaagacgtttctttcatcaattttaagtgaatttctaaggatctggttatctacttgtgagtttttggttgtaactgtatgacagtacagatgtaactaaaaatgtttgtaatttacccaaggttaaataaccattatttttgagggctgttatccctgttggtataagtaagtagttggcagtaggggacacagaaataccttgtttttcaccactgaagtgaaaattacagattattctgaattatttgtactc

SEQ ID NO: 98407 - DNA, 2105 bp, Homo sapiens
cctgcttcagcctcctgagtagctgggactacaggggcccgccaccacgcctggctaattttttgtatttttagtagagacagagtttcactgtggtctcgatcttctgacctcatgatctgcccgccttggcctcccaaagtgctgggattacaggcgtgagccactgcccggccaaaatttttctttttaagcaatattagtttaggcttgtaagtagctcacttagggtaaatattctagccaagatcatgaaaaaatacattgatttcattatgttcttaatcagatctgcatcagattaccataaataggcagctattctttctttttttccacagttcattgtattcctaccatttccaaatagaagtttatggttttaaattactgatgttaagtacttgtttggaaggaatttatagttaaactagttataataatttatacctgtcaagctctttcatatatagtacatattttatctctcattagtttctgtaagctcttgagagaaaggttcttttttatttccaccttttaagttcaggggtacatgtgcaggatgtgcaggtttgttacataggtaatcgtgtgccatggtggtttgctgcacacatcatcccatcacccaggtattaagcccagcattcaccagctgttcttcctgatgctcttcctcctcccacccccaaccctctgacaggccccagtgtgtgttgtccccccaaccaccgatgtgtccatgtgttctcatcatgtacctcccacttacaaatgagaacatgcggtatttggttttctgttcctgtattagtttgctgaggataaaggcctccagctccatctatgttcatgcaaaggacatgatcttgttctttatggctgcatagtatttcatggtgtgtatgtaccacattttctttagtctgtcattgatgggcatttaggttgattgcatgtcttcgctattgtgaatagtgctgcagttaacatatgcgtgcatgtattgttataatagaatgatttatattcctttgggtatatatccagtaaggggattgctgggtcaaatggtatttctgcctctaggtttttgaggtattgccacactgtcttccacaatggttgaactaacaccaccaacaatgtagaagcattccagagaaaggttcttttatttttgttttgttttgttcgagacagtctcactctgttgcccagactggagtgcagtggcatgatctcggctcactgcaacctctgtctcctgggttcaagtgattctcctgcctcagcctcctgagtagctgggactccagtcatgtgccaccatgcccggctaatttttgtatttttagtagagatgaggtttcactatgttggccagctggtcacgaacttctcacctcaagtgatccacccgccttggcctcccaaagtgctgggattacagacgtgagccactccgcctggcctaattccagagaaaggttcttatatgttttatgctatagtcccatagtatgggactactactatgtagtaattttcagttctgctgaaaatgctgtagtcgttactacgtagtaggcgcagaatatttgtttaatgagtgattctctattaaagggtcataaatttgaaaggtaaaggttaagaacaatttctctttagagttgtacagattaaaggaagtgaactttttttttttttttttgtgagatggagtttcgctctttctgcccaggctagagtgcaatggcgcaatctcggctcactgcaacctctgcctcctaggttcaagcgattctcctgcctcagcctcccgagtagctgggattacaggcgtgcgccaccacgcctggctaattttgtatttttttagtagagacaaggtttctccatgttggccaggctggtcttgaactcccgacctcaggtgatctgcccgccttggcctcccaaagtcttgggattacaggcatgagccaccgcacctggccaaacatatttttctttaactgaggaaattagattcattgtccaaagcttaaaaggaagattttctactttgagtttttattaactctgatactttacta

SEQ ID NO: 98408 - DNA, 1026 bp, Homo sapiens
gcaagaggattgcttgaacctgggaggcggaggttgcagtgagccgagatcgagccattgcactccagcctgggcaacaagagcgaaactccgtctcaaaaaaaaaaaaaaaaaaaaaaaaattaagaaggctatcctctaccctaaaaaggattggtaggctgcttgaatgaaatgataataaaacaccagttgtttaaatggggctcctatacacactttgttttaaaaagaaatatcgagttgtggagggaagaggatgaaaaacattttgagtatgtctttgtaactaaaatttacttggattcactaatggctttgttcctttattgtaatggagtaatattttctaaaacaaaaagttgtaatggtgttctataccttaaatgtcaaaaaagattaagtagtctcaatgtgttgtaaataaaaatgaaagaaatggtcaatctgtgcattagattgtgtttaatcaaatggtagggtaaaactacgcataccagatgacagcatagctttaaaaatgtggcttggaataaagtctttcaaaaatggttgtgtataccctgtctacaaaggaggtatgatacatttgtatttatctttattctagataaaatgatggtttacagggggagaaaatgaagaaaaaattgtgaatgtcttttttttttttttttggtaagacagtcttgctctgtcacccaggctgcagtgcagtggcgcgatctcggcttactacaacctccgcctcccgggttcaagcaattctcctgcctcagcctcccaaatatcccaagtagctgggattacaggcacctgccaccacgcccagctaattttttgtatttttagtagagaccgggtttcaccgtgttggccaagctgatctcgaactcctgatctcaggtgatccacccgcctcggcctccccaagtgctgggattacaggcatgagccaccgcgcccggctgtgaatgtctgctcttaatactttgactcattactgtcattgagtgtattcatttg

SEQ ID NO: 98409 - DNA, 1022 bp, Homo sapiens
gtttaatcttgcacaccttttgcatgcataaacctttacaacaatttgttttacttttttaaaaaaataaatggggctctattttacaatgtgtcaatatattaattttttttcatggttacaattttgtaatggttctcttaatgatggataattgttttcaggggtttttttgctatgatttaaaaaattttacagtgaatactgttgagctacatctctggatattactatcgattatatggtcagtgcacttgtggctttatgaatattttaaataatgtagtcaagtctgttgatctttttccttgtcatctgtgttttgtggattttggtatttccaaactatattcatttctacagagttattttcatttccattttttgaactgtcacttgtaaaacactttctttttatagaaccttatgagtgatagcaagatgtattagtatgtaatacattgtgatggagtgtaatgatcacaaggatcagtgacagttttgatgaccaatttcagagttataaaataaatgaaatatattctggaaaagtcatgggctttttgtgttgtttgtggaatcactaaaggtagtccctcactattaacaaatttgttttgacacataatatgtgaggcactgaattataataggcactagaaacattgcctattttcctgaatcctttagacaggattgcttccccagttaccagagatttctctaaccttgatttacagtagctactgctggtaggaattgctctccactccacttttgctgccatccagtgttacattaccctacaaatatactaagtgcttagcaaagcagagtccaaatgtaagatcaatttttgtcttacccagaattttacaattaaaatatataaataaaagatttctctgtgtgtggatgtatgtgtacagtatagtgttgcatgctatacatggggtgaggtatcagaatgctttttcagtgtttggcacctctaatttggctctgtggccatttattccacc

SEQ ID NO: 98410 - DNA, 1016 bp, Homo sapiens
gctgaggcaggagaatgtcatgaacccgagaccgcaccactgcactccagcctgggtgacagagcgagactccatctcaaaaagtaaataaatacaaataaaaattgaatgtacatgtgccttaacatctagaagatgtacaacaaaaatattaaaagtgattagctatgggtgataggaatataaagggtttttattttattttttatatctgtattttataaatttataatgagaggagccattatataaaattattagtgtagaaaagggattattcattgagttagctaggtatattttccctagagaagactcaggaaagagaacatagtaattgcttcaaatattacaagagcatttatatggaattgagatgagatactctgaataaggttatggttctcaaacttcagtgtacgggaaagtatgattgggttcctgttagagttgactttacagagtatcctgtgtgactctaatgaagctattccatggaccacattttgagaatcaaataaaactaagcaagatttatagtggccagagagaaagtgattaataagtaaggactttattactatccagagatggaagcttctggttttaccctatatgccaaagacactgtctttatagggatcttccccccaggcttcacagtcacatatttcgctgcctgctaaaataaacatctctacaaattcagatgtcagagtagtttcatcatcttccattacaaccccagtcacccaaaagcctatccttacttcttgcattctctttttcaattaaggacagtctgccaattctctttcagacatgaaacattgggtcatctgcagttcctctctcacctcttttaactattcataaagccctttctggactgcttccaaattttcataaaatcacttccctcgttcccatctctactactactaactgccctctttttggccttcatcatctttccttaactacttcatgggctttcttcgttggtctccccacca

SEQ ID NO: 98411 - DNA, 1736 bp, Homo sapiens
gggaaccgagagcagtatagatcattgcaattgagcttattgaaaaaaaagacttgaacgttcattcaagtaggccataaccccagcctcccatttcatattttttgcttcacagtcttcctgtaaggacttaaaaagacttttctccggaacacaggtgagtcctaggtcctagatttggagagaactattattagaaaggaaggtgagaaattattctttatgtctttgtccttttcctctataaacatggaatttcaacacttgaacaaaaacctcagagatcttctgggtctaggccatacttgttacctccccagcccttagtctgttgcttaattctgtttaacatttctcccctcttcctaatggtagtccagcatttacttgaacactttcagagaaaggaagctcaatctcctgaggtaacctgtttacaattaggagtgattgctaaaatattcttctctgtgatgatccaaaatatatcttcctaaaacttttacctagtgatcccgggtaaacacaggttctattctcggaaactagattagcaagtctaattcctgttctattggactgcttcctcttccccatcccccgcacccttcctatttttaagaaaatttccagactaaacaaactatttttctttagccatttattagatggtataactctgtttcctcttcaccatcctggttgttttcttctgggtgagcgctgttatgttttctttacatatagtaaccagaactgattaatatttgtagaggggagaagtgctgtctttgtcctggaagcattctattaatgtcctcagtagaatttgtcagccattttatactattgagtcatcgaacttctattaaccacctctacttcattctgtctttgtgcttttggttcactttgacacttaagtgggagcgtgggggaggagaagtaatgtttttgtgtgaaatcatcagttggatcaatttccataagacactgggaatggcatttgttaacaagtaaaagatagtgttgtgcatgtaaagatctaagaacttgatatttctatgaaatcacaatgactgagcaatagtcctttgccttagtttttattccattgagtgctaccttaccattgtccatactgtgccattactaattccctaaccatatgctcctcttagtaatagtgagaaaacttgatttgctagtgaggagacctagattccagacccagtttggacattaataagtcaaatggccttgggcacatctacctttctctttttcacttatagaagatctttctataaagaacacaaaaattacttaagttacagccacaaaatttgctaagattactgttttttattgtaatatgtgttattgttgattgtattcttgattttaatctttattctggggcaacataatttggacatgaagattttatggccattaagtatagaaatattctcttttttttatttgcttgtattcatctttaaggaacacatttgtccattaaggtccattaaggtgagctgtacttctaatttaagagtgtgtatttataaaagaaaagttggacttattgaaccctggattctacaaatagagatacaaatataatatttttttctttaaaaggcctaaactatagaatatctattttaatagttatcttagccagttaatggtgattagtgttaacaactaggaaatagtttttatcaaaa

SEQ ID NO: 98412 - DNA, 1051 bp, Homo sapiens
ctgttataagacacttttgaattttattttgtttgatcaaaagcatttgtgtgaatggtacttttttctctttttcccttttttttttttgcctctcaaagtgctttattcattcagtgatttttttcatttgtatttgtttattaaacctggtgctgcccatttatacccttttccccacccaccttagtttcaaattaaatgtacacattgaaacttctttactgagatagtttcctaatccctgagggaatctgtatcagaaatatgcataaaagtttgaggccaggcacagtggctcatgcctgtattcccagcactttgggaagccaaagtggaaggatcacttgagccatccaggagtttaagaccccatccctatttataaaaataatttaaaaattaagaaatatgcatgaaagtttgacccccatgttattttttagttccagttcaactttgttttgcgtaactctaatttgcattcccatctgtattaaagacaagttctcaagtagcaaactttttaactctgccaaggctgaaacttttgagactaagtagaaggaaggcatttttgactaaggtttttatccactgtgctcaattagcttagtcatcttttttcttcttaagatctttgtggcagatataaagtacaactctttacctacaattctgtacgtgtatgtgtattatcagttgaagcctcataccagatgcttttagttattcaagatatgtgttcgaagacattgatacatgatgtttatttttcttctacttcagcatacctgagggatacaacatactcctgtcagtaacagattcactgttacagagattctcacttgaactaggaagcatgctctttaggaaagaggcctatcagaatctaaaaaggggaaatgaaggttagaaaagtaccagcacccccatagatgtttaatttggtacactcgtctcctccagcagctgaaaattgctagttttaagagattgagccaggcgccgtggctctcgcctgtaatcccagcacgctgggaggcca

SEQ ID NO: 98413 - DNA, 1005 bp, Homo sapiens
ttactagatttatctgttacttattagttcagtgtcccagatagtaaaatcttattagtgattctgctcttagatagaaaatgtgtatctgtcattttgaacttgaatttttttgtttcagtaaataaaactatgactcatgatgtttccctctttattctggcaactcagattcttagctaactttctgtttaattgtattcttttcttagtctagattttcttctacaattgttttatataactaaggatacatccgttacttgacttctgtctttttatttttgttttaatgaattgtgttttattgaaagctatctcaaatctttttggaataataaagtgtatacataaacattatagagaaaaactgtgttcagtaggattagacttcagtttccaaagtattttcatatacatgacctcatttgatatttacaacaattgtacttagtggctagaacccagatgcttttgtttttagagaagagagaacagaatcaaataacagtttagtgatggctgggcacagtggctcacgtctgtgatcccaacacttggggaggccaaagtgggaggactgcttgaggccaggagttcaagatcagcctgggcaacatagcaaaaccctgtctctacaaaaaaatgtctttagaaaattagtagggcctgatgtcctgtgctagctacttgggaggctgaggcaggaggatcacttgagcccaccagttggaggctacagtgagctgtgatcttgccactgcactccagcctggaagacagaacaagaccctgtctcaaaagaaaaaaattaaaacaaaaaactgttcagtgatggaactcaaactacaacccagtcttgtcatatatggtttactatttctttcttcttcccaccttgaattcactgctctgtagccaagaagaaagtggtatgttaaatacagtaggattcactcattaactctaaatgagaaattgtgatttgtttctgttaaccttctg

SEQ ID NO: 98414 - DNA, 1053 bp, Homo sapiens
ctatgaggccttgagtaaaagtcagctgctctgagcctcaggaaagtgttttgttttttgttgttgttgtttttgttttttcatctgtaaaataagagttgcactgaatctctggaaacaatcttcagaagttcaggattctgtttctctgcttccccccccccccccaaaagaaatttaaatcttctgagatcatcagtttttattattattattattatttttttctagagacatggtctcactgtgttgcccaggctagtcttgaactccgggcctcaagcaatcctcctttctcaggctcccaaagtgttgggatgcctctgcacttgactcagtttttgtttcaaatgaaaacattatattccacaggatcttataccaatatgcaaatctgctgctctttagagaaaaagtagttgttaaattctcgacaaattatagaagttgctttttttggcttttttttttttttttttagttttttttttctgtttatttcaggaatctttatggatagcagttaaccatttttctttggatttgtttgaatatttcaagaatatagttaatgccaggttagaaatttgctgattgaggaaataataataaatttgtttctgaaaatatttttataaataataatgcattttgcctgtgttaggtaatgacagttgtatcctttcaccatggataattgaataatcctgaaacaccaactggagagagtcataacttatttaaagagccctaatgtttacagaatatattctgttattaaacgagtatttgaaaaagatactattttgcttattgatgagagtaaaacaccttttcactttacatgcaggtactcaaaaattgtaaagcaggatgtcagtgaatttgaattctgaacgtcagtttgaagatggtaacatgtttagtatataaatcttttccactcaaaccatacattttaattgatattaataattaatatgaataattttataaagaccttcaaatttttttaagtaacattaggttccttattaggagagcatattatta

SEQ ID NO: 98415 - DNA, 1677 bp, Homo sapiens
atttttcccgtcctcttttgcttgtagggaagcagctcgagagtgtcgtagaaagaagaaagaatatgtgaaatgtttagaaaacagagtggcagtgcttgaaaatcaaaacaagacattgattgaggagctaaaagcacttaaggacctttactgccacaaatcagattaatttgggatttaaattttcacctgttaaggtggaaaatggactggcttggccacaacctgaaagacaaaataaacattttattttctaaacatttctttttttctatgcgcaaaactgcctgaaagcaactacagaatttcattcatttgtgcttttgcattaaactgtgaatgttccaacacctgcctccacttctcccctcaagaaattttcaacgccaggaatcatgaagagacttctgcttttcaacccccaccctcctcaagaagtaataatttgtttacttgtaaattgatgggagaaatgaggaaaagaaaatctttttaaaaatgatttcaaggtttgtgctgagctccttgattgccttagggacagaattaccccagcctcttgagctgaagtaatgtgtgggccgcatgcataaagtaagtaaggtgcaatgaagaagtgttgattgccaaattgacatgttgtcacattctcattgtgaattatgtaaagttgttaagagacataccctctaaaaaagaactttagcatggtattgaaggaattagaaatgaatttggagtgctttttatgtatgttgtcttcttcaatactgaaaatttgtccttggttcttaaaagcattctgtactaatacagctcttccatagggcagttgttgcttcttaattcagttctgtatgtgttcaacatttttgaatacattaaaagaagtaaccaactgaacgacaaagcatggtatttgaattttaaattaaagcaaagtaaataaaagtacaaagcatattttagttagtactaaattcttagtaaaatgctgatcagtaaaccaatcccttgagttatataacaagatttttaaataaatgttattgtcctcaccttcaaaaatatttatattgtcactcatttacgtaaaaagatatttctaatttactgttgcccattgcacttacataccaccaccaagaaagccttcaagatgtcaaataaagcaaagtgatatatatttgtttatgaaatgttacatgtagaaaaatactgattttaaatattttccatattaacaatttaacagagaatctctagtgaattttttaaatgaaagaagttgtaaggatataaaaagtacagtgttagatgtgcacaaggaaagttattttcagacatatttgaatgactgctgtactgcaatatttggattgtcattcttacaaaacatttttttgttctcttgtaaaaagagtagttattagttctgctttagctttccaatatgctgtatagcctttgtcattttataattttaattcctgattaaaacagtctgtatttgtgtatatcatacattgttttcaataccacttttaattgttactcattttattcactaagctcgataaatctaacagttactcttaaaaaaaaaaaaaaaagactaaggtggattttaaaaattggaaactgacataatgttaggttataatttctcatttg

SEQ ID NO: 98416 - DNA, 1642 bp, Homo sapiens
cgtttgtaacaaaccattgtcttttttcaaggatgaacagagtttatgaaggagcatcattctaagaattaagtgatgtagtctttatgtttggacagttcaccagattctcaagaaggctttcaaacaactataaagtttgatgtttgtcctgctgagctaatggggaaagttatagcataaaaattgtgtaaccgcatagatatgtcatttttaaaaactggtttaacagaaatcaagcaaagtcacaaatatgttcacaagttggaattatttattgagtcaaaatgtcgaatcgaacattttgaatgaagtaagtgttataaatgaaaaattgcctgatgtttagcagtttgtattctctaaagctttttttcaaaagttcaggctttctacttactgggaagttggtggtcctcttagtccctgataaatcaaggcaatcacattcatgtgagctggatgaatttataagttataaagaccttatccttcataccttgaggatgattgcactggttttgaagtcagttgcttaatgatgaggtgagaaatgtatcctgttgctaaatctgtcttagacccttggtgaaacttgaagatttcagtttataaagataaaatcaagcatcttttgtgcagttttctttttttaatgcaagaatggtggggaggtttgtttgtaagcatgaaactttgagaatctttattaagaaaatgacataatttttaaaaaccttgtagccaagaacatatgtggccacattaccagtaataaatgtttttctctttatattggccaaaagggaataaaaatgtcatcataggaatttgtacatatgctactgatttgcctagaaaatagcaagtttgatattgctcactttgcaaatatagggccatgtggcacttttatctataggacagattaataaaaatgaagtggggaggggtttatttttgatatattactcttatgagttttcaagctttgataatgtttaactgaaaagtggcttagaaagggctagatccaatgtgttcattattaaataattgctatcagatacaattttaagttcattctttttcaaactcaagtaccatattggcaaccataatattgtcataggtgctctcttcatttagatattcttggggggggtggcatttgtataatatatgtgtacatatatatatatatatatatatatacatacagtatataatctaaagctctgagagctcttaagtcaggaatgctgagtattatagtatattgaggtcagatgaaattttacatttttgtgtgttctgttgcattccttctggtagtttctatgactgcattactccagcactcatgattgattttatcttctaattttcttccaagtattttattttttattagttttctttggcttgatacttttaaatatgttactagtcacttgaaagcctctcccccaaaagtatttggtttgtatgctttgtctgtggcagctataacagtggtaagaacattttgaagatagctttttaaaggaaccactgattttttcaaaaatcatcctgggggaggaattttggcatttcatttgagcagggattttgtcagaaaatgtgttttgatggtagg

SEQ ID NO: 98417 - DNA, 1006 bp, Homo sapiens
tgacccagtttgggtattagcaacttaagaaattccctcatcaagtaattctcaactttttagtctttctcctctcttcaaatcatgtgactttttaaatggaagtttttcattgattaaaatattttagcacctaaaagctagccttaaaaacagctgtaaaagaaaaacatcaggaaattagatatgactagcccagttaattaaaagacgggctcaaaccttgttttattctttttcatcttggatgaagattgaagggaaaataactcaagtgcataatatttattttcaatttttaatgagactttatcctcatcacaacattaatactgtacatagtatgccaaaatatccattaatttgtctagaatagtacaagactttttaaagcaattgtcctcacagagaccacatgtaatatactgaaatatgttcatttttaatggctttgttaacatcaaagaaatgctgcctaaatttgatttcagatgaggaaggagaaagtaaagtgtgcatagtaaggctgtaggtgaagagttgtgagataaatagttcactcagttgtacaaagcacaactagaactttttgttgggaggcttacatacatcttgaatattcttaatgtaataatgttgactattaagttggctacacagtcactgtatgtactaggaactggtttccttgacattctagaatcaatggctaggagaggcattaatctttgaggggctgaacatatcatgaagctgagtcagtatggaaaattttcaaataaacagggtgctgaagttccatctgtctcatctgcttatgataagttcttattgattagtgaatgtagcttaagcctttgtatgtgtcctcagggggcagaccgactttaagagggaccagataacgtttgaatggagggattatatttcaggtgttttagcttgaaatttattttttaaaaaaagaaaaatttaaaaaatatataaataaaatagaacaaagccg

SEQ ID NO: 98418 - DNA, 1059 bp, Homo sapiens
gttgatattataaacaggcagttttagcacagaaagaaaatactgacctgtctgcattctggtacggtgggtgcaggtcccagctgggtatgacatgatacatttttaattattctcaccagcaagtaaaaggaaaatgaacaatcttttggaattgtctttgaaaaggatcaaagagtaggaaattcacatttgacctaacattacttgcctatagaagtatggcatttccaagcttttgtctgaggagcatctcagagaagtgagagtaaatctgagttagcttaaaaattggtagggaggaagaaaatctctgcaaataatgattttatgtttgttggccaagtgaaatgatctatcattgtgtttgggaggttttattttcttatgtttttaaaattggtaaatgctttatagatgtatttttatccaagtgccactccaatttgtgtatgtaataaaattatttatattaaaagtgggaaataattgtcaacattttttttgagtatagatttattaggggtggcaaagaagagtgctagttagcagttttccatgtaaagttgtccttgactgatttgtccacatgtcagttgtaactcccccactccctgcaaaaggaattatttctaacccagatgtatcacttgaaactttttagaagcaaaataatcagggaagttcctagaaaggtgtttggctttttggtttttgagggttggggtaaagaagacttcccccacaactgtcagcacaaaacagggtattgatttttaactctgatgtttctattggagttgaatactaaataaataactataatgagggaaatacatttctaataaaattccctacattctagaaacatccctgttttaatttttttatctaaatctttttgtgctttatgtgtaaagaaaaaaatgtactgagttacaatgcattttattaacactatgtacataatagctgctttgtgttcagaatagtagcagttgctttgtatattaaagtgatccttgtgaatttgtgaaatattgtcataaagtgcttttt

SEQ ID NO: 98419 - DNA, 1068 bp, Homo sapiens
acttgatgggtctaacctctcaccccaattccatccatgtctctgctccaccactgaggaaattctcacacatgccactgccttactgccataaatcttcctcccgttgttccagaaatgggtctacatgggctttcacatgagctaagtgcacatttatcactttggcttgtgttgaacattggccgtaaccttctaagtcacagcagatgaaccagtgtgattcatgcaagaatggtaggaatgactgtgacaaatgtttgtcttcagaaagacaaacattatttgtagctcacttgtggtgggaaagtaatctaatatgcaaaagacatctgaatttattaggttggtatagctataacataactactaatatatgagatttttctcacagactgataacagctttattgcatgtgagtccttgtcatttattgcttcctagtactataaaaactgaaaatagcatattattccttgaccagctgacatgagtttgtgattcatttgaccagaaatgtgccctctaaccacagcacttcaacttatggtcatagttggtttgacaataaatttaaaaacataattagagagcacttaggaaattggtctacttaccttgattagagtttctaaggtggttatttaatgtgggccaaaactctacttaagttttgcaactttacaaaagttatgcagataagtcaaaagatctaaataagtagttaaaaggccacaaactctcttcatattgcttcagctcttaacagaaggacctgcccagggtcacactcatatgtgtgagaatcaggaggcagcaggtacacgagagggaaaatgctgtgagcagtgagactttggcacaaagatgagaataaccatgttggcaacagataatggacagcgaggagggatgactgttcctcagctctgcccctttgcctgtgcacggaaacagtggtccagcagccattcaaagcgaacacgagagaaacagatcttcctattttgaagccaagagtttgagaccagggcaacatagaaagaccccatctctaaaaagaaaga

SEQ ID NO: 98420 - DNA, 1085 bp, Homo sapiens
gtagcgcccgctgtggtggagcctgccgagttggatttcggagagggcgagggccaccacctgcagcacatcagcgaccgcgagatgcccgaaggtaaggaggcggcggatgccatccgccctcgggctcacctctgcccgcctcctcccccagagtcccccgggaggcatccgccgcctcgggctccttcctgccggtagccggccccgggacgaaggctggttctgcctcgcgtccccaccccttattcttgccctgctgcgtctggccagtttcttttcctcctccttaccgtaacgcccagttcttgctcccgcttcccattctcccaagccggcgtgggaccctctagtccgccgcccttcttgtttgtagctctgttcattgtctggtgggactttgctaagacttttggggtatattgttttccttttctcaatggaaactcaaatacctcaacttcggagtactcatcccattccctcccttaacccatccagatggtacctaagtgaaggaaccaggtaagggtctgattgttccttcctcccatccgtgaagatagctgatgcccgcgacagtttagacccagatgtttgaggatttcttatctagactcaaaatagaggttgccataggagacactatatggtattcctaataggttaagtcggcgtgaaagaagctgctttattccttccaactataatttgaacacagaaagaaagaaaatggggggaggggcgtaaaatgactgtgaagggtgtgagaggttattaccaggggtgcagacaagttgtttttttgagacggaatctcgttttgtcgcccgcccaggctggagtgcagtggcgcgatctcggctcgctgcaacctccgcctctcggtttcaagcgattcctctgcctcagcctcccgagtagctgggattacaggcgtgcgccaccacgcccagctaatttttgaatttttagtagagacggggtttcaccatgttggtcaggctggtctctaactccagagttcttgatccgcccgcctcggcctcccaaagtgctgggattacaggcgtgagccaccgcgc

SEQ ID NO: 98421 - DNA, 1054 bp, Homo sapiens
cttttgaagtagaaaaacattgtatcataaagatgtttaaatccagtgggctcatttgtttcgtataaatgccagagatttcattactatagaagaaatgtgttagaactcttatatttaaactttgcttggactcttaatttctttaaaataataattaagcttcatgatggacatgcctttgtaactaggaactactttacttacctttcggaatattcagacattgtgaaagaatgaacaaatatattatgtgagttaattgattgtacctttatacacaaagcatgtaagtgcttgtgaaaacttaatgctctcttagtggtgtcaggtaagcctctgagtgattttacacaccagttagtagatgggtgggtggtgttgggtgagagccccaaataaggctcccacccagtgtacatgaaaatacatactttcatgtacatgtaatttagcccttccaaaataaggcctgtttatattccccgtgttgctaatgaagaaataaagagttaggtatgtagaatgactatgtaagacagccactgagcagaactaaggttctcagttctcagactgacatggaggtgagatataccaagttcagttcttaaaaaacttttaaaaatccagaatgcatcatgtattttacccataaaatagtcctgtttttgagaacttacttcggtcttgattagttcctttcaaagtttattttacacgattcagaggcaacacttacatctcttttttttttttttttttttttttttaagagaaagagtctcactgtgttgaccaggctggcctcgaactcctggcctgggctcaagcagtcctcccacctcagcctcctgaatagctgggaccacgggcgtgtgccatcttgcctggctccatcttatgtctatacattcatttcagtggataagaataaaagtagaggtaacaaaatggcctaaatatacccatcaaataaacaggttgataaattttaaagagtttgttctggtaactgtgaattgaagctgagaatgcactggacagaggaata

SEQ ID NO: 98422 - DNA, 1161 bp, Homo sapiens
ttagagttaaaataataacattggataatgaaaaatgaaatggaggtacttgtaacccagactttttttttttttttcttttctctgtatgagacagggtcacaactctgcctgtcgcccaggctggagcacagtagtgccattagagctcactgtaacctcaaatccctgggctcaagttatcctgccacttcagcctcccaaatagctggaactacaggcatgtgcctccacacccaactaatcttttaaaaaatttttgtagagatgggggtctcactatgttatgttgcccaggctggtcttgaactgttctcaagtgatccttctgcctcagcctcccagagtgctgggattacaggtgtgagtcactgcactccacccagaaatactcttaaaagtctaaaaaaggagttaagtgctattaagaaatacacaaagggagaaaggtatactatagcatatgaaatgtcacagctcagtcacgatcactaaaacatagattgaggcgtgaaggtaagttaaagcaagactgaacactgacatagaaggaggtagagcagtgtttcggaaaccagatttaggattgtcagaagctaggaaagcaaaagcaaggcatgagtgagcatgagactggagcttggctggtactgtgtgacctcagatgaggcagggcagctcaagacccatcaggtaagacttacctgatgggtggaacgtgtgaacttagataaaatctcagcgtttacatcatagttgagaggtttgaaatgtttgtgttatggaccgtaagactaatacagtgtgcagtatggtagagcaggtcagtaaatgcagtaagcctttaaataaacagatgcccagcagttggcccagaaactgccaatgtctcctgtttaattgggatatattgaaatcaatatgttgaactcaatctctttctctgaaatatgctgcttctgtcagttactttcttggttgctgccctctccctttaatattttgacaagaaaaataatttctttacagtttacaattgcataattttaacacttttagcctttagtaataatgcatttcatttattctaagttccatatttttacatttttaattaacatctgtgaaattgagatggctgatagattcaaggagaagcag

SEQ ID NO: 98423 - DNA, 1349 bp, Homo sapiens
ggatgtattatagaaggtatttagaagaactgatgtattagtttaaaattttcttttcatatgttcactgattttaatatgtgatatactttcctttagttgtgattgtttagtaataacatgtagacctatttacaggttttgccacctttttataacacaattaattggccacatgatttagtaacatggatttttttttttttttttgagaggctggagtgcctttattgcccatgctggagtgcaatgatgtggcctcagctcactgcagcctccatctcccacgttcaagcaattctcctgcctcagcctcccaagtagctaggactacaggcatgagccaccatgtccggctaatttttgtatttttagtagagatggggtttcaccatgttggccaggctggtctcaaactcctgacctcgtgatctgccctcctcagcctcccaaagtgctgggattacaggcgtgagccatctggccagtatcatggatttatgcatatttctccatacttctttgacctctttcccttgctccaaaagagtacattttaaagatgaatgataggatttaagctgcagcttggtttcatttgaacaacaacaaaaaatcagttcgtatacagggattgaatctgtgattttggcttccttttatacaatgctctaaccacatgagcctatcacattcaaatttatgctactcagaacttttaagctattaacttttccatcctaatgtagtgtaaatataaacatgccccatggtgtttcccagaaggttagcctcagcaagtgaaacttacgtacattttccttgtcctgcttgttttaggatgagaatcagaactgttgtatttttctgtactcctgtttatcttccttataattatgttaaatcctaatttatttgctaaaaagctatatacaaccaggtttttcatttgatttcaacagcaagaatacaagaagtgggggttctataatacttgaagtaatggagcacaacacaaagcaggggagttgtaagcagcattttcgaagctcgtgtggactttgtcttgagctggtcatttctggttaggatagttgtatttctcagtttctttcagagccataggcttctcacacagacagagtgtggaagcagtaaaagaagagctatcccatgctcctctttcttcagtggtaaggagtgtgtgcttgtgatacttgtctagcatcaaaggaagaggcagtataggaaacaaagcgtggtccaagtccctcttggagcttttattcttctggcctttgttaaaatgattttatgtgctgaatataccatgttcaattaggttaaca

SEQ ID NO: 98424 - DNA, 1073 bp, Homo sapiens
ttattttttaaatggaattttatctcattttgtatattgttaatcagatgattagcaactacttttatactgtggcatttgtatcagaattgatcagctaattttttttattcttagtgcgagaaaagaggaagagcaaccatttgaaccatgtaagtaaacagttggaaagctaagaaattaacagttgaattaaaagtatgtctgtcatgattccataaaaatataatggggacccaatactgttagtatgagcctctttttgtggattttctaaatcatttctattttgctgagaatcagatttatgcaggaaagtctttgacttagtgtacccaattgttaagggtttctgacatttaagttaaatttcaatagtttggttgtggtataaatatctgccttaaatatttttgcctaaagtttttaatctttttaaaaatcaagtaacaaaattataatagctaagttcatttttagcactatatgttgacttcctgtcataacaagtgaaaacttagcttcctcactccaccgtgaccttattttcttccctctatttctcccatatatatcacatttttaattaaatcagtaattgatgtttacattgttatgattatacagatattattcactgctgagtcatatattattctcactgtcttctccttgtacatcctttgtttctcttaaatatttctgaaatctgggcgtgtctgcacgtctcttcctagcctccactagctcacacagccaaatgcagtagtaacccttggctggtctccttgctttcatgtctttttttttgtgtgtgtggaattaatttcctgactatattcatttggctgttttctaacagctatttttccccccaaatgttgtagcatttgccacatgcctatcaaaaatgttttccatctactaaaacacatctgttccatttttctcttggagacagctttcctcagccttttgtcatcctcttcaaatatagacgggtttttcctaagactgttctgtgcctgttttcctgggatatctctctgaagtcatctgggatctcacataac

SEQ ID NO: 98425 - DNA, 1048 bp, Homo sapiens
tcggtctcttgagtggctgagattacaggtgtgtgccaccacgcctggctaatttttttttttttagtagagacagggttttgccgtattagccaagctggtctcgagctcctggcctcaagttcacccacctcagcctcccaaagtgctgggattacaggtgtgagtcactgtgccctgctggatgcgtcttttctgagactgttcagtttcttcagagaagaatctcccaattttctacctggggagtacaagcatggctgctcattttccagaagcagagttggaaaagggaggtggagttccacttctcagtgtgtagttttttttcccatttcccagatttcagtcctactatttctgagcccagaaccttctatattccttataagatgggaggacaggtggacctgggactccaactacatattttcagccgaccttgctggcttttgttttgtgtttcactctaccttccaaggtgccatgtgcctctgagtttgaagtctgccttgggttctgtaagacaaactaacttgatcctgttccagtcactctctgtaggcactaaagttgtgcttccatatcagttaccactcctttgtctttttcatctttcaagatttattaaaagtcatctgctgtggccgggtgcggtggctcacgcctgtaatctcagcactttgggaggctgaggcgggaggatcacttgaggtcaggagttccagaccagccttgccaacatgttgaaactccgtttctactaaaaatataaaaattagccgggtgtggtggtgcacacctgtaatcccagctgctcgggaggctgaggcaggagaattgcttgaacctgggaggtggaagctgcagtgagccaagattgcaccactgcactccagcctgggcaacagagcaagactctgtttaaaaaataaataaataaatttataaactctgtctcaaaaataaaataaaacaaatggaaatattatctgctgtcaatcctgttgcctgctcctgtgtataacctttattttatgtctttaat

SEQ ID NO: 98426 - DNA, 1021 bp, Homo sapiens
tgctcttatgcaaatatgatttaaggcattacattttactgtagtgaaggaataatagaaaatctcagctgctttttattgcttaagaaaaaacactgaaatcttattgtaaacttttcccattaatttatacagggaatgcataacagatgcttgccaggtttgattataggtaccacaagagcagcatttcataacccattcctcaaacactgtctgtgggagagcctccactgggtttcccatagagctgcacatgatactacactcaggcagttcatggagtgtaagaaatatcttaatgctttatcatttgacattttaaccaaggaaaaaccacacttttataggtttaacttactgtgacattttcttctatttcccttccccttcaggtatctccagggcagcttactaaaaagtatagctcatgctcaacaatatttctagatgacagcacagtcagccagcctaatcttagaaccacagtaaaatggtgagtacaactaggctgccaagggctgagtgacagacccccttatgctaaaagcatcctagccatcctcggtaatttcagccatttgattgtccttttcagcaatgagtttaagaaatcggtgtcaactatatattgatttcaaggatctaaatatgaattttaatttcctgttttaatcttaggctgcatggtggaagggaaagccagttagtgaagaagcaatcccagaaaagtgtagctatttatttaatgcatttatgttaagacagtgtcgaacataatgtgagaaggagaggtgctttttattggatgtttctggaaaaacgttagtttgttatgagttacaggtctcaaacaatgtgtactgctttgcaaactactcttggaagaaggaacagcttgtcctctactggcaccatagtgtatctgcatttacattttccctgtcgtgcatgagcacctcttgggcacaatctgagatgcactttcagaacaccctaagatgaacttttcaagtttatt

SEQ ID NO: 98427 - DNA, 1064 bp, Homo sapiens
gaccagcctgggcaacacggtgaaaccccatttctagtaaaatacaaaaaaattagccaagcgtggtggcgtgcacctgtaatcccagctacttgggaggctgagacagaatagcttgaatccgggaagcggaggttgcagtgagccgagattgtgccattttactccagcctgggcgacagagcaagactctgtctcaaaaaaaaaacaaaacaaaacacacaaaaagacaacaaaaaacactcctcatgccccaagtcatacccgatgccaattaaatcagaatgtctcaagttggaagttaggcagtttttaaagctcctcaggtgattgcagtgtgcagaaagtttgagaaccactgcttaattgaatgtaggaggatgaactgcttctatttggtgggaccttgggcaagtcagttttaagccttggttcccatatctgtaaactgggtgttggattaaatgtcatgtaaggttccgtggtccttttcagcatataacttcaaattctgtaatgttaaaatcaatttggacatgaaaatgtttgaagcactatagaagtatccatcttagatgctaatgttacagactttttaaaaaagtgctaacattgtatggacttaaaattcagatttgccttccctcaattattttgagcctcagtttagagactgagggcaaatggaagcatataacttacctaagacaactccttgtttcctgatacacaacatctgtgggtaatttaggaatacagtaacatatatctgaaaagtcgtgtctgttcactaatattttacttaaaccaatgtggaaatacttgccattaatattacactttgtagttttatgctgcattgttagcactgcttatttcaggatagctacacctatcattggttttgtgtgcacttatttactaataaattttctactaatgatgcaaaattgatcataaatgattttatttggtataaaacacttttatttactttaaggggaaataatgaaagatgggtgggtaggtgatagttaattaaatcaactgaaatgcagagccta

SEQ ID NO: 98428 - DNA, 1022 bp, Homo sapiens
aactatttggttttttggttatttttattttttgctttttaagctgttaggctctgcatttcagttgatttaattaactatcacctacccacccatctttcattatttccccttaaagtaaataaaagtgttttataccaaataaaatcatttatgatcaattttgcatcattagtagaaaatttattagtaaataagtgcacacaaaaccaatgataggtgtagctatcctgaaataagcagtgctaacaatgcagcataaaactacaaagtgtaatattaatggcaagtatttccacattggtttaagtaaaatattagtgaacagacacgacttttcagatatatgttactgtattcctaaattacccacagatgttgtgtatcaggaaacaaggagttgtcttaggtaagttatatgcttccatttgccctcagtctctaaactgaggctcaaaataattgagggaaggcaaatctgaattttaagtccatacaatgttagcacttttttaaaaagtctgtaacattagcatctaagatggatacttctatagtgcttcaaacattttcatgtccaaattgattttaacattacagaatttgaagttatatgctgaaaaggaccacggaaccttacatgacatttaatccaacacccagtttacagatatgggaaccaaggcttaaaactgacttgcccaaggtcccaccaaatagaagcagttcatcctcctacattcaattaagcagtggttctcaaactttctgcacactgcaatcacctgaggagctttaaaaactgcctaacttccaacttgagacattctgatttaattggcatcgggtatgacttggggcatgaggagtgttttttgttgtctttttgtgtgttttgttttgttttttttttgagacagagtcttgctctgtcgcccaggctggagtaaaatggcacaatctcggctcactgcaacctccgcttcccggattcaagctattctgtctcagcctcccaagta

SEQ ID NO: 98429 - DNA, 1085 bp, Homo sapiens
gcctaccaagctccaaggcccttcccttcacggccgacacgaggccagcctggaaggaaccctgatgaagctgctgtttcagggtcatattggtgccatctgtgaggaactccatgactcagcaaggatccttgcactctcataggtaactcaaggcccccaaagtggtgctgtggttgtccgagtgcccagggagcctctcgagtgtggtgagcgttggatgatgccccagcagtgcttctcagaccgcctgaggggaacgctggagcttcctaactcaggagaccaatttctaaatacaaaaaacactcctaatggggaggggtcaggggcacagggatcttcatatctcaaggcttctgtaaaaacagaccttcagataaaatgtggaaagactagcaaaagcaaatatacaatgtgtgactcaggttgaagctacgtaacttctcaatagtccagaggccctaagacctaatagtggccaaacaattatttcaaaggccagacatatgccctttaagggctgtttataccctactggtcacatgaaaagatataaatgaatgaatgaatgaatgaatgaaaaagagaaaggagcttgaactggcagataactttttaaaagccataaagaggccaggcgtagtggttcatgcctgtaatcccagctctttgggagacggaggcgggcgaatcacaaggtcaggagttcaagaccagcctgaccaacacagtgaaacctcgtctctactaaaaatacaaaaattagccaggcatggtggcgcatgcctgtaatcccactgtaatcccagctactcaggaagctgaggcaggagaatcgcttgaacctgggaggtggagcttgcagtgagccgagactgcatcactgcactccagcctaggcaaccgagcaagactccgtctcaaaacaaaaaataaaataaaataaagatatttactgtgctatgttgttctggtagtatacttgtaagatttttgccaaaaaccacccaaaaaatatttttcaatttatcaagcagattattacacatcaaaacctaccaagtaatgatggaaaatatgaa

SEQ ID NO: 98430 - DNA, 1104 bp, Homo sapiens
atcaagtgatcctgggaaacaaatctgtctggattgcggagggtggttctgaaagaactgccaagacgttaaagaagggtgaagagtaggcagaatataagtagctaacctgagtcaagactctcaaaagctagcagcctgatgacaataggatttatttcagccaggatagtgtctgtctgtgagtgcatcattttaagacagtatgacttcatgttgttacaaactatgtatagtatgtatgttttgtgggttgtatatatacataatatatattatatatatatatgagagatttggtgacttttgatacgggtttggtgcaggtgaatttattactgagccaaatgaggcacataccgagtcagtagttgaagtccagggcattcgatactgtttatgatttccatatatgtatagtgcctatcccatgctgtagtcactgttatgttaaatccagaagttacactagagccagcgatactttatttgtagacaatcaatttgaatccatatgttattactggcagatgatacatgattacagttctgaatctgtaacacttacaaaaggaaacccagagcagcttgatgagtttttgtttctgcttcgttcctgggagtcagtagaaacagcagttgtatgtggttatgttagtctcaagatacttaatttgttgaccttacttcagaaaaattttgtatgtattatatttgtgggaaggtaaaataatcatttgagatttttatcaaatatgaagattagttatttatgaaaaacaaagaaatgtctatttttctttgttcccaattaatgtagataaattttaaaatgcattaaagtaatggtaaagacaataaaaagatgctgtagaagtctttttctcctcatgtttttatagagagacattgctttctaagagtattcgaggagataatacggattctaacttcataatcaggtttttcagatgtacttaaaatataagcagcaaaaattttattagtaagtaaaatcaagcaaattccaatcaccagaaacagaactagttaagaaacatgttttacttgaatatctttcctaggtctcactcctgccgatcc

SEQ ID NO: 98431 - DNA, 5503 bp, Homo sapiens
cggcgggcattagaagcaggtgacccgggcggggcgggagagggcagccagcctgcggccgtgagtccgctgtggtcgccgccgcgcgcggttccgtgctcgccagaggtgggcgaaagggtgcgagagcgcgggggaggagccgagcagggcacgtcccgagagcgtcgccaccgcccccaggagtccactggagcgcggagccccctgcaggggaggaggcgagcggcgggcgggacgcggcggccggcgctcaccatgcagtcccggcctggccagcgccggctgctcgcggtgctgtgaggcggcggggtcccacggcccccgcctcccgccttcctcccgcccaggtgctgccaggcgcgctcgccctccgtccggctcccggccccggggagaacgcacggcctgcccctgcccggctccgtctggatcatgcggggggctcccgaggaggagagggcgagtgaccggcctgcgccgcccctgttctgggggcgccccccactctgagtcgcccccacctgctgccatgtgccgctgccacgggtacccagcctgtcgctaaactttccgggcgccagcccggctctgagtcgcgcttctcagcggagtgacccagggacggaggacccaggctggctggggactgtctgctcttctcggcgggatccgtggaggtgagaaccttccctttctccctgttcttctcccgtttcctgtgcccttttccgggaagctgagggttctggtctccgggcactgcctgaagggcccagcttggaaagagagggtgggggagtcggtagtttggttacaggaggcggagcggggaggaaaggaaaggggttaacttaagagatttggagacagctcgcggggaccgaactgttgacgcctctccaacagggagtggttgcaatctttcttctcccccttcttttttaaagagtcctttccctggaatccgagccctaaccgtctctccccagccctatccggcgaggagcggagcgctgccagcggaggcagcgccttcccgaagcagtttatctttggacggttttctttaaaggaaaaagcaaccaacaggttgccagccccggcgccacacacgagacgccggagggagaagccccggcccggattcctctgcctgtgtgcgtccctcgcgggctgctggaggcgaggggagggagggggcgatggctcggcctgacccatccgcgccgccctcgctgttgctgctgctcctagcgcagctggtgggccgggcggccgccgcgtccaaggccccggtgtgccaggaaatcacggtgcccatgtgccgcggcatcggctacaacctgacgcacatgcccaaccagttcaaccacgacacgcaggacgaggcgggcctggaggtgcaccagttctggccgctggtggagatccaatgctcgccggacctgcgcttcttcctatgctctatgtacacgcccatctgtctgcccgactaccacaagccgctgccgccctgccgctcggtgtgcgagcgcgccaaggccggctgctcgccgctgatgcgccagtacggcttcgcctggcccgagcgcatgagctgcgaccgcctcccggtgctgggccgcgacgccgaggtcctctgcatggattacaaccgcagcgaggccaccacggcgccccccaggcctttcccagccaagcccacccttccaggcccgccaggggcgccggcctcggggggcgaatgccccgctgggggcccgttcgtgtgcaagtgtcgcgagcccttcgtgcccattctgaaggagtcacacccgctctacaacaaggtgcggacgggccaggtgcccaactgcgcggtaccctgctaccagccgtccttcagtgccgacgagcgcacgttcgccaccttctggataggcctgtggtcggtgctgtgcttcatctccacgtccaccacagtggccaccttcctcatcgacatggaacgcttccgctatcctgagcgccccatcatcttcctgtcagcctgctacctgtgcgtgtcgctgggcttcctggtgcgtctggtcgtgggccatgccagcgtggcctgcagccgcgagcacaaccacatccactacgagaccacgggccctgcactgtgcaccatcgtcttcctcctggtctacttcttcggcatggccagctccatctggtgggtcatcctgtcgctcacctggttcctggccgccggcatgaagtggggcaacgaggccatcgcgggctacgcgcagtacttccacctggctgcgtggctcatccccagcgtcaagtccatcacggcactggcgctgagctccgtggacggggacccagtggccggcatctgctacgtgggcaaccagaacctgaactcgctgcgcggcttcgtgctgggcccgctggtgctctacctgctggtgggcacgctcttcctgctggcgggcttcgtgtcgctcttccgcatccgcagcgtcatcaagcagggcggcaccaagacggacaagctggagaagctcatgatccgcatcggcatcttcacgctgctctacacggtccccgccagcattgtggtggcctgctacctgtacgagcagcactaccgcgagagctgggaggcggcgctcacctgcgcctgcccgggccacgacaccggccagccgcgcgccaagcccgagtactgggtgctcatgctcaagtacttcatgtgcctggtggtgggcatcacgtcgggcgtctggatctggtcgggcaagacggtggagtcgtggcggcgtttcaccagccgctgctgctgccgcccgcggcgcggccacaagagcgggggcgccatggccgcaggggactaccccgaggcgagcgccgcgctcacaggcaggaccgggccgccgggccccgccgccacctaccacaagcaggtgtccctgtcgcacgtgtaggaggctgccgccgagggactcggccggagagctgaggggaggggggcgttttgtttggtagttttgccaaggtcacttccgtttaccttcatggtgctgttgccccctcccgcggcgacttggagagagggaagaggggcgttttcgaggaagaacctgtcccaggtcttctccaaggggcccagctcacgtgtattctattttgcgtttcttactgccttctttatgggaaccctctttttaatttatatgtatttttcttaatttgtaactttgttgcattttggcaacaatttacctttgctttgggggctttacaatcctaaggttggcgttgtaatgaagttccacttggttcaggtttctttgaactgtgtggtctcaattgggaaaatatatttcctatacgtgtgtctttaaaaaaaaatgtgaacagtgaacgtttcggttgctgtgactgggaagttgttgggtgtgctttttcagccagcttctccttccactgcttaaagtgtccatgattctttaaggtgagctgcagtttatagccccaggtcatacctaggaggggagcataatgagctcagggcctccccaaagtgacaaggttagggagtgcttagcggttttgtgttcagccttagctttgtttatagagggaggttcagtttcttttctgtagtgcttgtaataattctcactcctaacagcaccatcgttgtgtcttgaataagttagaggtagcattatagaggatctggcataaatatttgcagtagtgagagcctaagcgatggtgattggtggagcttgaattttaggctggtgagatggcagctttgtgcctgagaggtagtgggtggttcttaagcttcagtgatcccctttttttttttttttttttttttttaaggaacttgtgttataattttggtaaaagtataaacccactccctctggacaatacttagcgacagttgctaaagggggctcctttttaaatgtaaggactgaaatggatatacttctaataagtaaatttccaacacttatttgctccaccccctcccccctcccccctccccctttatcatgttaaacagcctttttgcttttcttattcctcctctcctggagagctgtgattagaaaccacacccacccttgaatgaagtgcttgaactgggggagggaggctggctacctgtgaacaaacattggcccaaataagggaaaataagtgttcctggactttggactagtttatagccagatattccaagagcagcaagacgttgctctctgccgtctctgaaaacaaaagagatgcataacatgcttgcacaaccttttaaaatatagatcagtatagtgctacctctatagttttcttcctcttctgagaaagcctgtatattgatgatcacacacacacacactttgcaattagagaatttggtttgctttactaatctgtttaactattccttcattcattatgaacgcttatattgatgaacatacacacagaggtttctttgctattagaaaattctgtttgctttcctaatctgtttaagcattcattcatgaagagtgtggggccattactggggaaggggggtgacagtgcctcagccagcaaaataccaatgaccaggattggggactaaatttaggaagctaaaatggccagagcaattaacatttgagaaaatcctgtctaggaaaacaacttgagtgtaggcatttgtaattcacttataccaaagttggaaaagtaaaatttaagcctaggacaatttttacttcatggatgttaaatagacaaatgcatagttcccagggggaatttaaacactttactggtgggaagaaacctagtattaaagttgtaaggactctcaaaaacttcacatttattaaaatgcactgctcttacccaatttatcctctgaattaaaatttcagtggattctacaaaacctcgtacaaatagctacagaactttgtgcctattttattcctctatttattcttctaggaagaagcctcttcctagaatcttgaaatagatcccttgactgaatgccaattcctctcctgtttttcaaatgagagaaccttttctgatcaccttgaccttttccctcatttcatatgtcttcccagaaagtagacagactgctctgctgccttcagtcattgtgcctcatttgggttgtccctccttctttgtggagaaatctggaaatgatgcacagtgtatccaaaagttgtgggatgaagtggatgaaagtgatttaattcatttttagaatttttttttgttttgttttagcaacatgctgaacaactaatttactttaaaaataagccagttaaaacaaaggacgctaagcccaagtggggggcaatattagtcaggatctttggggtctaattccagaccaactttcagaagcacttctttgtctctgttctcacctctgctgtccctctcttccctcatcccctaagagagacaaagataaaagccc

SEQ ID NO: 98432 - DNA, 1047 bp, Homo sapiens
ctggagtgcaatggtgagatctcggctcaccgcaaactccgcctcccggtttcaagcaattctcctgcctcagcctcccgagtagctgagattacaggcatgtgccaccacgcctggctaattttgtacccaggatgacccatggttgttcctaggcactgactccagctgggaggggcagctggggatggggcagccatccggaaatgagaagaccagagttctaatccacatcccgtcaacaagtgacaatgggcaggtagctccagtcctgggagagcctgagtgcgttcatgtgtaaaaggctcgttatgcacaccttcaggcattgtaatgaggattaggagagagattttatcaaaagggaggagtcctggcactgaatacacaccggtttccctttttgtctggtagtggaggagggcacgttcacttccttttcacccctctctgctgtgttgtggaattgccctgtgctcttggcagacacctcattgcacaccggctccctcaccaccaccactccccgcaaaaggggcacgtcctgattccaccaggaaatgaaaagtgaaaccttctgataatgacccctggaatgtcacaaatatccaagtcaggaaatgcaaatccaggggaggggttattgaagcgacaatgatttagcttcctctaaatgctgtatttccagggctggagaggagagggggcattctttggctctccttagatttactctgttttccaaagagttttggaaagtccaaagggtcttggaaaacagaataaggggattcctgaaagagttcctggcaaggggtttgtggcaagtgtggcatcagcccttcccactgtccctgcaccattggcctttgtcctgtgtgggtaatgggaacccaaagactccagagcttgcaaaggaggcacaagaaatctcaacaggaggcagctggctgcacgtacactctccaagctggggcctggcatcaagttcaccacctacatagctctcagagccccagcgcctctctgtcccatggagagtgggac

SEQ ID NO: 98433 - DNA, 1038 bp, Homo sapiens
tttttacttctcctagtaaatagagatgtgtataatttttgcccattttatttcttgagttgtctgcaccacttcttttcttactctgaaataatgtgaaaacgtgaagttggagcaagaccttgaaagagcctccctcctttgcgtgacctgaatcggtagcggcactctctgtttcccctgcctccgtgtcacttgttagtgatgggcattaggagcttcatatgttgcacaccttgtatcactcttccgaccctgagtcaggtagagctgtctgctcgaggtcgaatccagtgatgggtgactaagctctgctcggttaatgtaaacagacaagtgttgatttctgtcatgtggaacggtgtttcgacagttaagtctagcacccagtagtctccttattggtagacgattctaatttcattggattcaaaaatctctgactcaagggtctttccttagtgcgttttaatgggtgcatggctgagggaaaatccaagtcattgttaaactctaggtaaaagacaagagtatgggataccctcctaaccataccggtagttgtcagttttatttaaagtgggttccacttggccaggattggtggctcacgcctgtaatcccagccctttgggaggccaaggcaggcagatcacttgaggtcaggagtttgagaccagccgggccaaaaatggtgaaatcaggtctatactaaaaataaaaaaattaggctgaacgtagtggctcatgcctgtaatcccaacactttgaaggccgaggtgggtgaatcacttgaggtcaggagtttgaggccagcctggccaacatggtgaaacccccctctttactaaaaatacaaaaattagctgagtgttttggtggatgcctataatcccagctacttgggagactgaggcaggagaattgcttgaacctgggaggcagaggttgcagtgagccgagattgcgccactgcactccagcctgggcgacagagcaagactccgtctcaaaaaaaaaaaaaaaagtaagttccaa

SEQ ID NO: 98434 - DNA, 2892 bp, Homo sapiens
ttcccatttgtgtcttgctggcttcagtcttgctcatcatatccatggttgacttttgcaggtgtgaaagctgtggagccgttttccattctgaatgcaaagaaaagtctgtcccctgcccgaggtgtgttcgccgagagctgcagaagaagcagaagtctttctggcagagactgaacatggacgagagtctagaggaggcttgcaccatgttcgagctgtcctaccagaacacctgactccagccgacccgaaggccagggattcaccaatcaacaatccatcagccccagagcggcctcctaactagccagttagacccctttggaagaagagtatgtatcctcttcaactagatatagatatatatatttatttatatatacgcaaatacctatacgtcctgtacgtatgctctgtgtacatcattgtccagacgatccacagaacctctgtggctcgagaaactaccaatagctggattacacttagccaagaatttcagctgcttgctcccagacaaaacgtggtatacacaatgctttatagttcagactttttttttctctctgtctctcggtacattttattacccaagacacaaaaggaagcatttcctgcacaaaacagtgctttaggttatttttgtgttatttatttttagccttcacagaggctgaggtaactgaggcaggcacccatcatcatctgtttcataagaaaaccttcaaaacacaagagactgctgggtccttccaggacctggtgtccgtggcgctcccgcctcagttcctcctgtggaggcggggaatcacgtaagcagagccgatggctggaaacaggagccaagccccctctgacagaaagcatacacccctcatttatgaggagggctggttctggttttgaagttaatctcagaagtttttttcctgagaagagaagaaacctctgcgaccaataactgcgtgttgtcggtctgtttttcggtactaatcccatcacccacctaatgatgtgacgctccaccgtgttttccaggctgtacacatggctttcttaacagttttcaacgggtgcccatggttgatatttatgatttttttcatgatgctggccggaggaaatgtcctggggtggttgttaaagacatcgtcgtgtagactggtagataaggctatctagtaagtatattcccaaagagggtcgttttagtttcttttctcagaatcctgtggaggcagttcctacctattcattttaagtgctttatttctcgttgttcttcctgcactttcatttcgacctttgtcaatgtgaccattcttgctttctcatttttttgtttaaaaaatcagagtaatgtggaacttcaaaataccaactttggactattaagaaaatacaaacttacaagtataattaatgaattagatctaatattatttaaataaatatatatatatacacacacatatataattgccaccttgaagtaaaacaaagagtgctaaaataaataataggagtaagaaagagatctgctttgctatttggcaggtagtgttctccagctgcagtgcccttggaagagcacgtggcagtcactgtgaccaaaacggcaggtaggacagccctgggaccctgacagctcccattccttccccttaactctccctagagcaagaaaaatatgtttataatggaacagttctcagtagactttatgagaagattctgtagctttcgcgctgagcagatgccttctatgtcttcatggtttagtagttttgctgctattaggatcagtggctcacaacatacttggtacattcaaccccattgctcctttcccccacacgccgcttccccaagaccccaactcatgatacttccatccatctagagatgtgacatttcagactgacttttgtgcagttagatgtaagcattttacctctcaacccacaccagttcctttggccccaggccacacatttcaccttaatagctcaacaccatacatgcatttattttctgactatacagtagccgcaaccaaggcttgaaaacttgttaaaaggccagggccctattcatgagacgcctgacggtgccttttacccttagaaaagcaggttgacttttcccccactctagttaaagagaatgttgcacacaaaagaaaaagggtggaaaatctcaaacacttggcaacaggcaaacaaatttgatcatctcctttcctcctcctcttggtaaaatacagtatttatattttccagcctcagagaagatagcagaacatgatctttcacaagagaattatagacctgcttattataaaacagatgtgctcccatggcaaagtgccttctccctccgcccccagctccctgtcactgtagcttacttttgccttcgctgtaattaatgtatccgtgattccaactgtcagcgaggccattcctagcacactgcatttggagacctgaagtgcagtgccatctcctccccttgtaacatgtttgccctgcatacagaatttcctctcctagctcacaggcacccagggtcatacctgccgagagtcaagggcgaaattctggatccccgttcaaaacatctttgttttcaccagtccccatttagagggccctgctaaatacgagcagtccctgtgaactcctaaggaggactttccacccacatcattttctgcttattttcaaaagggaaacaaaaaatcgatgtgttatcaccatcagctacccagagctgggtccatgtccagcactcctgtttcctctccttttcgtaccaccctgacagcttggtcggtgccagccacaggcctatgacattctctgccaccaccaccaaaatctgata

SEQ ID NO: 98435 - DNA, 1043 bp, Homo sapiens
ccccagatggaatttgacccttcttcagctctgactgcccactcttaaatgtgtttattgtgtcaatgacagttttctttaatgaaaactcttcagcacaatgctagtttttctggattttaaactttagtcaaagagtaacttggtaaataacatttcaccttggcctggtggcttctgtattcacatgtcaaaatgtttcagaatgtctgctaacataactgagacttctgtgaaaacctcagggctgacctgaccctttatgccattaagccacttgataaatatggtgcatttataaacacagtcctagctgctgaagccaccattgtgttttgaggccatttggtcacttgaatagatggctgtcacctagacacatttcttaccaagcttctagttaggtatctggttaatattgtattgatcatcttagctttaagcatttcagacagcttaattttttgctgtttaaagaggaattgttcatcgtttaactcattttaactttctaactataaaactaattgatatttattatagaaaatttgaaaagtacagaaaattaaagaaaatattctccattatttctccatttttctacacatatgtatttttaaatagttagaatcatattgaatatataattttatatccagcattttttatcacattgtatcagaaccagaaaaatagtcacatttaatctataaacttatattaatgggtacttttaaagaaaaaaaaaatttttttttttttgagacaggatctggctctgtcatccaggctggagtgcagtggcaccatcttggctttctgcaacctctgcctcccaggctcaaacgatcctctcacctcagcctgccgagtagctgggactacaggtgctctccaccacgcccagataatttttgtatttttttttgtagagatggggtttcaccatgttgcccaggctggaggaaaaaaattttaattggctctaaaatcattaagatccatcgaataaacacaggcaggccagtccataaaaagatcac

SEQ ID NO: 98436 - DNA, 1048 bp, Homo sapiens
cagaatccacaggctgttttttcctaacttcccatgaactcacctggccaaggccactagacttcactctacccacctattaaatgaactgagaaatgaccctagaaacaaaatgcaacctttcatggttgtctggccaggcaaatgcaactgaactatatgggaaattatttcacaatgtgtgacaatgttgattcttccatttcgtcaagccagcctgttcctagtgagtggcaggtgaccgttcactgtgaattgggtcttttggttagactttcagagacggagttgtttgtcaagtgcagcagccctcttcaccaaagcattcccgacagtcgctccaaatctagatgttacacaatggctaaggaagcttgttttgaaatggaaggtaaattgacaaatcagagggaaggaattagccaatgcataaggaaatttgatgagaaagagctttttcctctcttttttcttgcccaggttactagttctctgtcttctccgccccccataaattttgaattttgtggtggtgctgagggagtgaaggtaaccaacataaaagaatcatttgtgcccttttcccaatcccacagatctctattggctgcagaccttgaacatgacactgcaatttcctggtgccacacatgagtaataagcagctgtttctgaaactgtggtttggggaaggcagcactaggttattttttaacttaattgtaatttttgattggtctgcaagaaagtaaatcaaataaagtctgttgtcttagtctgcaagaaagccataggcctcaaattccaatgctgaccatcttgaccagaatagaagagggaggcaaaatgtgtgtatccctgagctggaagttcaaccaggcagatttcatgggcttctttcacacaagaagggtaagcatatttgacatatttgtcagggactggatggtggaaagtgatatttggcagttccttgagttctagaagtacctaaaatgatggtgaaaagaatttatagacagactgcaaaggtggaaaaatagcaaaa

SEQ ID NO: 98437 - DNA, 1034 bp, Homo sapiens
ttgtatgtttattactacatcaatttgcgtttttttttttttcttttagacagagtctcactctgtcgcccaggctagagtgcagtggcacgatctcagctcactgcaaccttcgccccctgggttcaagtgattcctgtgcctcagcctccccagtagctgggattataggcacatgccaccacgcccagctaatttttgtgtttttagtagagatggggttttgccatgttggccaggctggtctcgaactcctggcctcaagtgatcctcccaccttggcctccctaagtgctgagattgcaggtgtgagccaccatgcccggcctgaattgtttgattatatcttttgtccatttgggagcaggctaattttttagttaaacaattaacttatgttataatcttaaatacaagtaagattgagtgatgacaaccaaatgctgccagaacttgtcaggaagcaattacagagccacttcctgacaagttgagagacttgtgtagattgtacattaatattcacttttgatgtacagaaggagctgaacatgtaccaaatgttcaaatgttagggtatttttttttaccctgcataatcaacaagaatgtcagctattccaataataaaatgcttttcacaatcaatttaaaaattgcccattttggcctttctggcagcccacagaatccaccctccgttgtcctcttgtttagagagctggctagctcattcctcaggaatgacccatgtcccaggagctcaggaatcacacatcccctagaggttattctgaagtccatgtggtgctctagtggcagcaacttctccatttgccctctgtgttcctgccattaggccataacccggtctggtcaaagacttgccattttgtttggacaaagttgcaatttaaatgtttggatccagagcttgcagtaggaatgttccagaaatacttagtttagctttttgaatgcaaaggttgaatgcacttggaaaggcctagaatagaaattaagcaagagcactt

SEQ ID NO: 98438 - DNA, 1043 bp, Homo sapiens
gtgtgtgtatgaagaaaagcaggataaggcagacaacattcatcaagaaagaatagtttgtgtttgatgcacaattcaatagcaaagctgaggtcctgcctgaaagagcagagcaagcaaggatggtaacttcacccactcagaggagaagcagcctagcaatgaaaaggtctgtggagaaaaatggaggattgtgacatcaaaaaggaacagcaggaaaaggaacaccttgagatgctggaggaaggaagagccagaactgggtggagaggaaagggaggtggtaaagatgtcaccgagaagcctgttgcagagatggaagaaactgtcctacattgaatggacagggactgagaaagacagatatttttataatgcagatctttctgaatgagaccaccatcaacataggcccagtatagggtctagagattgccataaatttccaatataaccttatcttgtagttcaattagccaaatacgtacttgtccactatctcctgccctaaccttgaccaacttctactaaattaatgccctctctttctacttgactgccctggcagtgctgttgttctctgtgtactaaatatagttccagggacaaaagggatgagacacatgaaaggcaacaagcttagatatgttaatatatgtcttttttgttcaggaccaactaatccatcttaggagtcccctagaactactgctttctgatgttagcatatttatttgattgtttactgatgagtaagtcctcccttactgtatttcataacatgaattaaattataacatgtgttgccactctgacaattaaatcctatgttaattctgttgtttactccaaatagatgagacactgatttcataatttaacagctaatacatttgggcagccttgtttacctaaatagtgacttacagttaagatcctaaaatcctttctctgtggtgtgatatttttgtgtcaaatgcattgtgtactatgccctaaaggcaataatatatcattcagacttgctgttggtcaagtaaatg

SEQ ID NO: 98439 - DNA, 1118 bp, Homo sapiens
ggaatacagttaggaggaaatcaccagcccctcatacccaggctctagaagggctcaccttgaagggtgtcctcagtttcgaggccagggagcccaagagggtaccattttatgtttcttgccaggactgtgttatgccttccccaaataaaatgtcacctgagttacttagttctcaggcgtgcttgcaagagcctttaaaaataatccataagtgaaagattcagccttgaaagcaagtcttgatcttatccatcctggaccccaatcctaggagcagtgcctgggcaagaaaaagtgcctcataaatatggggtgaatgaatgaatcagttataggaagaggtggtgagggtaagaatgaactaaaagggggctatctgttcattcaaactatgttattgcataagtgagcatttgtgaactgaaaacctctttggtttttttctttaggactgctcggtcccgagttcaagtaaacaattgactttcaagtaaatctttaaataaccctggtctattggttaacttcagcatggcctctgaaaagcagtttagcataatagttgtgggcagagagtctggagccagacagcttgagtttgtatcttgccggcaccccttacctgctgtgtgaccttaagaaatttatttaaacttatgcctcagtttccttttctgcaaaatgaggacaattaaactccctgcctcacaaggttgtgaggttaagtgagttacaaatatgtacaatgcttagaagagtttggcatatagtgaatgccccatgagggctgcaattcaaaatcccttaacaagagtcacttgatttacaactgtaatgaggctttatcccacccccatgaccacagattctttgtctccgttttttattctgaccagcagttaaaactatccctggatagcaagaacaccttgagtgatgttagaaactatctgaaatgttacaaagggtgtttcctacatgaacaatttgacatttatttcacatccaccaccactactaatcttttttagtttaagtagcctcaatttttccatctctgacatggataacaatttatttcacattactgataagaaaactaataaaatatttat

SEQ ID NO: 98440 - DNA, 1003 bp, Homo sapiens
aatttcctttttgcttttttgattatttatttttaagaccaggactctctctgtcacccaggctggaatgtagtgcatgatcccagctcactgcagcctcgacttcccaggctcaagcagtgctcccacctcagtctctcatgtagctgaaactacaggtgtgcgccaccacacccagctaattttttttatttttagtagagacaaggtctcgctgtgtttcgcaggctggtctcgaactcctgagctcaagtgatcctcccacctcggcctcccaaagtgctgggattacaggtgtgagccactgcacctggccttgctttttgtttttgttttgtttttcaaaattttcaggttagcacactctgtatctgtagctatgactgacctgtgtcagtgtgtggttttgtatttatagctggcctgattccaaaaaggacttttgagagagagcttctctctttctctctctctctgtcatgcatatatatgtgtgtgtatttataactgtgactaattttaattcctatccccttccattggtttgaattattgacatatacacttgtcaaagatgagtctttgctacccaggatcccgcatgtctggagttctgctagcatccatcccctagtttatggttaaaaaacccaacttctaaaattgccatcagcctaaaggttcccttcagccacgcaaaagatagcaaaaatctctgatgcagctgacattttaggtgtgtgtataatttaacaaattgttgaccactcagcttttagtcagtggtcacaaaaggaattagcagccctcccctgctcccccaaaacccaaagaaggaagggtgttccttggctttggcccagaggcctgctggcacgcagtgtcaaacagcagcacaatggtacattttggccacaaaaggctttggggtggcagaaagggccaaaatagttgtggcataagttggctgggatattaagtaaatctgagtttaatttaacat

SEQ ID NO: 98441 - DNA, 1048 bp, Homo sapiens
tgctcttcccgttttccaagagaagccggaaatctgtatttttatgtgaaatttctcaatatttaaacactctgcaggccaaacaaaacacagccaccagttttgacctctgctttataatagagaatgcctgcttttgttccgtcaaactaatgaatgctgaattacgagaaggaatttggaggttagtgttagattgtgctcctcaaaaggcggcagaccccatcccaaacccttgagatactaattggcagacttgcacaggctgacagctggactctgaaagtggacacacacaaggaaacagccaagctattccaggtcactttgcaaggtcagggcagcaatgcaaacattaggaaggctgaagacaaaggtcaggtggcagcaaggaagccctacattcccttaagctgttggttgataaatcatattctaaaggtatcaccagactccctcaccctgacattgctttgtgaggtagaaaattaaatagaaatcaaaattaagatggctgtcaggagcttttaggaggccagcacgccagtgtgaggtgaacatgggatggagtttctgcctggagcaaaggtctcctaagggatgatgatatccaacattgggcattgcagaggtgctggccgctgcagcggtcacacactgcagctttggaggctgcctgtctatgttcaaatgccgactcaccccagaaatattaggtgaccttgggcaagtcacttctctttgtgccttaagcacttcatctctgaagtgagaataatagtacctgcccccgaaggttgttgtgaggccttagagttagtatgcataaagcacttagaactttgcctgacacttaagggcttaggagataggcactttactaggggtagagtattgctattagtgttgctgtgaggtgtggaccttgtataaacggctcctgggagttttcttcagcgtcatcaagacactgcatctgtggacactaaaccacaaccattgccacaaaagcaatgcttgctatgtctcagttttccccctcatgttc

SEQ ID NO: 98442 - DNA, 1769 bp, Homo sapiens
agaaagatatttggagacatcacattaaaccaccctcattctgctgtgaagaagctgaagccaggtgggcatgtggggacttgccagagatcacacagcttattacggacacagctggtacaagaaaactgatgttctggtcctcagacctgggccaccacgcagtgcttatagcacttaagattacattagaagtcaaagatcaaacttttacctccattctggtgtctgtgttgggaagaaaaatatctgagaaaaagatattacaggttcctcagagggcttaggagaagtataggtggaaagtggacagggcagaggaaaggaattcttgaatgagactgaaacttatcagaaaaatgtgtgttatggcagcaccacagttcacttgtctatctgcccttgttttcagaattttccccagagaatacctccttcaacagatccacctgtattcacttgccgacctgcagcaggtaagtgctcagaggggctgtttcatttttgttgctttcctggagaagtctctttgttgactttggtctttgcaccgtattctgccatcattggggtagttttcatcagaaaccctgataattctttttcagaatggggggaaaacttagtataaaaagatatatgggacaataacaaatgttggcaaggatgcagagaaactggggctcttatacattgctgatgggatgcaaagtacgttagccactttggaacagttaaaaagttaaacatagagttaccatatgacccaacaattttactcctaggtatatacccaagagagttgaaaacatatgtccatagaaaaacctgtacacaaatgttcagagcagcattattcataatagcaaaaaagtggaaacaacccaaatgttcatcagctaatgaatggatgaacaaaatgtgttgtagccatataataaaatattattctgccatagaaagaagtgaagtactgatgcatgctacaatatggataaatcttgaaaacactatgctaagtaaaagaagccaaacagaaaagaatacatactgtatgcttctatttacatgaaatgtttagaataggcaaatccatcgtgacagaaagtacgttagtgattgccagggcctggggagagcgaagaaatgaggagtgcctgctcatggataaagagtttctttggaggcttaatgaaagtgttctggaattaaacagcagtgatggttatacagtcttgtgaatattctgaaaaccactaaattgtttactttaaaagagtaaattttatggtgtgtgaattttcccaattaaaaatttgtatgaaaagatgtaaaaggcattgaatgtgttaagcccttgacttgtgctcaagccagaaagttgaatggcttttaaagtttagtaaaacataacagagcatgtaagagttgaaatcatccttttatacttttattagaacatgtacttttttttttcctttcgtttgtgagacagagtcttgctctgtcgcccaggctggagtgcagtggcatggtcttggctcgctgcaccctctgcctcccgggttcaagcgattctcctgcctcagcctcccgagtagctgggattacaggcatgtgccaccatgcccagctaatttttgtatttttagtagagatggggtttcaccatgttggccaggctggtctcgaactcctgacctcaagtgatccgcccaccttggcctcctaaagtgctggtattacagacgtgagctaccacgcctggc

SEQ ID NO: 98443 - DNA, 1063 bp, Homo sapiens
tatcatacactgctccctttaagtcccactgaaagactgccctagttttcctttcctgcagataagtttgggcccttggatcttggaacagcaaaaggacattagtgaaaccactggtgaaacctgaataaagtctataatttgcataatgtcgatttcttatttttgatcaatatgccatggttatgtaagatgtaagcattaggggaagctggataaagggtatgaaggtaaggacattttacaaatacagagaaatgttaggaactgtggaagtacatgtgaacattctggttattttcaaaaacatagttttcaaaatataatgagaaaattgcagactaccaaagtacacttttagatagttctagattgtaggtaaacaaagtaaaaacaaacaaccctcatctgggttcagcccccttcccattcaggtttttcctcactccattccctccattcccatggcttcagctgtctgctctgtgctcccatcagaagtgccctgggtcttctacatctcaggcccaggtccatgcttgctgttccccacacaggcactggatattcagcacataggaagctcaattttttattccctcccctggaagcctgccctcagttggccaatggcatcaccattctcatccccaggctctatacttcagggtcatcttagagtcccttctcctttttcacttattcccaatgttctcaattcttccaaaaagtctctggtatctacccactcattcctttcactgtccgcttgtctgccctagaacagactctcacatgccttgtcacctgtctgtagtctctccaccctccctgctgccttcagaggcacatcagtgtggcgttcctgcttcaaaaagcatcagtggctctatactgctaccggcctaaactacagtaataaacatccatccagaagagacatgcatgatattactaaattagatgatcagctcaaacctacctccctcctttccctacccccagccccaagaaattagaaggagcataggcctttggagtcagaaagtcctggccttgaaac

SEQ ID NO: 98444 - DNA, 1117 bp, Homo sapiens
tgtgctcgttggcaagcttgatcagccgtggagaaccaggcatgacaattgggttagtgctagcaaatgcatttactccaggtcagcatttgccagaccctcctatgtcccagacctgtaaacttaaaacaaaaatacgaagttaactatagggttgccttgtaaatatctttagccaaaacagaaataaaaacattaccctctatttctcaccatcatttcacgtaagaacatagtaatactaaaaaaaaaaaaaaaataggcaaactgctttagaaatcaaacagctttttaaaatcaagtagatttagaaatcattctacatttttttttctctcattttactttggactgctaaaaacatcagcagactgacaccagctgtttggactagcttttcagaaatcccagttcaagtcatattttctcttctgagtgctgaagtgaaatccactcctgggaaatttctgtggatgcttcagtatttcccattctcaatcatcaaaaatgtgatttgggggcttggggtgcctggcaaatccatagcccattacggtataaatgtaaaactcgtctctctccagcactagtcaagggcagtaggcaatattaggcctctttccctggttgcttagaacagaattgtgttctcagggagcatttgctcctacatgtttgtcaggtttagtccttgacttagaccattccgaagcaatttaatggcttggcttgagaggctcaagagaatacccaaagtgattcttctaccttctaagccatctcttcctatctttggtgtcacattttatttcaaattatgattatatccagcaggagttcccactgaaatatcagttttaccgaatggtgagaaatttctattataaagattgccacttttattaaaactgtcctggtgaataccagaaaaaaatgtgtgtgtgcgtgtgtgtgtgtgtctgtcctgacagactctcattgcttccccttccttcaagcaaaatttagcagcttactctgctcttagaccagtccccatcaatgtcacttgatttaacaagactgccttccccctccttcccttgttatgccagaaaataactatctttctagtgag

SEQ ID NO: 98445 - DNA, 1027 bp, Homo sapiens
tttgcagtcttaagtttctaggccaggaaataattttaaataaaaataaatgtataagaagaatatgaatacatactaaagcagtaatgcgagtctatggaagaagaatgttatataatttgtgttttaaactatttcatatcctaaaattcaaagagatttgatcactttatataagtaggccctttgattttataggatataaatttgcttttttgatttattcctggtattctcatcatagaagtcacatgttggtctttgatatgtttcagaagaataaaatcattttgaatttcagaagatatagatcttttgatggaccttcctgaacttcataggccatagctgtgctgtcgtttttttttttttaagccgttcatttctcctagtctttgttgctatactttggtctggaaagttcttgtccctttttgtagcttcctttttggttaacattgttctcatcatgtgttcatttccggcgtaacttctaaagagagtgttaatgtaccattggattccacattgacttcaaagtttttatttactgacctttcactgggagagaaactggtgtaggtacagttttaagataaacttgggcaggttaagattctccttaatttctagctaagttccttgaaaaactaagcttttcatggacctaagaataaaagctacttgagagtttctaaaatctattatactccctgaagacagaaacatacttaagtgaaaaacttgccattttaaaatatatccactaggtaaggaaatctagtaatatagcagtaccaacttatttcttgcattaatattttcatctaatcatttgtacattcagcaaacttggaccacacacagtcccagaaattgaggtgtgggggtaaagtacaggttaattttgcagtaggataaatgcctgtatgtatggctatccatctttataccttgaaatatgttaacataaaaaagttttaattaaattacagtaataaaaacccaaagagcgtgaaactccctc

SEQ ID NO: 98446 - DNA, 1562 bp, Homo sapiens
tggagtacagtggcatgattatggctcactgcagctccaacctccaggctgaagtgatcctcctacctcagcctcctgagtagctagggctacaggcatgtgccaccatgcccagctaattttttaattttttatagagacgggctctcactatgttgcctaggttggtcttgaactcctgggctcaagcaatccctcccaccttggcctcccaaaatgctgggattagaagtgtgtgccaccgcacccagcctcctagttacagtttttagactcgagatttccccggctatttcttgccagttaggtaccatcgtgggattctactacttttattttgtttaatttgaaccagaagactgtcagtccctgatctgtgtggtttcttgtgccctgatctgtgtggtttcttgtgcctgccttcttataactaattctaatcaatactttgcctctcttttcctttctagaacacaagcagacattcccaaacattctaaagaagggttacctggagattagaaaggaccatgacagttactggcaaagctgttatgcagaactttcaccttacaacttatacttctacagcctcgacagcagtgggaatcaaaacctttatgccacgtaccagctttcacacttccagagcatatctgttttaggcaacctggaggccaggatggtggatactgttttgtatgacaacactcagctacagctaaaggcagagtcaccatgggaggctttggactggggacagaagctttgggaagtagtgcatgctgctgtgcccggttacatggggcggcagaatgagctgacaatctcaccagggcttggccatcatgatgactatacacagaatcatagtttccagaagaaaaccagtgggctgctgccaccgtcccctgtcctggacagctccaaacagtaccaaaacatcctcaaatcagggactctctacaggctgactgtccaaaacaactggaaggcatttacatttgtgctgagcagggcttaccttatggcttttcagcctggcaagctagacgaggatccactgttgagctacaacgtggacgtgtgtctggctgtccagatggacaacctggatggctgcgactcttgctttcaagtcattttcccccaggatgtccttcgcctccgagctgagacccgacagagggctcaggaatggatggaggctctgaagatagctgccaatgtggcgaggagttcagagcaaaacctgcaagtcacactgaggaacaaacccaaggatcaaatgggtgggcatgaactcaggaagaacaaacgccaatctgtgactaccagcttcctgagcattttgacgactttgtctttggaacgaggactcactgctcagagtttcaaatgtgcaggtatgaagcagattttcagcctatagctcattaaagaacaatcctgaaccccacaattggaattcactttaaaaatccccttaataggctagtcacagctatctcctgtttataaaaagtatctctcctcgagaagcttactgtattaaaacatcc

SEQ ID NO: 98447 - DNA, 1372 bp, Homo sapiens
tgaggattgagcacaaagtcaaggtggaaagaacacagcgtatgtatgagatggtcaggaggctaacctagaacaggggtacattttggagtagtgagctgagactttggaggaccttcaaagccatatgaatagacttactgtgatatatttggcaagaagcaaccacacatgtcttgagactcaagattaaaagggtatttaataagaaatatggaagttggtggggtgaaagtggtgatagggtagcagggaccctccttttcagtggctttatgtgtccatgtaaagggacgtcagctggaatagcactcttggcctccgtccatccctttgcacaccccacccatgagaaggaggagtgacttattggcaagtttaggagaggaaccaggtaattcagctgctgtcctaagagcactaattctggtccgctcccccagatctgctcctccatgccatcagcccttcatgggcagtttcccaggaggggaggcctctggctatccagtgatgcttgtgactcagaggtaagtctctgaaatcctggggttcaatttgctgctacgcaactaagttgcatcctccaactgtctgatgttttgatccccatgtatctgaccaccctctgtctatctcaattggttcaaaagttgggtgaggaaaaggaaggctcttcagtgggtctcctcaggccccaacagtgcatggaatgattggtaggtggaaagaactaagggatggaaaccaatcagaaggtctgccaggcgtcatgatgtgtgatgaggactcagattagtgttgaggactcagattagtgtgatagtggcaataaagagaaagtgggacttgtgaaaaggaaaagaaaggctgtaattggggatagatggaggataatggatgaaggaaagggaaaatctaagtgaaggcccaccatctggaatgctctttaccccttcctgccgtctctgaatatcaattctatcctgtcttcaaagtctacctcagataccacctccttctcaagacttttaagaacttcccaggcaaaagccctctctttcttctcttgcgtgttagaaggctctgagtactttatgctgcatattgcagatactttggggcccatcttttctccactatgggctataaactctgttgacacgatctgtgtctgattggtttggtatctccacagattgtagcaaagtcctttgctgatacagtcaacaatatttatggagctagcctctggtattcaggaaggagagagatatcaaggttcctgttctcaggaggagagagttctttgaaggaaataaagcaagaggtgtgatggagaacgattgaggggctctttaacctgagtgtt

SEQ ID NO: 98448 - DNA, 1045 bp, Homo sapiens
ccagttgtttccatagctctattgctgaagcacccctcttggttgggtgaatgttcatgaagccatttctggaaccagcttaggaggctaaggcctcctggagcctgtgacatggaagctttggaagtggatgatatcagcccagccttagaagttacggaggaattctttagtactttggatagtaatctagaaaaggctgtgcagcaggcagaggtttatgggatccaggaagtccctgaactggtggggcatgaggtactcagtaacataacagacaatggtgctatgagaaatgtcacctccctgggcaaggggggcatgatttgggaccactgtaagagcaggctcttagaaaccaaagctcaaaatgtcttccctgccaaagaacagtttatggtccagagagggacaaccccagataatctttcctggatggaacaaaaggaagcatcaacctttaatttcttcaatatctgtcagcgtcggagggaccggcctcgttctgtaaatgacttactggatgagacctcaactttcaagccagggcatgctcgatcacgatcagatattacccaagtggactggagggtagtcctcaaaaccacgcctttgcagcagcagcaacagcagcagccattgcttcaaggcccgcatgtcaccaggccatcttttctgttgccctcaccaaataagatagaagatgctcaaggaaatactggtatgtttttaaattttatttatttccttttttttttttttctttttggggctgtgactcagataagcttgtatgtttttatatctgacttctactgaatcattgttggtttttcctttgtctctcttaatctggctcatgagaatcttatgctccagcatccacatctgccttgcatatttaagctctctcttccattttcttgtgtactttacagtcttattatcttcctaagaggtatttagtgaaaagacaattacggtaaattctccctttctaatcttgtatgttagaatcggaatactctcatacttaatgtattaa

SEQ ID NO: 98449 - DNA, 1035 bp, Homo sapiens
gactgttgacattccagaaaatgtcgacatcactctgaagggacgcacagttatcgtgaagggccccagaggaggcctgtggagggacttcagtcacatcaatgtagaactcagccttcttaggaagaaagaggctccgggttgacaaatagtgaggtaacaaaaaggaactggctaccgttcagactatttatagtcacacacagaacatgatcaaggatgttacactgggcttctgttacaagatgaggtctgtgtctgctcacttccccgtcaacgttgttatccaggagaatgggtctcttattgaaatctgaaatttcttcggtgaaaaatacatccccagggtttggaggaggtcaggtgttgcttgtttggtatctcaagcccagaaagatgaattaatccttgaaggaaacaacattcagcttgtttcaaattcagctgcttcgattcagcaagccacaacagttaaaaacaaggatatcagaaaaattttggatggtacctatgtctctgaaaaaggaacagttcagcaggctgaagatctaagagttgtccagctacagaaacaagatgctggaagactcctaagacctatttgtgatatttaaatgatgcaataaaagacctttgattttgggaaaaaataggtgtctgaactataaaatgggaagaaaggggtatgtgggagataagtctggaaaggtgaagtgtcagtcaagacacttgcagttgtaaatgtcagaaaccaacacaaactcccttgagataacatgggattaattgataatagaactatagggtctaggaggtgaggttaagctccaagcctgaggagatcctgggactcaagcaaggtcatttgctcttactctcccaccacaccttccaactcccctcacacaaaatcttcatccctcccttggtgttactctcctctctcctgtcaccctccttcccttgttctgcagacaggcattctcacatggtgggaaagatggccatcaggggcctccaattcacatccttcca

SEQ ID NO: 98450 - DNA, 1045 bp, Homo sapiens
gcgtggtggcgcctgtagtcccagctacttggaggctgaggcaggagaatggcatgaacccaggaggcggagcttgcagtgagccgagatcccgccactgcatgcactccagcctgggtgacagagtgagacaccgtctcaaaaaaaaaaagtgtcaggacagtggcaagcaataatataatcgctctcttcatcaccactcatgagaaattcatgctatcatgaaaggaaatgagacatagagagaggacaatttaaatttaaatccaaagcaatacatcagaaattcaaaataatatcctacaagcataatacataactgctaaaaggccaaaaactgatttgctttgggtaggattggttaagagaagtataactttttaatgtaaaaataatttcaaacttagagaaaatttgcaagaataatatacaaagaacccacgtattccttttatacagtcacgaatggttaatgttttgttctgttagctttattatattctgtctttgtctctctgtatatagataaagatatataatttttttctgagccattagaagttatgtatatatactctaccactttactctatgtacctctgtgtgtatttcttaagaacaaagtaattctcttaaataaccatagaatagttatcaacttcagaatatctattattggtacttttatttaatgtactctctatacaccaattttgtcaattgacccaataatgttctttttaagcatttttttccttctgtataagatccagtatgggatcacatattgcatttagttgggaaatataactcaatttccaaatatatcagaataattccatgaaaattcctttgtaattacattaatctaatctatctttgtcagtaagttagtatctgatatttgaccttaacttcctatagacttaaagtaatgtctgtgtccatgttaaattgatgtgcttgataccaaaatcatcttttattctgcaggtcacttagaaaattggaattgtaccatggaacttcataatagattctctgg

SEQ ID NO: 98451 - DNA, 1028 bp, Homo sapiens
aggttttcagacacacagccaaagcacaaagtaggtgtgagattgtaaattggaccaaactgataccagctattttgggagtactttcctgataccgtggttaaaagtctagcctttggagtcaggtgctctgggtttgaatctagagccgactgcttaccagctatgggacatcaggcaagatacttaaactctctgtgccttagtttcctcatctgcaaaatggaagaataatgatatctacctcttaagcttgttggggtgattaactgagattattcatgttaaaaggttagaacagtgcttagcatggagtaaaccccaaataaatactagctattattatcttttcagcatttgaaaaatactatccacaagttaattggctgttactctgttgatgcaaataagcatgttgaggagaaagtttgtattaatttctgtatcccaaatgtttctatccttgatccctctctcagcaataataattttcttttttcctgcttaaagtctcccctgctcctcccctgtccatctgattcctgatttatttgtggtggaattcagagaatggtcggagatggacagggttggaaagaaaggagaaagggaggagggctctttgttcttccagctctgggctctcagctgtaatgtgcaaagtgaagagaaaatttaagaagtcagagagacttctctgatcaacagaataaaagctgagcggggagagaatcagaaaagtggtacagggtgggtgtctgggattctgggatattttagagttttgttgaatgagagatgttagatatgctggaaggctgtaaggtagaaaacggggaagggaactttgagaactgatatactgacttatgattgggtttgcatcaggaaacaagtgacaatttaaattttatttttatttagtttggctgttgtaccatgcatttttaaattgaatctctgaatagactggactacatgaggcttaggatttattcagatttcagaggcaaactgtcttctctgtc

SEQ ID NO: 98452 - DNA, 1009 bp, Homo sapiens
aggatacatttctcggaaggggtcatatttgagctacatgataaaagagaggtaggtgcctctaggcagaaaaggaggaaatggctataaagggaactatgtgaagagtgtctgtgcatgacagggcattctaggaaatgggaaccaagtacaggaacaaaaggccatgtgtgcaagttcacgttcatatacttcacgtgccccatcaatggactgtggacagtgtgtccgttggacagtactcaacaattggactcaaggattctgagttgattaaataggccaaatgctgtgactagcaggtgttcatgccgcagatgatggacagattttaaaagtaggactgttttcctttcaggttccccgagtttcatctctctgcctctccttgcacccctttgccatgttaacagcacccaaagcagcagcatacgcccgcaaacagagtaagcctggttactttcacctgcttagaggaatgtaagtcaaactaggaaattaggaagtaggctcaccaggtaaggtcaaaattgtaatgggaattagatttctatgtctggttgaatttaaaagaaccaggggctcttagggcttgatttccctccattactgaaatcaaggaagtcttgtttctcagatgctttggtgatgggagcaaagcactccaaaagcaaaggatctaaaactgtgagtgggctggctcacactggtaatcccagcactttgggaggctgggctggaaggatctcttgtgtgcccagaagtttgagaccagcctgggaaacttagtgaaacttcatccctacaaaaataagccgggcacagtggctcatgcctgtaatcccagcactttgggaggccgaggcgggcagatcacctgagttcaggagtttgagaccagcctggccaacacggtgaaaccctatctctactaaaaatacaaaaattagctgggtgtggtggtaggcgcctgtaatcccagctactcaggaggctgaggcgagataat

SEQ ID NO: 98453 - DNA, 1844 bp, Homo sapiens
ataggcgtgagccaccaggcccggcctgtcttttgtttttcttaagacactgatagaaataacaacattataactttttttaaggacatgtaacggtttgtgggaaggtgggtaaaggtttggctatgccctgaataagttttgttatgtttaagaatgaggaagaagtgtgatgattttggtctcagcagcattagtctgaaccgaaactcaatgataatttcacccccaaagctacatagcaagaaacctaactgagtatgtatggctgtctctactgccggttgcctagagagcctgagtactgagcctgggtcagccccaggaaccctgaacatagtcattgtctatagattttgtagcttactaacatgaatgcgttttcttccagaaacaaatagaatactattttaagtagcatttctaggactttaccactacctgctaccatatcagagaccaactaaattttcttttttttttccttcccgttagtgtgcaacgttctgactacttgaatacatttgagttcatggataaacttggagaaaacttgaagatcaaactagctcaggccaaactttaagttcatacctgagctaagaaggataattgtcttttggtaactaggtctacaggtttacatttttctgtgttacactcaaggataaaggcaaaatcaattttgtaatttgtttagaagccagagtttatcttttctataagtttacagcctttttcttatatatacagttattgccacctttgtgaacatggcaagggacttttttacaatttttattttattttctagtaccagcctaggaattcggttagtactcatttgtattcactgtcactttttctcatgttctaattataaatgaccaaaatcaagattgctcaaaagggtaaatgatagccacagtattgctccctaaaatatgcataaagtagaaattcactgccttcccctcctgtccatgaccttgggcacagggaagttctggtgtcatagatatcccgttttgtgaggtagagctgtgcattaaacttgcacatgactggaacgaagtaggagtgcaactcaaatgtgttgaagatactgcagtcatttttgtaaagaccttgctgaatgtttccaatagactaaatactgtttaggccgcaggagagtttggaatccggaataaatactacctggaggtttgtcctctccatttttctctttctcctcctggcctggcctgaatattatactactctaaatagcatatttcatccaagtgcaataatgtaagctgaatcttttttggacttctgctggcctgttttatttcttttatataaatgtgatttctcagaaattgatattaaacactatcttatcttctcctgaactgttgattttaattaaaattaagtgctaattaccattcttctgcgtttctgtttattggatgccaagcaccacgctacatcctagccataggagtgtaatctgaaaaaattctctgctcttaaaaagtttaccatggtggaaatagataagtaaatagtaagatgtagatcctgcagtgaaaggaaagaggaccaaagagggaactacaggaagaattaaggaatattagagaatagattatgtctatgcacatgctaaggagtttagtcattatcttataaatgattagggagccaatgaagacttttaagaaataagggacttgatcatatttttatttttaaaaatagcactctgggaaactttgataaaaaatggatagtggctttgagaggccaaggcaggcagatcacaaggtcaggagttcgagaccagcctggcc

SEQ ID NO: 98454 - DNA, 1031 bp, Homo sapiens
acataggttacagagaggaatgttatcaacaagcattttcctttacctctggtgcagtgaaatgtcacataaggctacaaatctaaaagtcacatggatagatccttttaacaagtttcaaagatagcacttcaaaaagagattacagcctggaaaaaggagaccaatatagacaagagatagaagagattgtgacctttttcaaattagaaaatgccttaagtttcaaacactagtaccatgccatgaaaatgtgtttttttaaagtttctgtttggtaaaatatttctaactctcctaaaacttctagcccatgtggttagtatctaaagaagtctgtcacctaaacaaaaaactattctgttttggggaactatgagacatttggaaacctctataactaggatgattggagtgttgtgttttttttcccctcttttagcttccatttttgcctggaccagagggttagcccacagagcaaagcttgataacaataaagagcttgccttctttgcaaatgctttggaagaagtctctattgagacaattgaggctggcttcatgaccaaggacttggctgcttgcattaaaggtttacccaagtaagtataagatgccctagtttctatggtcaaattaacacttatcctcactgggctcagagcatcggtgctttctggaattatataaattgttattcatcatctagttcaggagtcagcagatatctgtaaattgtcagatagtgaacattttaggctttgtggaacatatagtctttttgcaactacacaactattcaactttgcctctgccattgtagcaggaaagcagtcatagacaatacagaatcaaatggtgtggctggtaccaatcaaacttttatgttcaaaaccagcctcgatttggttcatgtgctgggctgtaatttgctgacatcccatctagttgataatcattgaacgaaaaggttctatttaattttaagaagcagattatagacaaatagaaacaaagatacttcagag

SEQ ID NO: 98455 - DNA, 1015 bp, Homo sapiens
acccccttttatttttaaagagcaatatttactaagggaaaaaggtggtccttagacttacacttattatactaattatatggagagaaaccaggccattattgcctctatctggtgaaaaacaggaggcaaagggcagagtttgatggtttccattcattttcctgatagacagcttcccattacaagaggaggggcagcccagcagtctagcctctcttagttctctttgtagttggcacccatcttctgtgtttagggtgtgccagtgctaaaacttggcagattttggtgtactcagagccttcgctttctgcataatgagctctatatgccatcactgcagttgtaggttataactatccatttgtctgaaaaactttgcttctaatttttctctttcaagctatgatttaggcatagagaatcgtgatgccaccaacgaccaagtcaccaaggatgctgcagaagctataaagaagcataatgttggcgtcaaatgtgccactatcactcctgatgagaagagggttgaggagttcaagttgaaacaaatgtggaaatcaccaaatggcaccatacgaaatattctgggtggcacggtcttcagagaagccattatctgcaaaaatatcccccggcttgtgagtggatgggtaaaacctatcatcataggtcgtcatgcttatggggatcaagtaagtcatgttggcaataatgtgattttgcatgttttttttttcatggcccagaaatttccaacttgtatgtgttttattcttatcttttggtatctacacccattaagcaaggtatgaaattgagaaatgcatatatgtataactgtatatttacacacatttagctaaaggcaaatacaaataaacttacaaataggcgtccatctcaacacattttttttcaaacatgctgttttttttcctttatccttttattcagttataccatatgatattgccatttttatgttggtaatttcatatggttcaaccag

SEQ ID NO: 98456 - DNA, 1007 bp, Homo sapiens
taagaaattaggcataaaaacatcttccaactaggttaaaaaaaaaaagcatcttaggaactcctgtttcaggactttacatgacagtaggtgaactggcagggttcttttccttataatggctgcaactaaagatgctttgagcctctttagtgtggaatcatgaggagttttaaaggggagtcactatgactaggaggaaaaaatttggtggctgcagactagataatttttggaggctcaaacaagttttaaatttttccaaaattcctattattatcactgactggttctttttcaggagaatggagcaggtagtttgttttatgtaggctggacagtggtctgggcaatttgttccttcctttcttatcttcttagaaatgttaagaagacaagcaaaaaatctaataatttgctgatagattctccttatgagaaatggttcctaggaacttgaaaactactgatcatacttcctgttggagttgggattggatcaacatttcctatgcaagaagataacaaaggacatgactttgttagatttatatgaattatctaaagtcgaagcagttggaagttatttttatttggaaatatgtcaagattactatctctttgtttgcatcatgagttgggtaggagatctaagaaaggaagataagggaaccaaaaagaaatctagaggcaggttttaagagctgaaaaaccttttaaatccttggagaacagaataaacaaaacattattttgttttcttgctttttaacaaactattgcatgcttcaaataaagctttgcagtcattttctatgctccctggacaactaacattctttcagctctgaatgacctgcaatctttgtgttggtgtatattaagctattactctctggtatgtagaaaaccattgatggattcctttacttacccaataaattgtaggcttgtttccagagcaaacacttgctcaagaattacagaaggaattagctgggcatggt

SEQ ID NO: 98457 - DNA, 1108 bp, Homo sapiens
tttccgccaggcgtggtggctcacgccagtaatcccaacacttggggatgccaaggcgggcagatcacttgaggtcaggagttcaagaccagcctggccaatatggtgaaaccccatctctgctaaaaatacaaaaattagccaggcgtggtggcccgcgcctgtaatcccagctgctcaggagactgaggcaggagaatcacttgaaccgtagaggtggaggttgcagtaagccaagatcgtgccactgcactccagcctgggtgacagagccagactccgtatcaaaaataaaaaagtgtttttcttcactttacaatcaaccttcttgaaaaggttttcttgtctccctttccataccccccattcatgcttcagtcccctgtagtatggcttctatcttctgatcctcgtagaaccattccacttctatcttcttcatcctcatagagcctttttactaaaagtgcattcaagaggttttccttttgccaaaattattttcagaccctgtctttttcttttaatctctctgtagtactccctcttttttgaaaactttcttgtctgttggcttctatgacatcaggctctgctgattctttgttaacccccagactctccttctcattctctttgtgggggctccttttcctctacctgacctttaagacgtaagtgtccctcagagttctcactgagattgacttttctccttactttgaagtcctagataatatatactctgtcttcaactgttatcaagacatgctaaagattcccaaatttctttctccagcccaccctttctgaactgcagatgaggccaactgcctcctggacatcatcttgctgtcccatggcatcgcaaagttaagaaaccttaaacttaacccatgatcttggccatcagatctgtgactctatgtatattccttctttgttgaactgcaccttgtctcccaaactccaaattcagaattcccttttgccgttctctctctcataatcttcatggacaatcaatgaccaagctctattcattctacctcagttttttttcgataatcaaaatgaaaatacaaccacattagaatatttatgagaa

SEQ ID NO: 98458 - DNA, 1056 bp, Homo sapiens
acctgtaatcccagcactttgggaggctgaggcgggtggatcacgaggtcaggagatcaagaccatcctggctaacacggtgaaatcccgtctctactaaaaatacaaaaaaattagccgggcatggtggcaggcgcctgtagtcccagctactcaggaggctgaggcaggagaatggcgtgaacccaggaggcggggcttgcagtgagccgagattgcgcgactgtactccagcctgggtgacagagcgtgactccatctcaaaaaataaaaataaaataaaaaactaaatgttaaaaggagatttcttttaatagagaaagtagtcgtctttttttgttattctttttttcttaatatgctttaagttagtccatagaatggactttgttcttttgggggttaatagctaaaatatttaaagcaatgaaactgaaaggaacagtacatgggaggaaaggtttatatttttcaaaaattggaagctgtcagtaggcttcttgttgacttaaaactgttagactaaggtgtacatgtaatgacatcaaatggaaagatatttttaaaatgagctctttttaagtaatatgtcttttacttgggacaagaattaaaaaacatggcctatatcttttgtcttttgtttgtctgtattacttgaagtatgttagaaagtaattcttgttgttgtatagaatttggagaggttaatagtgttaattaactcagtagaacctttaataatattaactgaattttatttatgatcatgtttaaagtgctatgaaaaccctttagtacatttttaagacaatgatacttaaaaaaaaaaactattttttagaagagttttagatttacagaaaaattgggaagatagaatttccgtatactcccatacccagttttcctcatattaacattttacattagtctggtacatttgttacaattaatgaactgttattgatagattattaactaaattacgtattttatttagatttcttgagtttttaccagttgttctttttatattctaggatcccatttgtc

SEQ ID NO: 98459 - DNA, 1025 bp, Homo sapiens
tgtaattttggtctaaattaaggaaataataagtgacaactttggtgggcataccctattttggccatgaggctggaatttgggcttattagtgatagatttggcttcagtattgctatgtcaggtataaatgatcctttcctatttggagctgtggggttggggaagtgacagggaaggataggattggagttttagcaattttctggcagttttaatttgcttggacataggtcaggttttaccatggcaaaatttgccatcctggatgttgtgaagtctgtcagaatctttgaaggctgggctattaaacttctttctgatcatcttctgtatgagactttggatatatggtctacagatatagacagaactgaactgtttgatcctattgcttacctgtttgactttagagaccaagctaagttaaccctccttgattgctttttcttctgctaaatttctagcatgcatttattataggttggaccaaagggcttaaggagtcattaatgaattttggaccatttaagtgatgttcccattccaggcctgaaaaccatcaatggtctcagacaatgcttgtcttaggcagccttgactcgcttgtaaaacagcattttacatgagaagaaatactttcagtagcctcttacccttataaagacttgttttaactctcaattcatataaccgggtgggagaacataattatatgccaacaataagaggcagtttccatcacatatataccttgttgtatatagatactagggactgttaacaaggttgctttttttttaatccaactcagacacaagaaggaaagcagaacctacctttggaggtcatgaccctcgtacagctgttcagcttcgaagcctcagcacagtattaaaacgcctcaaggaaatcatggaggggaaaagccaggtactgtctagaggctttggaagattacttattaagcgcttatggggatcatgccatacctaatgaaaatggcttaatgccactgaaagaaa

SEQ ID NO: 98460 - DNA, 1157 bp, Homo sapiens
gacctcaggtgatctgccgcctcggcctcccaaagtgttgggattataggcgtgagccaccacgtctggcctggtatgttacattttaaactcattataaatgtttatggtagtttggacacctggatgaatttatcataatgatggctctttttttttcttttaacttctaacttttgatttttagtgccagaattcaaaatggcccttaaatatatataatagagctaacaaaattatttcactttttaaaatgtctttttttgagagtctgtacttgaagacatttccgttattagatgaactgttgacccaaggagttaaaaaagttacgttaagcaatatgttactgctatcttttccttcaatttccttgtttttgtttttgtttttttctcctaggagacctccgagcttgcacatattgtagaaaaatagccttaagttatgctcattccacagacagtaattctattggggaagacttgaatgctctttcagattctgcttgctctgtgtctgtgcttgatccaagtgaaccccgaacacctgttgggagtaggaaagccagccgtaacatatttttagaggatgatttggcctggcaaaggtattgtcccttaaatataattttatttagagttgaaaaatatcgatagttgtctgacctttgagtgctttcagttaacacttaccctcttagaattatttcctgtcagttcactgtgttctcctttttctttggcttgcctccagaatgtttgcagatgtttatggatagtgatgatattggctaattagaatgtaagctccatgagaggagactttacatctttcttgtcactgttctaccccaggcaccaagaacagcgcatggcatgtatataatcttgataatatttgttgaacaggcaacaaattgagatttttaatttaattaatgaacagaagtcattgagattattaatttctaatgtagccttctgtgagaagaagaatgcctgtacaatatgtattcatatttccaagtgaaattagattttttttccttctgaaggtatatgtcatgtttttctgtaagtatactgcactgctacttcatgtttttttgtaagtatactgcactgcttggtagtagagggtgctaactcttggaa

SEQ ID NO: 98461 - DNA, 1174 bp, Homo sapiens
ggttatggggactgagaataaaatatttgaactcaagatttccctccaaaatcaatttcatcttgtattaataatgttagacgtttcaaaggcacccatccaactaactttatttacattccatatacttaaaaactttttaaaattgtcatttcggcattttatattcttaaaagccatgcactgcaaaaactatcattcataccatttacaccctaattaaaggaagaacaaaaatgacacataatctcattattgcaaggaaaaagattaaatctgcttttaatgttaaagcgcctcattgaaattcccttttactgtcctgaattatttcagtattttcctattttctttatagtttgattcatccagattcctcaaatactcctctttcaacaagacttgtatctgtgcaagaggatgctgggaaatctcctgctcgaaataggtaaactgacaaatgaaaacactgtgctctctgatgtttatttcttttcatgctaataagaagaacaaacggataaaaagggtgggattgattgtcatatacttccgtagctctaaaagctgaattaaactatcattttctttttgctattcagcccttgtttccattctctcagtgactttccagtattctccagtggcttccgggtttggaacctacaccatcctttctcttctggttaaataagacgtgaaggatgtgagggaaggagccatgtggacattttgtggaggagtgtcccaagaaaacaggaataacaaattcctgagaggaaatacacttggcaaggaataacaaggaatcctatgataatggagtagagcagtcttagagttaattataaggactctgtcatttactctgagtgagatgggaagctgttggagagttttacattttttgtcgttaatttttaattgctttgaaaaaatgtcaaacatgcagaaaagttgcgagaatagaaaaatatatcttcatgtatttttcattaagatttactaatttatattttgtccctttgctttctcattttttctttttttaatttttatttatcttattattatttttgagacggagtctcactctctcgccaggctggagtgcggtggtgtgatctcagctcactgcaagctctgcctcctgggttcatgccattctcctgcc

SEQ ID NO: 98462 - DNA, 1012 bp, Homo sapiens
tgttggccaggctggtctcaaactcctgacctcaggtgatccacctgcctcggcctcccaaagtgctgggattataggtgtgagccaccacgcctggacgaaacagacaaattctaaatatattttgattgtagagctaataggatttgctaatcaactggatgtaggcttcaacagaaagacatcaaaggtgactcaggtctttgacctgagcagttggaggggtggaattaccaactgggaggaacagtttggttttagatgtgttgaatttgagatatcttctagacatccaagtgagatgtcaaatagttggatatatgagtccagaatttaggggagggctacaggctagagatgtaaacttggatgttgtcatcatgtgtatggtatttatgaacttggatggagatcatcaagagaatgagtgtgaaaagggaggaaataaggactaaggactgagattggagaaatcaagagaaaccagaaaaggagacggggagaggccagtgaggggacagggaaaccaggagggtatttatcttattagtcaagtggagaaagtttttcaaggaaagggagttatgctgctgatatgttaagtaagatgaggagtgaaaactgactattggatttaacaacaacattggtaatcttgataggcagtctcagtgggttgtttggggtttaagagataatggaagaattactggagatgagagttttgctgtaaagtagagggaaatgcagccgagggatgtggagtcaggagatggctttttaaaaagatggggaaaattacagtattcctgttggcatgtgtagaagtgtagggatacctgtgctaatttacagtctatctccatgtgttttgaattaatgctaagactgatgtaagtctttaggaaagacgtaatttagtcaatgaatgctgtctctaaatataattttaatcagtattcttgctactaggctatttattacagcttttgacattaaaattgactaattt

SEQ ID NO: 98463 - DNA, 1049 bp, Homo sapiens
tttcattctttatatttgttattaaaaaaaaaatccactaacttacagcattttaacaagaagactttgtatctattccctttgaaatattactgatatatgaactatgtaattgttttcctgtaatctttccataactactttcttttaaacttatttccaagtaattttagacacacatagaattgcaaaatatagacttacatagggttgcaaatatcgtacagagagtttctgggtatcctttaccaaatttctcccaatgataatatcatgcataaccatcataagtacttttaaaagtacccttaacattggtaaataagcatttatttaaaaatgaattttctctgtaattctgtttattgaagaagaatttacacctgtgatttcacttcttgtttttatttccagatcagccagcattactaacctgtcactggatagatctggttctcctatggtaccttcatatgagacatctgtcagtccccaggctaaccgaacatatgttaggacagagaccactgaggatgaacgcaaaattcttctggtactggtccagtatctttgacccattgctagttttgagcatagagaatgttcatgtgactgagtctttttttttctttttgagacacggtcttggtgtgctgcccaggctggggtgcagtggtgtgatcttggctccctgcaacctctgcctctcagattcaagcgattctggtgccttagtctcctgagtagctgggattacaggcgcatgccactacacctaattttttgtatttttagtagagacatggtttcgccctgttggctaggctggtctcaaactcctgacctcaagtgatctgcccgccttggctcccagagtgctgggattacaggtgtgagccactgcacccagcctgtcactgagtctttttaataagaaatatataagtgaaatagcatatcagttaaacagaagtgcttagcttcagttttactaggatcacctgagagatgggtcaagtattctatactcattgcattaatattttctt

SEQ ID NO: 98464 - DNA, 2507 bp, Homo sapiens
tggctccaactaaatggaaacatctgatagcagtctttgtcttagatacagtattttcttaaaccaacttgttaggttgacatttctagattttaccatagtctatagtttgtagcagcttaaaaataactgaactaataatatggcagcagacaactttctcatctcttcactataatatcagactttctctctgcagaacctccaatatatttcttcattttaaaaattgattttatatttaacttgttcaaattttattaagtctacacagaagtacatgaaaatactgtatccattttggtattgcacattgggcttgtatattaaaaaaacatttttctcctttcctccaataccctgataaaacccatttttactcccctcctctccctatatttctttccccttcccaacactaaaagattctgccagtcctagcaagcgcacatcagtcagcagtttccagtccacagtggacagtgactcagccgcttctatcagcctgaacgtggagctggacaacgtgaacttccatatcaagaagccctccaagtacccacatgtgccccctcaccctgctgaccaaaaaggtaggaggtagtcaccatctggaatccaaacacaggctggacagctgggccataggatctcatgccagcctgtccttctggcttcctctgtcccacgtggctgagggtatttggtgtgggttttgttctaccctttctcatttctcccacacctcctccccataccttttttggttgattccttttatttcttgttttctccctcagcaccaccatgcccagtgtaaagcttgtagtctttaaaaggaactacatctgactgctcttcccataatgtgcaacttccaaggtggcatttctttgcatttataacatggatgttctgctctattcttttctctttcttcatttaacattttaaagcctatttgcctttgccgttacccagtaacataatatttcactaaacccattaagatgcttgaactagattgggggaaaatcattcacacattccaaaatatctccataataattcataatgcttattatgtatattctatatttattaaaacaatttcttctctaatgtaaaatgaattcattatttttagctatcttatttgatgctttagtctactggctgaaaaataatagtgaccatattcaaaagatatttggtgtaaaaggagaaagaggtaaacattactaaaatctaacatagcagcacataagaaatgcctgtttttaaaatggatgatgaggtttactttattgggtataattaaaagccaatttaaattatagtcctatcatgggattgtgtaaaagtgaataaataaaaaatacatgagtaaataaataaatgtgggattttgttatgttgtaataactgaaaaatcattattataaagatgaagcactttattccatgattttacctggagtttgtattttaaacatataactgtctaaagtggaattgtctccttacttagatctgaaatgcttgcctaagttttgcgcactctatttcgagcctaagaatatgatcagaaaacagaagcttttgaaccaaacatttatactaaaatgatttgatacaagtttatatttctccaacaaatttctcatagttgtcagtattagctattatcaagatgtggtaaaatggtactgaagagttatagtaataaaaaggaatatgttatttaaaaataagtagagaaggtgtgttaatgagacttgactagcattgaacatgagtaagatagacatctttatggaaatcctcaaaacagaaattggaaaaatgatggagaatatttgggtgagtatgaaaggagggaaaagcagatatgacacttgtgtgagaattaactatagatggtggtcacttggaggatattatgaaggttttgaatataaacttacagatgtgggtcaggggcacacagatgatgaacatctgttctctggacacatctgttggcaatcacattttgctgtaagcagaatgtgaagtatacttttgacttggtgatgatttcatctcttggaatgttaaagaagttttgaaaatcttgaagaaagtgacctgtcatcatagaatttgtaatagggaaggatagactgctgagcacagtcagatacttacttttgaaaacctaacttgagaacattcggagtggaatggaacaggaggctccaaaaatgacattgttatggtgcaaccccagattgtatctccaaggaaattgacaggagaagcacctgcagttgacaaaaatatgaccccttttgaacctccctgatttcaatcctttttttttttttttctaagagacagggtctgactctgttgcccaggctggagtgcagtggcgcgatcttggctcactgcaacctccgcctcgtgggttcaagtgattctcccacctcagcctcctgagtagctgggattaccagtgcgca

SEQ ID NO: 98465 - DNA, 1605 bp, Homo sapiens
aaccaaactaatgaacatattcatcatttcaaatcctttttgttggggcagggtgcagtggctcatgcctgtaatcccagcaagttgggtggctgaggcaggcggattgcttgagtctaggagttcaagaccagtttaggcaatgtggcaaaaccccgtctctacaaaaaatacaaaaaaattagccgggtgtggtggtgtgcgcctgtggtcccagctatttgggaggctgaggtgggaggattgcttgagcttggcaggttgaggctgcagtgagcgatgattttgccactgcagtccagcctcggtgacagagtgagactttatctaaaaaaaaaaagaaaaaaaattccatattattcttagtggtgagaacctttgaaatttactcttagcaattttgaaatatacaatacactattattaactgtagtcatcatgctgtacagtatatctcaaaaacttattcctcctgtctgaatgaaactttttaccctttgactagcatctccccattcccttcactccctcaacctctggtaaccaccattctacttagtatgagcttttaatatgaaaaacacaaagagtgtagtgtatctggtgaatgtaagagcttatgataacactagtagttggtttttttttttttttgagacgaaattttgctcttattgtccaggctggagtgcaatggcctggtcttggctcactgcaacctccgccttccgggttaaagtgattctcctgtcttagcctcccaagtagctgggattacaggctcctgccaccatgcccggctaatttttgtatttttagtagagacagggtttcaccctgttggtcaggctggtctctaactcctgatctcaggcagtccgccaacctaggcctcccaaagtgctgggattacaggcgtgagccaccgcacccggcccactactagtattaacacgtggatttgtagcttgttgtacaaaatattgaaaggataattaataatttgatgtcaacaggaagtggatgctcctaggttatgttatagggacttgactctatatttagagttgttcacttttttttttggtcagcacttttaatgtttttttaggtccacaaataattaaaatctggaaagaatggctagcgtgttggatagcagaattgacatttaaagatctttattttctcaagcaatagattgagactaacaagatgaaagttaacacagttaaacataaaagaataaggcttaacatgtttactattagtactttggagaaagtcactcttaataatttgtgtgataaagatctaagttttagttatttgcaaacttaatagtgtgatgtgccaaccccgcactccctggcactccctagggcaataatagatttcattagtggccatataatgtctagaatgaggatccaatttactgttttgtgttcagttctcatttatgaatagaacgaggttgccaggatcctaagacatctgaaaaccatgctaaggaaagctggactatttaaaatggaaaaaagacgtggtgtttcctttaggtatctgaagagtacctgaaagaaattatatttattttgcata

SEQ ID NO: 98466 - DNA, 3487 bp, Homo sapiens
aagtctcttaataaatattactggctttcacagttctctcttagtttttaacatactaacgagttattctttttacattttttcttgtgaagttgaagcgtaatagtttgctgagtgttatagtcaagatgaacactgattatcagaaaataaagatttccagggagactggtagttacgtgaaaaaataatagaattcttttgcctctggttttcattccctttgtataaatacaaatgggaatggtttttatctttacattgaaattaaaggtagtacttattaaatattttcttatggattgtcctatattgtttcaggctgaggaaaattggatttataaaattggttgaaatatctgtactttaaaaaatactacttatgctttctgtctgaagtgagaaaaccctattttcagaagctcgtaaaactggcttaatttttcattattggtcttggagaattgtacagttaaaatatattttattatgtattacaagcaggattctgaactattcttggaaagttagcaagtaaaacctagagaagaaggtgaaaatcacggcttccgtaaatctctagatgtagttttccgtgtataggaaaacatgggatagaggagcaagttaaacacaccatgagaaaacaatggattgtactccgaatgtgggacattgcacagaacatttgacctgggttcttttaaattcatgttatgaaaagaaaaaaagacaggagatctgttctagattaaaagagaatgaagagatacaggaaccaaatgccatgtgtgaacttgattgcatcgaggcttaagaagaaaaactgtggattaaaaacattttggagacagttggataaacttgagtatgggctaattctgtgctattaagacattgttaattttctcaaatatgtaaataattttgtggctatagagaagaatacctttatttttatgagagttgtgctgatgtcctagtggtaaagtgtcatgatgtgtgtaactttgaatgatcggggggaagaaacatacacatatatggcaaatccttaacaattgttgaactcaggtggatggtatacagcattttctgtaggtttgaatttttttcataactaaatggggaaaatccaccatttctggagtctcatatagatacaattaagctttagtgtgagaaggctggtaaagaacaatacattaattgaactaataggatttggtgttactcattcctgtgagggaagagtagaaataaagtgtaacatctatcttgcccacatactcgattttattgtatttggcatagtgcacttgaactttctaaataaaatattttctttgtttcctggttggaaggatgagcatattggcttataaacatagtaacttttaaagcccagttgtttataaatgtacttggagaaaattttgtggagatcctttaccgtaaaggagtttacatgcatcatgttttaatttgcatagtggaaagaacctcatttgagctatgcttggtcacagacctagagaaagttcacggggaagtaaagagtaagtttcacttgtaagaaaagtatttaatatattaaaagcattcagagtgtgttcagttaatgtctagcaaaaatttggcagtgtttgatataatttttgaaaaacaaaaacacttatttggaactaatacaaatactgatgagttttatctttattcctgccaatgtcacttctgtattaatttgttttatagcttatattctgaaatttgaaaaaagtttatattgttttatcaggtgggttctgtatgaactgctttgtgcataggcaaagtgattatttgttaaatcatcaagttacatgtgaaaagaactgtaatcttttaggatggtcgtacaagtatctgaagatttaattttcataaaccggttggttttggtaagagaaaaacatttctctatctgacatttgaattaaggagaattgttttcacggctctattgtgttattaatgcaagtctgcttaagtttagtatgaagtgcatagaacaagtataaagaggcatttttacccaaagctttcttgaatttgccgggcagtgatgggtttagtatgagtaatattttgtgtgtgggcgtattctctatataattatgctgacatgttatagtcatatgtctctacttttgttcctcctctctgttgtctccctggtatgcagagtatttgatttctgacactggaggacaacagctctcaataagtgacgctttcatcaaaggtaattttataaaaagctgtatgtggaatggtgtctctttttttcatgaggatatacttagggcttagcacattgattagcacagagaaggtgctgaaaatatatttgattatggtggtatcatgggaacacagtttttaatatatataatgatttagagaatgttgagaaccaagaatgtaaacttggacttggtttgcgagaaggaggtctctgatgtgaaaagtaattgtttaaaaacttttaagtagaatttgaacttaattcttttaaagacatagtttacacttaactgtattgtgaatataatattaagtattgatataaatatcatcaaggattgtcaaatttgtcaaaaagcccacaggcagatctccagttaaggatgctgcttgccctgtggagtgaggaagagaagcaggcagtagaggttaaagaactaactctgatgataaatttcttttggacacaaaaggagattagccttctcctattccttccctacttagcttagcttagcttcctagagtaaagacattcttagtccatagtactccactggttaggcctcagataatgggagaaaatttctcttccttcttggctcccacggtttcagatcaaagagagaaggcaagcgggtacaaggagccactgcagcttatctgatagcttggcagtgcttctaaattcatctccaagcatctggttcggctagaagtttacagagtggccctttatgtaattgaaatgtgcaattcttgtacttcacatgtcatggacatatactttactgtgtaatctgctgggctgtttggtggaagtttttttgtttgtttgttttgcttttaagaggggacaggttagagaatttttgtaagcatttcccacttcttttctttccacttatttggtcagattattcaacagttatttagtgaacatatttttttgttaagcatttattatttattttttgtcttatctattttcattcatcctttaaaaaatttaaagattttacacaaattctacataaatgctatttattatgttttaatatttatgtttttgagtctgtcttgctaaaattttgttaaaaaacccctgtgccaatattgaaagagaaacactattgaggattgtctgaatagactttctacactgtcatctgttgttttgtgatatctgagctgagcttct

SEQ ID NO: 98467 - DNA, 1113 bp, Homo sapiens
gtgagctaccacgcgcggcccagtttgtgattttaaaggggaaattaacaccctcgtttttaaaaattaaaaggagaagcaaaagtttcattttatttgcttttcagaagctgtgcttataattattggcttgagagtcttagttacgtacatttgattttcacagttctgtttctgattttggctgttgccaattactgctcttcttaattcttgcatttctgtatttttagtgtattttatgtatttgtaagtattttcttatgcattttatttatatgtttattacatgttcttgcctttttacaccaataatttatgttggctaacttaaaacatttataaagacaaagggcaatttctaaatatatgagtagatggtataaaacaggacaatgaagtaataacttcttattttatattgtacttagaatccttatttaatcgccgagtagaggaaaaatccaaagagctgcctttcacacctttgggctggcatcataacaacctggagctcctgagggaggagaatggggagaaacaagccatggagaggttgctgtaaggcaatgaaatttttaattttaatttttcacttttattatcttcagtgacttgataagcatatgcatcattcctcttaaaaagggaggtctttttctttttccttagaaagtaaaaaaatactaaggttacttaggaaatacagtctattttgacttgtgattaaatttcttataaaaccaagagccccggctgggtgcagtggctcacgcctgtaatcccagcactttgggaggctgaggcgggaggatcacaagctcagaaggttgagaccagcctggccaacatggtaaaaccccgtctctactaataatacaaaaattagccaggcgtggtggcgctggcctgtaatcccaactactcagaggctgagacaggaggattgcttgaactcaagaggcggaggttgcagtgagctgagatcgcgccactgcactccaacctaggcaacagagcaagacttcgtctcagagaaaaaaaacaaaaacaaaagccccaaactgtgcttgtctgtccccattttacgtgttaaaatttcatttcagtcaa

SEQ ID NO: 98468 - DNA, 1020 bp, Homo sapiens
catggcactagtttattcagtcagtgagtactttagagtcctagggtagtacattagagaacaggggatgggaaaacagagtcatgcagagatgccattgatcgttggttgaaaggaagtattatttcctgaaattttttgttcttatttgattacataatagtttaaaaaaaatggaaagaaataatagcgtacatctaactagattctaagcatgttatcattgaattttattgttttcttaattgttccattagatcccaggtggaaagaagtttgattctgtggttgtcaatggctttgtttgtaccaagaacattgcacataaaaaggtaatgtgattcagttcagcagtgaagttcagcaaaccatggctgtgtgcttaggtaacaagttggggcaccttagttatggaagaaatggacaatggacaatgaaaggcagctgtgtctgccataggggtgaaatttggttggttcagggaagatttcccagagctgaggatgaatggattggaatttgaataatgggaattcaccagacagaaggaggaaggggagaggatcaggcttctagattaacagaatgataagatactggcattatttatctcctgatcctgttacgtcttagggagacagggtttctctagtaggctggagtccttccagaggcttagcattctaaaactgatagctcttctagtgctcggctacagaactgtcagtcttcttctgttatccttctcaccttatatctttgtagcactagcacaaaggagtggagtgagataacctggggtattaaggagactctgagttcctaaggtgtaatatgggcaatgtagatgaagctggaggaagcaggcaagggctttgtatgtcattaaaggtcttgaactttattctgaaatcttttgattctcagtgtagtgtacatacattgagatcacatgtggaccttttaaaaatgtctgttcttaacctaacccctagaaattctcattcagtaggttaaggg

SEQ ID NO: 98469 - DNA, 1043 bp, Homo sapiens
tcccaccaacagtgtaaaagtgttcctatttctccacatcctctccagcacatgttgtttcctgactttttaatgattgccattctatctggtgtgagatggtatctcattgtggttttgatttgcatttctctgatggccagtgatgatgagcattttttcatgtgtctgttgggtgcataaatgtcttcttttgagaagtgtctgttcatgtgcttcgcccactttttgatggggttgtttgtttttttcttgtaaatttgtttgagttttttgtagattctggatattagccctttgtcagatgagtagattgcaaaaattttctcccattctgtaggttgcctgttcactctgatgatattttaatatgtccagatactgcattttaccaggtgtaatatttctgatttatcttacttaggaaagggaattcttgaagaattatgtccagcgaatagttgatgttcgacccaccttggttcttgttgagaaaacagtgtctcggattgcccaggacatgttattggaacatggcattactttggtcattaatgtaaagtcagtgagtgtttttaattttctattgtattttaaaaaaatcacagcttttaaatttatatgcacgtatggtaggtatacaagaatctttttttctttgctgttctatttgtattgaaagtgggacagaagatatggcacctatttcattaagattcagaatttcagactggaactggaagaaagtataattgattatgtaatacttattggtgtctacaagaccaaaagtgaaatggacattagttaatcactaggtatttgttgatccttcatttttgttggagaattgctcaagcagaagacgttctctcccttgaaaagtttaccctgtgcagaacaggggccaattctaggaagttgtttttctccccacattatcttgtggtaatccatgatgcttaagtgcatttttataatgttattaatatgagtaaggtttcagtgggcatatattgattactaagcaactaagtgtagaa

SEQ ID NO: 98470 - DNA, 2663 bp, Homo sapiens
acaatgtttacttactaggaaatacctattaatagtgggtaagtgaggataggcaactgtgatcttattcatgtaagagtttttcttttacagatattaagagagtgaattaattctatttgtacttctggattgccacctccaccatcttaactttctgtttgtttttgtttgtagaacaaaccaagacactgatgttttttgaaggttgtccacagcacctaggctgtacaatcaagctaagaggaggctctgattatgagctggctcgagttaaggagatcctaatatttatgatctgtgttgcttatcattctcaactagaaatatcctttctcatggatgaatttgctatgcctcccacattaatgcaaaacccttcattccattccctgattgagggacgagggcatgagggggctgtccaagagcagtacggtggaggttccatcccctgggatcctgacatccctcctgagtctctgccctgtgatgatagcagtttgctggaattgaggattgtgtttgagaagggtgagcaggaaaataaaaatcttccgcaggctgttgcctctgtgaagcatcaagaacatagcacaacagcttgcccggcgggtctcccttgtgctttctttgcacctgtaccggaatcattgttgccactccctgtggatgaccaacaagatgctttaggcagcgagcagccagagactttgcagcaaacagttgtgctgcaggatcccaaaagccagataagagcctttagagaccctctacaggatgacactggattatatgttactgaggaagtcacctcctctgaagataaacgaaagacttattctttggcctttaagcaggaattaaaagatgtgatcctctgtatctccccagtaatcacattccgagaaccctttcttttaactgaaaaggggatgagatgctctacccgagattattttgcagagcaggtttactggtctcctctcctcaataaagaattcaaagaaatggagaacaggaggaagaaacagctgctcagggatctctctggacttcagggcatgaatggaagtattcaggccaagtctattcaagtcttaccctcacatgagctagtgagcactagaattgctgagcatctgggcgatagccagagcttgggtagaatgctggccgattatcgagccagaggaggaagaattcagcccaaaaattcagacccttttgctcattcaaaggatgcatcaagtacttcaagtggccaatcaggaagcaaaaatgagggtgatgaagagagagggcttattctgagtgatgctgtgtggtcaacaaaggtgagccagaccactttctgatgctcctgtgcatttaggatgtgttgaatgactcctcaaaggcaggctaaaaaaatcagtttggcagactgcatgcagatttgtgaaatatttcttctcctatgctatttttgtttttgtcttgagtctgctggcttatgtgttactttaatatgtatgaagcagaattgtaatgaaactgggtttcagggttttaaggtgagcttataataagctaggaagatccctgaagtaaggggaaatgtggagctgcttaaaatttctgacaacatgacttggatgtggtatgataatcctggatccttgtgtcagggagtgagagatggaagcttattgtaggaaatagatgtgtttttttaaaaaagttagcagcaaatatatttgttttctcaaaaaaagttagctctttttttaacataaaacattttaccttgttatttaactatgacagtgatctttttctttttaggcataaattgagagcaaattaaggaaggtttatagatccattattgataatggtagcaataaaactaattaacaaatccattgctagatgaggaaatgcaattgtttaataaaacgagaagatgtccaatttcgccagtagtcaaggaagtgctaaataatgtatgttcaatttcactagtagtcaaggaagtgctaaataatagtggtgctaaataattttttatttgtcagattgacaaaaaggaaagtcgtaaaagacccatggttaatgatggcatggaaaaacacctttcataaattttatgtaagtttatacaaatgtaggtatatgtacatttgtataaatttatagaaagtgataggaaagtctccattaatttacacatacatgtatatacctttgacccaggactccaactttttataatctatcctgcagaaataattaagtatgcttatataagggtgcttgcattttttaagaatatatgtacaaagatgtttattgaaacagtttaaggatgagcaggatctcaagtcatttaatgacttggataaagcccatgatatatttgaagtgttaaaaagcaaattatgttttaatatgtgttgcattattccatatttataaaaacaaaaccccctgtttgtacttaggaagtgatgtgtgtatgtgggacaggtatgtaaactagcaaaaagaatagatattttaaaaccacagagtcaaactccgcagcttaggaggtggagtagaatcaggaggagcagttttgtgtattttatgaacttcttcatatgcttctatactgtttcaattttaacagagagctg

SEQ ID NO: 98471 - DNA, 1049 bp, Homo sapiens
acattacatgttcacctttagttttaaaagtactatggaacataacttcttgtttgggggcactgtctccatgccagaacatattctgtgttttaattttggataactgaaacacttatttccagcagtgagctcatgggttcttctagtagtatagcttcagcaggaagacttgggagtggcagaacccatgggaattatctctgggagtttatatataggtcaaggcttgaataagatgtggatttcaacagttatatagccaaactgtcttgtgagcatttataggttagataaaaagttagaaactggcactttagcaagaactgctgttttccatgctcagtaaaggcatggacaagagagtaggagaccagagtcccaccttgtgctgacagggcttaagcctttgtaaaggaaacctttacctcttcttaactcagatcagttttactaaattaatattatagtttatgcatcctcattagtttcataagacactagtggattgggagtgaaaaagatgctttagtgtggcaagtctaaacttgttttattaaaacctgtttcataacaacaaagaacattacctcctttcatacttcattgtaagtaccatacatttaataggtaatcataatttgtggtctcatgaaatgtctctggggcatggtaattcttatgtttctaagaggtggtctcttctttaggattgtaacaatggaattttatggaaagaatgatcttacattaggaatatttttagagagatactgtttcaggtaagaacatatttcttccttctgttccattacacatttttgatgctcaaaatttcaagctaaaacgtaaacatgagtcggatgttaagtgactgttacatgatcctcactttcatagtgcatatcagagtatatcattcaaagaagtaataatctatttcatatttaaactgagatctcttatccagaacatccctcatatctctgcccatctaattaccctaccatcaacatttttcggatacctgtttttttacagtgattcaa

SEQ ID NO: 98472 - DNA, 1252 bp, Homo sapiens
aagcatgttctgtgatacccccatggtacatcatattcggcgctttgttcatggccaaggctgtgtgcagataatcctgaaggagttggattctccagtacctggatatcagcatacaattcttacatattcctggtgtagaatctgcaaacaggtaaatagaccctattactatattttgtttgccatttatttctttatttgtatgttttttttttttcctgaggaggtttcctatatggtactggattcgttatttgttatagagctctatttgtcattgttattttaccttccagtgctgtatgttcaatctagtattcgttttttgaagatcccatcttaggaatgtatcagtcattaaataaaatacaagtgccctatacagtaaagtatcttgaggttgtatcatgacatatctcaattttgtttattcattcaacaaacatttagcaccatttatgtgccagatactgtgctaggccctaggaatgaaaaaaagaataaggaatgacttctgttctctaggggaggagacagacttgtaaagcaataactgcagtatattaggatatttgtataataaattcgagcctatgtgagcatttctattcacatacagatgagaccatgttgaaattgatctctattggtttttatgcatgttcttgagaaaaggacatgtgttttgtttcttctttgtgcctttctttacttttctaactctggggcaaaaatttggtgccaatattgtgttttttttaaatatatgatttttatccagactgcttgcaatctggataaaatattccaaatttaacttactaccttaattaggttctttctttcttttttgagacagagtcttgctctatcgcccggtctggagtgcagtcgtgtgatctctgctcactgcaacctctgtctcctgagttcaagctgttctctgcctcagcctctggagtagctgggactacaggcatgcgccactatgcccagctaatttttgtatttttaatagagacaaggtttcactacgttagccaggctggtctcaaactcctgacctcgggtgatcgcccaccttggcctcccaaagtgttgggattacaggcctgagccacagcgcctggccttaattgggttatttcaaagtgtgcttttggaaggcacatatgggaattatatataaaataatagcacgacctacattaatcagtggtagagaagggcaaaatcaaagttgcacctg

SEQ ID NO: 98473 - DNA, 1024 bp, Homo sapiens
ttggcatttttctattataattgctttttctctcccagaataagcatgccgtctttctcagagtgtcctaatttcattctctattaaactaaaaactaatatttaggtaggcattgtggtataatggatagcgtgttggataggagtcagtcttggttgacagttgcggtactgctaccaggatttgattgtagtcaagtcatatataatctttctggatttttgtgtccatttctatgacatgagctatatgacctagatgatttttaaaaagtaaaaattctaccttttaggaagtaggcatatgaatgagcatttaaaaaatattaggtagacatggacttaatgtatgtaaatgactcatttaagattgtgtttttctttagaggatcgcttcttaacaactttgtccagccagagctccaccagttctactcatctccaattgcctacgccacctgaagtcatgtctgaacagtcagtgggagggccccctgagctagatacagccagcagttccgaaggtagaggttaagtcacttttaccatatttcattgtatctaagactgaaagatatatcattgatttacatgaattacagccatttctctaaggacagatatttgcttcataataacagattcatgccttgctttctgtttaggtggtaactacttaaattatagtataaactttgaaattaactttaaaattgctatttaactcgggtgtaatagccacagtgcttcagagatgtttaaaaaaaacaagtgtcccttggagtccatgctgtgtatgcttcactgttgtttcctgttttatcccatagtggtcttttcccttgatcagaaattttaaactgttattggtatagtatacatatgtccatattccgaaaggaaaagaaccaaagtcagcagtttatacttcttattctctgtgaatattaatatataagtagactatttttcattttagatgtgtttgatgggcatttgctgggatccacagacagccaagtga

SEQ ID NO: 98474 - DNA, 2707 bp, Homo sapiens
cttttttcaaagatatgtggctatatccactgatttaataattataaaaacatattgctggttatatatgaggttggtagttgatttgctgggacatggcattgtcctagcactgatgatgaactacagtgacttgtacaagttttcatgtgatcttttttttatggggtgcactcaaatttggaaagaatataggctggctgtgaaagtttatttttcttccactggttgacccatgtggctatcaaatgctgcccttgttatggaacaagtatatccaaaaagtggacatttttgttaataaggccttttattttattaactgacttacatatttattcaatcagtatttaaacttttatttagtgcctgtttaagtgtcctgtgatgtagaataagatttgtaaggaactgtcatcactcttaggagctcataatctttgggaagatacagttagggctcacagtacagtatgtgatatgttacatgacagtaaaatataaaaggtcccttttttctctactttagacctgattatatcagtttcttgattgggcttggatccctcttatgttatggtctttgttcatgctctcacatttatttttatttttttaatttttattatttttgagacagagtctccctctgtcacccaggctggaatgtagtggtgtgatcttggctcattgcaacctctgcctcctagattcaagtgattctcctgcctcagcttcccaagtaactgggactgcaggtgtgcgccaccacacctggctaattttcgtatttttagtagagacgaggtttcaccatattggccaggctgctctcgaactcctgacctcaggtgatctgcccacctctgtctcccaaagtactgagctactggacccggccctttaaacttttttttttaatatagtttttttctttttgtttgtttctcttctctctaaaccactttttgtgaaacacagtcttttttaatcattcagtcctgttctttctaagaagaatttactagaccttcccccttacctcctgctccagtcagagtaggtttctattatatgctcttatgattcctgtcttggtccgttcatgctgctctgatgaattaccatagactgagttgcttgtagacagcagaaatttaattcttacagtcctggaggctagaagtctgagatgagggtgccagcatggttgggttctggcaagggtcctcttttgggttgtagattgctgttgtctctttgtattctcatgtggtggaaggaggctgagagagctgtgtccagtcttttttatgaggacactaatcccattcaagagtattccactctcatgacctaaattaccccctaaaggccctacctccttataccataacattgggggttaggattttaacatatgaattttgtgggagctgggagggtaaacattcattctgtagcaattccctcatagcacttaccacagagattatatttatttatttattggattatctgtttctttacccccactacactataaaccctatggtgccaattttttttttcgccattgtattgttaacatcttacacatgtaagatccttaaaaatagtttttcttcatattgtatccttggcatgtttggtgttcagtaagtagcacctaaattaaaaatgactgtgcctaacagtgcctaggtgagttagggtcggagtcaggggagcaaaatttaagttgaaatggagctacactgggtttttttgtgtgataatagtaaagtggttgtgttgcattgtttattattgaactagtagtatgtcttctccacaatttctagaagactttttctctctagcttgtaatggaacaaaatattttagacttctgctgttcattttaaattctttttgagattagtgtggccagagtcttggcagtatggaaaggtttgtttggagtgactattgcagaactctctgatttgaaacctaattaattctgataattttctaattgccttcaaaaactttctcttgaaatctttttctttcctaatgattcaggttatcatatctgcatacattttggctttcttaattatattcttaactctagagtacttagttaacttatgtattttaaaaatttgcatagtgatccagataaacactacttaatgtatgaacatgaacgagtgcccattgcagtctgcgagaaggaacccagctccatcattgcttttgctctcaggtattattcatgggactttgacttatgatgatatctatgtattttatgtatgtctattaatcccttatttttggaatctttcacataaagcaaaatgattaaatataagcaaaaatatatgttctttagtcgtgatagcttgttcttttttttttttttttttgagacagaatgtcactctgttgcccaggctggagtgcagtggtgcaatctcggctcactgcaacctctgcctcctgggttcaagcagttctcctgcctcagcctcccgagtagctgggactacagacacacaccaccatgcccagctaatttttgtatttttagtagagatggggtttcaccataatggttgggctggtcttgaactcctgacctcaggtgatccacccacctcggcctcccaaagtgctggaattacaggcgtgagccaccatgcctggcagcttg

SEQ ID NO: 98475 - DNA, 1050 bp, Homo sapiens
tataataaataaaggtcctaatacttcaaaaaccaaacccaaaccagttattttggcaagttcagtattttagacttttagacagaaattgtcacatgctcattattgtgattcttactgaaatagagtttccatctctactaacattatagttttatctgaattgtcattgtgataactagtgtgagagaaaggaattgatattttctgtagttgtttgatttatgggtgctgatatagtgttaatggacttgggaaacataatgtattcctccatacatttttatagttacagcatttcactttaagtccagtagatatttcagacttttttttctgtgttctagcctgtgtttatgtaaattatgaatcagacttttgatattgtaggtgggcttaggtaggaagtaaatcagtgtacagcgtaattagtgtagagtacttactattttctgtttgacttgtataaaactaaatttttctttttttttcttttcattttagtacttcagatagcagaccaaagagtagcagccctatcagattacctgaaatgagtggaggacagacaaatcgtacaacagaaacagaaccacaaccaagtaagattacacatggaggaatatttataattagatttacctataattatggtttgaaaaagaaaatacataaaaacaaataagtactatctggcaatgatttactacttatgatctctgaaatacaaatttagatatttttgtatgccctctttatacgtgttttgcttttcttcgttgattcttgtctcaagtgtaagttcaaggtattgaattagaaacttttagaagctctttggtctatgcaaaaaggagaatctgcttcctagaagagctttcagtttaaaatatacaacctaagatgcaagatacgtttttttcctttctagttttacagtattactggcactatgaaaataaattttcatacattccctcctttaatccccctagtaaccacataagaattatttgacatatccttatttttcaagaaggaacttaaaat

SEQ ID NO: 98476 - DNA, 1029 bp, Homo sapiens
tgtaaagtggcaaaaacaatgtcttccaaggttgatgtgacattccacatgtaaaaacatttgtcttaatatgtaactcatattatatactcaaatgttttcattccactactccctcaaatgttttctttcttttcaagtccctgtaaagttgcagctatttatgtcccctttcattttgacatttaaaaattatgtctaatgctgggtgagatggcccatgtctataatcccatcactttgggaggctgagacggcaggatcacttgaagccagcagtttgagaccagcctgggcaataaaatgagacctctgtctctaccaaaaaaaaaaaagtgtgtgtgtgtgtgtgtgtgtgtgtgtgtgtgtgtgtatctacctcattgtgtttgggtatgggtttagatcaggaataggcagactctgatgacctgtttttgtaaattaacgtttattgggaaacagacccattcatttacttatcatctggttgctttcactttatattggcaagttgagtagttggaactttttcagagtgaaatatttgctctgtctctatatagaaatagtttggtgacctctgggttagtccgtgaattagtagttttaaaaaatagcaactgctgggcccagtatggtaatcccagcactttgggaggctgaggcgggcggatcacttgagactaggagttggagatgagcctggccgacatagagaaaccccatctctactgaaaataaaaaaattagccgggcctggtggcgcatgcctgtaatctcaactacttgggaggctgaggcacgagaactgcatgaacccaggaggtataggttgcagtgagccgagattgcgccattgcactcctgcctgggtgacagcaagactctatctcaaacaaacaaaaaaaccaactgctgtaataaattttgactagtaattaagatatctgtttagtattctataggctgcttgctattgggctgtagctgtttataatgggatccttggaaggcatagatgcttca

SEQ ID NO: 98477 - DNA, 1795 bp, Homo sapiens
ataggctaataaagttatatattatgtaactagtatataattttatgttttaaaattatgttttataaaataatattttatgcatattttatatagcttagtacatgataaagcattgcaaactattggggaaacattattctacacacatggggaaaatagtcataataaagaagccatggaagttcttggtataagaactgagttactatattgccactgtaggaatcattcagttgtaagaaaaagtattcaacctaaattctctatttttctaatttaaaaactgaaattccaaaaaacatacatttttattgtgatcatttagacagtttaattgtatatcttatgcttgcttgatagtgacttgagtaggatatttttacttttaatttgctaagtttttttgttacatcaaggaaaaaggaaaggacaaaatgaactgataattactcaaaaccttggctttactaatgatattaaaccttttagatgaagtagatggaggagatacacaaaagaagcaactcataaatcctcatgtggaacttcgtaagtatgagatattatatcattggtttggggagagggactacagttgagccatctctattatttgagaattctagcttcatactaaataaatgtcccagttcttgaaatgaatattaagtctttatgctgacatgaggtatatttaatcaacagtttataaaatataaatttaatttataaagaaatttaatcaaaagtataatttatttgtaaattatgctcttatttctaatagttaaacatttacttattatgtaatctagagccacagaattttgacagttgcatttagaattgtgtatatgtgtgccagaaacgtattatccagaataatatgtacagtacattttaagatatttattaagaattactataaaagtacaatgatgttaatatggtaggtaacaagtgtaaaattagaactgagtcttttttttatgtgatttttatttttttctctttttttggaaagtatgtaaggatggtcatacgatgttctttaattccccctgaagatcagtttaacaaaattgtgataaatagggatttggatctaacatgcaaaatgccatcatgaagaaacttaagtggttgcatttggccagggtagggagtgagggagcggaggaggaaagatattttctgagtcataaagctttttaaaaaaacttctgttgtttatagaattttcagatgctaatgccaagttttactgtcggctctactatgcgggagagtttcataagatgcgtgaagtgattctggacagcagtgaagaagatttcattcgttccctctcccactcatcaccctggcaggcccggggaggcaaatcaggagctgccttctatgcaactgagggtgagcctttctcatcgtttattgattggttcagtagtcttcatctctttacctcagaaaatgcagcaggaaggatattgcttaataagaactttcataactatgacttactagttttaacagaggtgtttataaagttttatttagtagttttaaaaagtagatcttctagaactgaacttagatgtgttattgacaaaagtagagggtttttgactatataaatccacaggatcccttcagttaattgagaattgtgttctgatcaaaattttcactgtgacattagaaaattccccttaaaatcataaaacaacctaatcatttaggatctttggaatgatgtgttatagattacagtatatattgtgattgagta

SEQ ID NO: 98478 - DNA, 1102 bp, Homo sapiens
gcattgcttttcctaccacccaaatattcctgtgttatgctcttctacattgctgtaagtaattgtccagagtttggtatcaaaactatgtttcttaagactatttgcatctctctctttttttttttaacactgttttgtgatccaatgatgtatttctggagttacttgttaatgtatcttgaagttgattaaattggccagtgtatttcggaaacgtttcagtaattgagtacctaggtgttaattttaaatgatagaattatgttactgtgtattttatgtactgtacaatgatatcaccatgcgtttaaaaacttaaaaattatgattcaattttcagttaaactttggagtgtgtgtaatggtagtgactataaggagtctttctgccttttttatttacttacattaactaatcatttgtggcaacctgtacataaatgacaaagcattttctttttactaggtttttgatttgaagggctctcttaggaatcggaatgtaaaaactgacactggaaaagagagttgtgatgtggtcctgctagatgaaaatctcctaaagatggttcgagacaaccctctatatattcgttctcattccaaagctgtgctgagaacctcgatccatagtgactcccatttcctttctagccacctcattatagattattctttgctggttgggcgagatgatactagcaatgagctagtagttggaattataggtaagtcaatgagtaccctgcttatatttcatgattgaagtcagagtcaaattttaaagattctattgaacctggtctaataatagcttattgaatattttcacaaactttcatttgaaatttcaaaaataagttttttattctagtctcttctactcagtttcctcattttcattatctctaccaaaaatatgtgaattaaaaaagtcacttataaatgaggacttttgtgattgttgtgaggattaaacaaattagtgtggagaaaccctgagaacagcacttggcacattgttagcactcaataaaagttaactgtcatagaagtagtagtaatagtcattgctgttgtcatttgattatatttatta

SEQ ID NO: 98479 - DNA, 2115 bp, Homo sapiens
ttaaaattttaaaagtggatactgattcttttttttagttgtaaaaaataagtggttatcattgatttcattgtcatttctaaagtgaccaaacaataatgagaattatataggtggggaaatattgggtgtaaatatgtgttaaaatgtcagaggttctcaaaaagattttttaaaaagccagatgttctgaataagagattgtctttaattaacacttgagacttccaagttctctaagcactgttagcctcatttgtgctcttagacatcgctcatctctaggcaggagctagtctttttaaacagaaactcgtaccaggtaggactttgtcccatggcatgtggcacaacagataacctttcctgcccactcagactgcttctgcatgtgtatctttatggcagtttatatgaaagaacatggtcagttgacttcagttgcccaatcaattatataacagctttttcccccttttctctttcataatctcaggtaaaatgccaacagtggtgtctccggagttgtacaggactaggttttgtgaggcaatggacaagtatttcctaatggtaccagaccactggacaggcttgggtctgaattgctgaaatcaagcacatattttgaaatggactgtgaaggaaaaggggacaggaacaaaggaccaaaaataagctacatgttttatttcttcatcgtgttcaccactgtatgccaaggcttttcagttctgtggctgtttagactgtccgtaatggaatggtaaaactccatgaatttgcactttggtttttgatacctgtggagctgtctgtaggttgggaagtggcatgaaaattttcttaagctaaaatacagacatgtttcaaagggctaaagttggagatgagtagatagggtgaaaaatgggttaaatttgctagcttaattgttttaagaagaaaacagtgtctcataaattgactatcctggcatcacatttaacatgttatctacttagaaagcatttgtagagctgctgaatttgttttgtgtttttctgtaataatttaatgttacttattatcagaatttctgaaacctttacaaaaattctgatttattccattaatggccggttaaacacgtgggcatttattgttttattgaggaatttgacttaaactgggaatcctgtcatgttgtttatctttccagcttgcctgtttttgagtatgtttgatgtttttaaaattttgtcttctctgtggaagacaggaggctacagcaattaactttaagcctccttttagagatatttttaaaacttgtttaaaatttttgtgcaattcatatattaaattgcacttacttgcatacgctcatattctagggttttttctctatttttagggtatcatagtaaatcattagtaaatgagtctgtagttactaaaccctaatggaataattattaatgaaagatttttgaaatataaaaaataaattaggcccaatccaagaaattgagtgagaaggaaacacttgttttattcacagaggtaaagtgtcttttcaatataaccagcaatttaggtggcatctataaaataaaaaatttctactgtggacatccccttttccaactttctacataatggctagttctgactactaagaaatgttaagaaataggccaagtgcggtggctcacgcctataatcctatcactttgggaggcctaggcaggcagatcacctgaggtcaggagttcaagaccagcctggccaacatgacgaaaccccatctctactaaaaagacaaaaaattagctgggcatggtggcatatacctgtaaccccaactacttgggtggctgaggcaggagaattgtttgaacctgggaggcggaggctgcagtgagctgggattacaccattgcattccagcctgggcaacagagcaagactgtctcaaaaaacaaaacgaaacaaaaaaagaaagttattcttagtaaggaacttcttgtttaatagcatttttgtttattttaaaaagtgatcagaagtagtaaactatctttgaggaaatactgtaaccccagaatatttcctcttgacttctttttgtaa

SEQ ID NO: 98480 - DNA, 2020 bp, Homo sapiens
tattaacttactttgtgtctaggaacaatggattttgtatctgatttaaaatgccaacactgttttgtctctgttcattttttctgtgaggatacttaaggttattattcctgtctgtttcctgtactcccctagtcatgagcacttgaagtacaaggtgtctccccctaggtgcaattaggttgtttctttgtttttagtttcaattctatgtgcatagcaggaatgctccacaggaatggcttctgacaataatctgtcctgttgattttgttttccttgcccatgacttgaacaactgtgttttaaagtactgtagtctagtaggtaactttgtggcaaaaattttcaatataatacattctgaaacaatagttgctgccttgcaaaggtaatctctcattttaaaattggacagtattaatgaaggggaaatatacaatttatttctattgagtggtagaactatatgtctggtcccttgctgctcttgtttaggccactatcatagatatatttcaaatattgtactactcagtgttaagtattgaatgactgtttccctttccttcaaggcctagagtatattctgaaaatttaggaatgaggaagaaatcttaatacttccttccttaacatacaacatgagtcccgagaataattgatagtagcaagagaaaactatgtcagtaacatgttgctttgtataaaaatcttatttataaatgtgaagctttttgatgccatcaaaacttattaaaaaataggatttacttttttctaattctgacctaagaaaaataatgagaacaagctgttgcaagctcttttgtagtctattgaatattttatagatattcaaaatttcctacaaactataattttttccatgatttagcagtgagtgattttctagctttggctcttattaggtattgtaaatagtagggttatatcgatatcagcttttgtgatggcattgtggtcatcagcttcatgacattttacccatttgcagtgatcctgtgtaaaactgccaaggaaagtaattacctgtaggagtttgctgagcttgaagagtgaaaactgttgtgaatgagcctgatcataaaacggaccaggccattcattattcctcaagtgttaatatactgacttatgcagtattcaaaccatctagtgcaatgtttttgtttttgttttttttttggtaacacaggtgcagtgtattatagaaaaaataaaaactacaatcattagcagttttaatactgctgtgtcagttttgtaaaaaatgtacattatgtcttttgacatgttgaattttaaactagggaaatgacattgtaaatcatagtagcctcttttaatttaatatgaaaaatgccactatattgaaagtacttaatgtattgtatatatttctctactttggttctagctattttatatgattgacatgttatttaaaagataactgccttgaacttttggagacttgtactgtaaataaagaaatcttaacaataaactcagaatctacttactccacttagttttgaatctgcttgaagaaattgacaacaaaaggaaatggagtttgtcctgcaagcctagtctttgtgttactggtggagggtgtccaggttcttggcgttttgaacaaagaattggacaaaacacaaaaagcaaggaaagaatgaagcaacaaaagcagagatttattgaaaacgaaagtacattccacagagtaggagcccaggagcactggggcacaacagctcccgttacagaactttctggggtttaaataccctctagggatttaccattggttagttggtgtacaccctgtgtaaattaattagtggcctgcaatcagtgtgattggttgcagaaagcaacccatcaggctgaagtgaagttacaaaggttaaaccctatgcaagtgtcgttgtggaaaacaaccagtcagaggccgaagttacaaaggttacaccctatgcaagcatctcattgg

SEQ ID NO: 98481 - DNA, 1053 bp, Homo sapiens
aaatatgggacaagcatggttactcatgcctataatcctagcattttgggagtctgaggcaagagttcaagaccagcctaagcaacatagaccccaaatctacaaaataattttttttttaattagccaggtgtgatagtgcatgtctgtagtcctagctattcaggagactgaagtgaaaggattgcttgaaccatagagtttaaggctacagtgagctatgattgtgccactgtactccagcctgcatgacagagccagatcctctctctctctctctctctatatatatatatatgttatatatatatgttatatatatgttatatatatgttatatatatgttatatatatatgttatatatatgttatatatatatgttatatatatgtgttttatatatataaagcaaatcaacaaataattcaaatatattttaaattctgaatagtattcttggaattatatccaaaatatgggctttttaatattgagatattactaagcatcaaatataaattaaaatgtatttcaaaggattaatgaaagagctttaaaaagaatcagaaaagtaattaatttcttctatatagacaaccctgcttgtgctatagaatatcaaatatacagcatattgttctcctctagttgacagtcactagagatataagacataaaactagtattaaaaataatataatttacaacaatattaatggtaaaaaaaaaagtatgtcttataagtgccagcaaattcagaggagggagtgtcattgccatgtgcagaagtgaaacacattatgtcagaagtggcatgagtgtgtgtaggtttggaaaagcacctagataggacaatagcaatatcaaaggcactgaggacaatagcaatagcaaaggcactgaggtgacagtgagcaaagcaaaccagattgcatgtaatagagggttccttttggagaacagttgcctgtgtgggtggtgctggatttgtagatgtccttagtaagagatttggtttcattgtaaggccactggcatcagtgaaggattt

SEQ ID NO: 98482 - DNA, 1049 bp, Homo sapiens
accattaacaccagcaaagtagtcagaagtttaagacatctatctcaagttaatgcaggaaattagaacccccatctttaattctttctcggggactaaaatttgaaatgtatgtgtctctctagttcagtatttcttgtctttgctcaaggattaattatattactcagtctcaatgaataaggaaattaataattcatgcctaaatattacataggtgaacatttttgttgtactaattagtatcttgtaattaaaagtcttgtatgacaagtacgtgagactgtcggctgaaataaccatacattccaattagattcagtaagtcagtatcatttatggggaggaagcctatttgtctaaaattagaacctgggctgggctgatattttgaatcaagatctgaagtgaattttggttgcagtttagtaaaattaagatattttgtcagagggaaaatgaaaattaaagtaaaattcaaacctcattacagtaattactaaaggagtatgtaagttaattgtttaacttgaaatttaattataataactatttttatttttcaaactgagtcatcgttgaaacttagtttgctattcaaccgtgtattctttgaggaaatttgaaagacacttggtttcttgattaaaagttcttatcgggagcaatttttaaaaatagtatatttttaaaattttaaagtactttataaaatctcacactttcaaaaagaaatgtttgattgtcacatataaaaaagcttaagtcaagcttttttgtgatgatgtgttaccatcactactcttacagacatggttttttttgtttgtttgaatgctacattgtttttgcctgattctgtaatcaataaatttcctaaggactatttagttgtaattctcttgaaattaaaaaataatgtatatggatcactcagattttgatttagaatcaattgtgataccttaacacataagtatctaattagctccaaagcggcttccacatttaagtaatattaaaaattgctaataaagcctaatcctatt

SEQ ID NO: 98483 - DNA, 1031 bp, Homo sapiens
ttaataatatggtcttttaaaatttgttctgataagtcatgctatttctaatttgttttatttcatacaaaataataaaagtcaacttcttaccatttcttaacttgtctcatgaaagtgttcctttggagaagtgtccctgtcgtgctttctggtctgcttttaggtaaggtctgacttctgccactagaggcctgagaatgtttttcttctttttttggcctctctctggggaggaagcagctttcaacatattctttccttgtgaatttgtaaaagttgaaatcaaggcatgcttattagttagtaattataattcttatatataccaatgagatataatcataatacatttacaaagagaaatcataaaaatgtatgtactgaaaatcagtgcccatatttcacatatgaggaaactggaatctaacctaaactgcccaggataaaagggtaaaacctgagttataacattttaactgttgctaaaagaaatcattgaaataatctatggtagttgtctcgtcccactttcttttttatctttgtagatgcgtctttattgaaagtttgaatgttggtaaaatactattatttgcctgagtcaaaggagagactgtagattcagtgaagtaaagaaaattgttggtgtagggattgccttttaaactagctctcagtcgctagatttagagtggtttatatagtttttgacatacagacatctccctcactctgagacatctaattataaacatgacaaatattacaggtgttcaaatcacagagtttaggaatgactaatggatgactggggaaaattagctgtattactgtattatttttcttcatgaacaggtctgtctacagtaacaagtccaaaatttgagactgtgctctatgccatcccaaattctttgaatgattgaaatggttcactaaaatagatgattatatctcagtataaagaaaaaattagcttgtcccttgttgacatagcttcaatgttagtctttttttctgaggaatta

SEQ ID NO: 98484 - DNA, 1059 bp, Homo sapiens
gttggtacatgctgaatgtttattagacaaagctttccatttctctctttcagagaagacaattttaatataactcaaaatgcttttttaaattttagattgaatgtattttactattctgggaacttctcatcttaaaaaaaaacaaaacaagtttcttatcatccagaatagaggaaggtgcatctagaataaacatttagaaaatactttaaaaatgggtatgaattttaagccaaagccttctcgagaccatgattgtggatcctagttttggaaatgagagttctgtccatctcaaagtgatagcagtcacttggaaagaagatctattgacctctgacataagattgtttcctatactttggaattaaacatctcagtaaaccgacgctgaagaaagagatccatttacagaaagtggtaaattagtcaaacctgtagtagtcctccccacgatttgtttttcttagtttttttttttttttcatcattctgctatacgtataattcaggctgtaatttaggaaatacaatgctacttgccactagccatcctgaaagtgaaatatagtatcctggtcagagccctatttccctaatggtgattaaaactgggcagaaagcccaatgtaataaaacagtctccaagctttttcaccaaccttggtctgggaaaagcaacattagaggttttatgtcttgaaaaatatacgacgtccatatgattaagtgctcttcattttcttctcaaccacagggtgcacattcaggccttaattgtgccagctgttctcttaacccatcacctaaatattgcttttgaatataatccgtcttgacacaaagccttttaagttttctttattacaattgatctttcttatactaaattaaacttcattttctcatttgagaaaagtgagctctttggaaaaaaaataaaaacagatttttttattctgcacatgtaaaggcaattcctttttcctgtcctaattgaattcagttaagcattcaaaaccttcatcacaaagattggctgagctatttttcttt

SEQ ID NO: 98485 - DNA, 1047 bp, Homo sapiens
cctctatacaaaatattaaaaaaaaaaaaaaagccaggtgtggtggtgcatgcctgtagtcccagctactgcggaggctgaggtgtgaggatggcttgagcctgggagattgagactgcagtgagctgtgatagggctactgcactccagcctggggaacagagcgagactctgtctcaaaaaataaaataaagatactaaaaatactggtagattactcttattctattgtattaagaaagtgctacttgggctaaagttttgtagcacctgattaggatcagttaggtgtggggaaaatagaatgaaaaacaaacaaacaaaaaattctggtaaacacgtcattattgctagttacctgtaagagaatgacatcaattttagtggttaggaacccagcctctgaaatcaagcagtccagtttaaaatccctatcatgctatctcctgtgacccttagcaagtgactctctgtgcctgatgtccttatctttaaaatggagataaccataatattatctacctcatacatttattttaaaaactatgtgagttaacgcatccaaagaattcccagcatagagcagcactcagtgattattagcttaattatctaattgaagacaaatgtttactactgccaagttgaaaatgtatctggatatttgaaatacaatttacaaaacctcactatagaagaacgtgaaacaggagcagtaagagataacatagttgtgtcatggacacccagcacatcacagctgctgcgactctcctgttgcagagtccactttctaaatatatgtagggcaggcatacataaataatttaggtttttgatgtttatcatacattattaaaataccaacttctagtgactgctatcttcaactcactataaggttccgcatttttattttgttgatatgtctcccatttccactctagatttaattatctaaatagaaatgttttaattgatgtcttgtgatatttgttttaaatttgaaggaaattgcccgtattttcatcagacattctccctcta

SEQ ID NO: 98486 - DNA, 1099 bp, Homo sapiens
ggaatctgaggaagtacttaatatgtaacatggattaacagcagatctgtgtcatagattaatattttcagacttatgggaaaccctaacttttgctgcagctacatttgttccagacatgggatttccttttgtagtgtatagattccattagaattctgaccgttttttggtcccttttatgtaacatgaaatgcaatgataatattaaaatgtatgaaaatatactttatgataaataggtctgaagtcaattctcatatacctcttttggggatttgcaattttatttattaaattatgtagaactttagttataacagcaacacagaaggagttacctacacctggactcacccgagagaaagcctctgactcagagaagtgggtccagaaatctgtggaatgctccgttttcgcttattagtagtgcattgccaaagctttcaggaaattagagctttggggaacagatttgctttattgtcaaggattgcctatagctgtacattcctttgaaattcaggtttcactcagatgacaaaatgatggtttggtaggcctaggaggatgtgtactttccaaactggagaaaatctaggttgtggtattaatcttaaaagcaccccaatgttagacacagctgcctgcctgacatgtgcctcaggtttatcctacatgtttacaaagctcagttgtaaatctgagtattaatgagaagatgttccatgaaagattttcaacaaataattaataatgcattcagttaaccataaaggcatttcaaggaaaaactcagactttgaagacaaatgatttgaataaatggataaaaataagcttaggggcttttgcagattcatcactcaactctcttacttcattatccacataaatacagcattattcagatgcattttaaccttcaaataactcatacttcttattgctgtttttatcataaaccttgagtaaggtagcctcttaaactatttatatacctaacatagataaaataaaaattaaaaagaaggaaaaacaaaaggaacttggttgggaatatgtaagaactttttgccatacatctttgaggtaatga

SEQ ID NO: 98487 - DNA, 1045 bp, Homo sapiens
tttggccattccactgggcgtggtggctcacacctgtaatcccagcactttgggaggccgaggcaggcagatcactttaggtcaggagttcaagaccagcctggccaacatggtgaaactccatctctgccaaaaatacaaaaaaaaaaaaaaaaaaaaaaaaagccgggtgtggtgaagcatgcctgtaatcccagctactcaggaggctgaggcagaagaatcgcttaaacgcgggaggcagaggttgtagtgagccaagatcatgccactgcactccagcctggatgatagagaaagactctgtctcaaaaaaataaagagaaaaaccaaatttggccactgggagccccaccaagacagtagtggtgtcctttcatcaagtctcattagtcagtccttcaacacttctctgctttctggtgcaacaagatgtccagagactctttgtattttccctgtgccagtcctggagtcagccacatttttttttcaaggacttcttgttccttttagtggtaaatggcatttataaaccaagactggggtgtcattgcttctaggacaaaatgaagtaattgctttgagagtacttggtgaaatataaaatgctatattatcatgactatgattagtgctatgaaacaagtattcagcttacttggaacaatgccaaataggagcaccaatataaatctgtgtgcagggaataagtaggaggtaggatatatgtgagggtgaaggaaataaataagctagcttggttagatacaacatgagtccttgtcttctgactctgagactaaacagaacagatgaaaggctatggattgcattctcacctgttccctgtgctgctttgttatttaatacttcagataggaaagcatattttattttgtgatacattgaaatcttttcaaaaaaatgaaacatttatgtgaagaatgataaaacatacatttgtgatttcttgtgtttttacttttcttacatttatttagtaggtctgaaagaacagtgtaatttagggaatataagattt

SEQ ID NO: 98488 - DNA, 1044 bp, Homo sapiens
aattcttagttctatgtttatctcttcctcttctgataccttctaagtgttaggctgaattacaaactaattagctgagaagtccagggattgaatttctgctctaccacttaccagctgtgttcccctgggcactttactaaacctaattaggcctatttcctcaactgtaaaatggaggcacatgactctcagaattgttgaataaaataatgtactcaaaaagactggcactttataggttcttaatcattttatcagaatcatgtcatatgcttttcaaattcgcaaatattagaataaataactgaatgtaaattactgaaaaatggaccaagcccgtatctaataacaggcattatagtataatgatggtttttgttttttgatttatatgttggcgattctgagaaaggaaagagctttatgacattatgtgcttgtgggaattttggaagccattatgaaaaaggcacaattttaaatgaacctaaaaggaaatgtaagatttgggttggaagagaagaaatcagtgattcctgaaataaacttacgattacgataggcctcaatgggtaatggatttttgtgaaaaggatgatacgggaagcatcttagctgtccattcttttgtcataatagcgtagttctgtaagggctgcttcacacaaatactttcacttgttgccatattcctaaaatacaaattttacttccatttctcatttcatgtgcttttactttacagttgccatttatttactaaaagccaatgtaaaacatactctccctactaaggagaatgtgcccttacaatttgtttatttaatatacacataatcatatagtctttatttacacagccatggttacatggtatgtgtgtaaaatatatgcttatacaagaacccttttgcataatattcactatagatcctaaaacttatgaatgaagaacttctaaaacaatggcaccataatatttattacaatttttattatgaaggtacattacattaatagagtgccctctaccccatgtca

SEQ ID NO: 98489 - DNA, 1050 bp, Homo sapiens
ggaaattgcattatttcagatattgaacaaaagctaatactagtcttgagacacataaaattatattgcacttcttcttcagaaattactcagtggaatcgtgtatgaaatcccccaaacaggattatttcacctagatattgtaaaactcttgagaccattctctctttttagatttcactcaaagtaagtgaaaatatttatgtttggtggaaaaaaaatctatttggtatttgcccatctgattaaatccagagagcatatatttcacatgaagatctatttcctaatcttcagactcattcagcaactcattatattaattttgaactttaggatatgtgtatgaattggaaaagggtgaaattatttaactgctaaaaaatgactccaatgcgttgtcaataggaactaataagttctgttatgatttgtctggatattggagaaggggcatacaatctcaccaacaggcctctggcatctaaattttggaggaccagttaaaaattcatctagcggtatgctgacaaaatgcatataataaaaaatgagtttattaaaatagtaggttgggtgattaaagcagaacagaatttgactactagagtcaaattctgggacctatatcatggtttttctagtcaatattgtggtgagttaattcctttactgatttcactcatttttttcacttacatttttaacacatagtatagtgcctgggtcacagtaggaattcaataaatatttatttaattatttcacaaataaatgaatttgtcagcattttcccctattacttttttgttcttgcctttcttaaaattatacactgtgaaacagacatctggtcattttttttttagttacccaaaatattcattacatgtttctaataaataataattagatcattacactggatataaaagtgacaaaccatgtatagaaatttctttaggctgtacggaataggatttttctggttttagattaaaacggaaagaattcttgaaatgtcccctttcactttcatcagctggggga

SEQ ID NO: 98490 - DNA, 1045 bp, Homo sapiens
ttctttgcatcatcaagctggaattgactatttgcagaatttgaataccatgcccatgcattcaattgttaagagtctcagagtagcacagaatcatctctggtcttccaagattgtctctctttctcaaaatagaagtctgagtaagttttgttttttgtttttgtttttgttttgttctgcaggttccatttcagtctgcctcagatggtttgcattaaccttttttcagattctctcctggtgttaatgactacattatgaccattttaaaaagccagatgtacattgatccacctatggcaattattaaggaaaagatactccatttaatgcattataaccaaaatatctttcttcaccacgtgtaggaacttaagaaatgatgtctctttttgggaagatcttacattttatttccaaggtgaacaatggttgtacttagttttctttaaaactattttcttgctttttatatgattttctcatggtaagatttcatgttaacatatacagaataaggtgaagcatgcaagcgttaaggattcttctgacatagtgcccaagagccaccaattaacataattttgaacataacttcaggaaaatttgtgatatttcagagtcttaaaaaaaaacctaagtagactgcctatactttaaatagtgggagcagaaattcctaaaatgattgactttccaagatgacatttgaggaaatatgagatctaacaatcgaaacattttaaaaatcatacaagaactcatgagcctgagaaattcacataattctggctgtacttttcctctgtaggaaagtggataatccaagagataaaagagaaataataaatgtaatatattacattaagcatgcaatgtttgcatgcttaatggaataagctccctatgttatgttcacaaacacaaccagggtatagactgtgaattacaaagttgttagaataatgcaaccagttaagaagctgcatttagattttaaggacaaaaaaaaataatcacttctgtaccacttttaagtaat

SEQ ID NO: 98491 - DNA, 1054 bp, Homo sapiens
aagaactaatattccagaaatggtctgtaaaactcaagatgaactaattgacccattcttgatattaaacataggttattgtacatgttttctttgaccatagaaagccacacggtttgctacaaatttttcctatcttggtacaaccaatatcagatcagaagatttccccaaagtaatagctactattttttctctttcagttgcaggagaaataacaaggcattgaagaatggcagatgaacggaaagatgaagcaaaggcacctcactggacctcagcaccgctaacagaggcatctgcacactcacatccacctgagattaaggatcaaggcggagcaggggaaggacttgtccgaagcgccaatggattcccatacagggaggatgaagagggtgcctttggagagcatgggtcacagggcacctattcaaataccaaagagaatgggatcaacggagagctgacctcagctgacagagaaacagcaggtaactaagggctctactgtcaccaagtgcttgctttgtgctttgaagtcagtttagtctgaaagtgaattaatatacagcactgatcctctttcactagtgctaggactgaaattccagtcagtcagaggaaataaaagaagagaaaaatcatggcaactaacttgacatttccccacattatctgtattctcaatcccattcccctatttaatttttatcacgtgaatttttgcaggctgagtatatgtatgttttgctagaaactgtcagcattttaactcattgaaagaaaactttacaaatagtttttttttaattctcttaaatgaccttggacctaaatccaatggattgattagaagcatattttttagagcagaaaaaagcaaaatacgtaaatacatactgtaatttttttaatccatcattcaacaaattacagtttagcttttctacatgcaaggtgttgtgttagcttctgtgccagtgcatgtgcaagaaatggtcccagaacttcatgaatcagatgatcttggagcagacatgagacttgtgca

SEQ ID NO: 98492 - DNA, 1051 bp, Homo sapiens
taagtgaaactaagttcttctaaactaaatttctaaaatatgtgagtttttaaattaggaacaattgtagtggaaataaatatgatttatactaaatgagaaaatgaaaagctaaaaagctacatggatttgaaaacatgtaaattaacttgattagactttatccaaaaaggtaacattataatgcagttatattaaaattcttttaactgtaatcaaaatctatggcattataaaaattttcttaaaataacaagttagaatttaaatttttaaaatgctacttaaaatgccataattaaattacaaaactaaaaatgagtgctaaatgtgaagagattgataatgtagatttttttttctctctctgtttctctctgaggatattaatatttctaaaaaacaaaataaaagaaaattccttttctttttatctgtagtctttccctcagggccgtttaaacaatgcacaattatttcataagaattttgtaagaatcttccatttacaaaactataaaacagctcatatatttctctctaattccttaagtgaccaaatggaatttacttatttttactgacatttcaagtgtaaatgagaaacaaattagtgcaataactcatgaacttgaaaagtttatctttacatcttaaatgttaacttttttatgtgatatacatggtttggggggtggttattttggccgtttgattgccactcaattatctttccttggtgattttgttttgaattacagaaataagactttattactaatgtgcatattttttctttagtgtcaaagagaattatacatgaactacattactgatatttcagggagtttaacaatatgataatagttgtgtcccagaggtagacttttgtaaacagatttaaatttaaccttgaccttgtttttaacacattttattttacttactttttgaaaatgttcattttctccaacatcatacaatgcaatgaagctaacataacttgacttaggtagtcccttaccttggaaatgctaaataaattatattt

SEQ ID NO: 98493 - DNA, 1043 bp, Homo sapiens
aaccctttcagctctcaaactttaaaataaattgccttttaatgagactttaaaagtcatcactattagcagattatacatcatagttttccaaccagtacctaatgtatgttgcattagaatattaatttgttcatcccaatggtaaaataaaaaaacagctgaggtcttcatgaggtcattctaatggagctgaaagtgttcctttagcaatatttctgtcgtttcatgtattgttctgtggtcatgatgtcaacatctttttcatccctaagaagaagaaacgctagagagtcggatggctgaggaagagaaacctgctgctcttcctgagaaagagtgtggggctgctaagtcctcagaccaacccaagggcctcagtaagggccaaatggagtctagtgcggaggcccaaatagttcccgaagagagtgccccagcaggggccccacatgagaaaagtgtaaaagaggtcaaggaggtgtctccagaagtaaaaaccccttcctctgctggggaaggtgtgtctttctcaggatttgcatgtgttttgttgcaaatgatctctccagtggcttaccaacctgatgcctttccaacgctatttcgctatttcatcgctgggtcttatgataacaagtccactgttgtaggcttaatgtgcagagagtgtggcttgcgcaagtgctgtgtggcagctggttttccagtgctgcagctgattcctggttttcctttgccatgatacaatacgctttgcagccaggctgatgatgctatgtgagcttctttttttattttatttttttacccgccccccctcatctcaaatgtttgccagtcacattgctaatacatgtatatttttgtttttattttggggacagcaattcatatgcttttatttcaaatcgtacagttggattttggcacatagaggcttaaatggtggaatcgtttttgtttgcaaccgaaatgtgctatattttttatgcttcaatgaatactggtttgattttcttgacctcctgctgatgcttctc

SEQ ID NO: 98494 - DNA, 1049 bp, Homo sapiens
gcagggcttgtgaatatttctcatttagcattgaaataataatatttaggcatgagctcttggcaggagtgggctctgagcagttgttatattcattctttataaaccataaaataaataatctcatccccaaactgtagtaattgttacaattttctatttaaaaaatgaatagtacatgcagaaattgacctgatttccatttgcaacaggaagacactggctttacatgggttcaattggacaattatttttgctctgctctgttttgcatggagtattattattttaaaaattgcatttttacctttcatgtgcctgaaggctatccactacattctgaaggccttgttaaaatccaagctgctcatttcactattctgtttctgagtgagaagataaaaactgcccattgtaacttatttcaggttaaattaaaccaaggagtctgattgcaggaagggaagagcatgtaagaaataagtttttttaaagtgttattttgtataaatgggaagaaagattcaattaagttattaacatttgggacctggataattatatcagagtatgtcagtccaataaattatttaactaattaaaaaatagttgcaaagcatttgagctgtggttgaggaagtggtgtaaaagtgcatccattaggaatgatgcactttcattaggatggactcgtgtctgattagaatgtcagttgatcagctagatttgtgtccacactaccagtttcacaccccctttccatctgtttgatacagtattatagatataaatatatatatatttctctgtggccatttgtgatacttcctcatatacttgaatattatacttctttattcacagtatctgtgtctcctgcaccctttggtgttgcaattttagatatgtgaaagtagatgttagcagggttctctccctatttaaaaaaaatacattaaaaaagacaaaaaattttagcatgaagttgctttctgtaacaactcaaagccgtaaccctgttttagtgccagatacaagtctctcccgtg

SEQ ID NO: 98495 - DNA, 1016 bp, Homo sapiens
agaaagaaaaaatacaatactttgggaagctatagctataaaacacttgagacacagatatctaaatcagtttttttccaagactccaacattgcactctgtaaagtaacacactgtgatctagtattatttatcagtagataatactgttctgactgtatatacagtctagaactcacaaatcaattagttcctctcacaaatcattcatcttagacttacaaataaggaatgaaatagtcaatggcctgattaaggcaaagagctaccaggctagatggacactttttaaaaattttatctgttctttttcttgctcagggctggtaggttggatctgaaccattaaaatcaaatggtccactaggcgtatgatctctttgagccaaatcagttcctgaatataaaggaggaaatgatgaggatgtactgaggcaacggggaagtatagaaacatccaagacaaaagccaagggatgcaaaggcagagacacaggtgctttttggtgacccagtggatatggcaaccagtgtaactgccatacaagaaaccctaggagcaaacccacaccactcattctcagctaagagattttacacaggcaaacgtgtcttaaaccatctataaatcagttattttatatgacagtcaaaaccttagaaaccttaggatcattatatctattttctgcctattaattgctgtgaggtttgatttgaccaatctgggcaatttattcatcagcttcccttgaagtgcaccagaaaatagaagaaaggtgtgtggagacttagggtattttattacatgttttcatagtcttaaatagtgattaaatttctctagaaagaagttaacagctcattagaaaagttttaacctgtgaaataagtatttttctcaacattctttaaagtttttatataagttaacactaggtaaacattctgcatactagaagtcagtttattacaaatacatgtcaaaaataaagattatacaaggcaccaaacta

SEQ ID NO: 98496 - DNA, 1051 bp, Homo sapiens
acatagtagtaacacaattttgacacacacatacttaattttttttaaaaaggcaaatggatgcacagataaacctacaagctattttataacttaatggctttcagaaaactctagtatgaaggcctaagttacagggggagaccaataagtgttaactgcatttatagtaaaccaaagactggcagtccagtgtgaatgcaaatgcagcaatgcaaggaaaataatgcatgaagcctgagttgaataaaatacacattttaattagagtctgggaaggatagctttgtagtataggcttttattgtttatataacaaatgtatgatcacagttgattagtttataatgaaaatatatttgctagatttagaagcagttttcctggttgtaacccaggaatattgtttggtttcacattaaaataaaatattgctcctctatagaacccctcaaacaatctattagcagagttgttttaaaccaaacacaatataaattaaaaagacaataaattaggatggcagttgagacaatgctagagaaattcttgattgcaaatgatttttttctcctttttaaactatttgagatagaaattataagcatagactaacagaaatctttcatcaatgtgaaatctagagatcatcccctgtcaattggcatagacagtgagaggttggtaataaagtatattactttaaggtgataaattcctcctgcgttgcttgagatgtgggagtggatcacagtgaatcagccaggcagacataggtccccatctggtgaatattggagctgcccatgccctttgtcacatttcacaggtagttcacaggccatgagaaatcctctggcacgggcacaggatacctatgaaagatccagttttctgtgaaaaactggcataaaatgccacggaggtcgaaggcttccattcacgggcatttcacatgtgtgtgagcaagaaggaggtggctctgaggaagaggggaggtttcccctctccacctgcccaagaaatttctgggagaactctgcagttcttg

SEQ ID NO: 98497 - DNA, 1056 bp, Homo sapiens
ccgggtcccaaacctcagttcctcccctccccccacgtaacgtgtggtcttccatcacttaggacccggaagcgacctaaatctttaggacatttcttcactttcagctagagaaactgaggcccaaggggagaagcatgacttgcccaagctcatatagctagttagtggcaaagctggggaaacagacttctctaacgatttaagttggcacctgcggttaggttcccgagttctgccacttgctgggttaccttggacaagccactaacctcattgagcttcagtttcataatttgaaaaatggaactactaacagaacctaccgcttaggcatcttggaagatgaaatgagcgagtacatgagaagtttacagtgcctggcgtatattaagttctctataattgttaattacatcattattacaattctgattttcctgtctattttctcttcaggcaccctgctcttcagggaggtcagttttttgtaagtaatttttaagcaccgtagttacagcacataatattgtttggagtcaggatattagtttctgaagttggttacagaatgaggaaacaaccccagagaaagcagtaagactccctcaagattacagaagattgtgacagacttgcaacttggctcttcctaggtttgccaagtagttctctgagccccactgttaactgactataaaaatcataaataccattatcttgagtggggatggaaaaataaatttattttaaataggtaaaaaccctgtgttccctcattcagtttgcaaattggtgttattttctaaaggtgatgatttccttttctttttaatgttaatctggctttgaagagttttatcttccattgctctatgtggttaaatgtattgtttctctttggcattttacccagttaccttaggagtccacccaactgataatgacaaaactttgaccatagagtactaaaaataataggccaaatgtgtaaaaagtttagtaaatattacctctcacaaaggttggcttttaattggccattatatgtaatta

SEQ ID NO: 98498 - DNA, 1241 bp, Homo sapiens
tactgtttggcaaatttgggacaccctgacttcgtgcttaggattgtagcccctttttgttatggcttagcgtagcctttgggtttttttttgagactactgatgcattcttgttcttccaatatacttcgtgaacctagtgcattgaattgattttcaaaagcacaaattaagtcacgtaactttggggttagtatttttatacgttttgtttaggttttcccaaaaaagtaaaagtgtattttttttggttcttttatttactcgggaggtggttattatacttttattttcataataaatgaaacctactgttaagacaacgaaactatttcccagactacacagcaaattaaaagaacagtatgtgaaattcagatctttaattccagaattgtaaaacattcaataggccttactgcctgcttctgtgacccttatttcaagttctaagtaaacacatgcatcttatccacagccctgacaatcattgctcaggcaaatgttagaatcacttttttaatgatagaaattaaacctccaaagaccaaggtgttattgagtgaaagtgtctgttcccatccaccttatgtgtccctctcagatgtgtcctgaatccttacctctctctcttgaatctcttctccgctagactttttccccttgtttgtttcgtttgttgtcattatagggacagatgagcatagtagttaagagtctggactttgtagccatagtgcctatgtttaattcctgcctccagcacttactggttgtgtgaccttgggcctctgttcctcatctgtaaaatacagttaataaaagtacctacctcatagggttgttgtgaggttttaatgatttaatatacagaaagtctttagaactgtgtgtggcccacatataagtttggtttttattagcactcattctacctgtcatctaactgtgagaccttaaacatagtttgtattttaactcccctcccacacacctaatcatttaacagatccaatcagttttgcctgtcttgtcattcttagtgttccttgccacttaccaagtggcaattgcagtcacctaccctcttgtaatttatttcccatcctatcttatttattaatatttctcactttaagatcttacttcatatttacagcaggacaaaagtccagacactgagcttggcatttgacacctttaatgtgatactaccaacctcccatcttttttttacacta

SEQ ID NO: 98499 - DNA, 1774 bp, Homo sapiens
tagctgtcaatctctgtcataggaactgtagcgtatttcctttacaaaacagtattctgaagcacctagtatggtacttgcatataggggattttttttgtttgtttttgtttttttttttttttttttttgagatggagtcttgctctgttgcccaggctggagtgcagtggcgtgatctcagctcactacagtctccacctcctgggtacaagcgatcttcctgcctcagcctcctgagtatctgggattatagacgcacgccaccacacccagctaatttttatatttttagtagagacggagtttcaccatgttggccaggctggtcttgaacacctgcccttgtgatctgccaccttgttctcccaaagtgctgggattacaggtgtgagccaccatgcccggccccggttttgttaaagatttaagtgaactagtgatagaacaaaaagattaactggagtagggtaaaggataagtaccgtgggtctggtagacttgatttgtttttgtttttgttttcgtttttgaggtaagtctcgctttgtcgcccaggctggaatacagtggcacgatcttggctcactgcaccctccacctcccagattcaaacgattctcctgcctcagcctgcctagaagctgggattacaggtgcatgccaccactcccagctaatttttgtatttttagtagagacagggtttcactatgttggccaggctggtcttgaactcctgacctcaagtgatctgcccgcctcagcctcccaaagtattggggttacaggcgtgagccactgtgcctggctggtagacttaatttgaatccacttccacaaattattaactgagttacttaaggattttatttatcttgtgctcttcaaaggggataataatagcatctactttgtaaggctgtcgtgaagatgaaatgaagtaaattacgatgcttggcatgtagtaaaccctcggtgaaaggtggtcgttactaataaacacatcatgtttctttattagtcatctttaagaaagtttaaagaaactgtcatttagtgccttgtgatagaagtgattagaagtagccacaggcctcctgagatagactaggattcaggagatcaatattagagtccagaacttactaactagtgtgtgacttgggcaagtcataaagcctgagggtttctgattttatcatctctccatttctacttgtcatgggtcgtgaattacggagtcaaatcattatgaaaatatatgtgacgtgatttgttgaaatgtcaaggagacattgcctagtaaaaccaaaatgacccattatttttagtattatttaatactgatgattaagtattaaattgaaaaacattgcagacaatcccctcaacctgtgtcagaattcatattgagagagatacagaaactgaattgaaaacattttcagagtagattttgtttgtcttgtaggcattttgttcccaacatcacctttggtcaccctgtggtagaaagccttcgaaagcagctaggccaggaccctttctttggtaagtgggtgttacgccatctgaagctggatgtgttgctcaagtaaaggaaaactggatggttgattttaacttccaagttcatctggcaccctttccccaactttcctatcctgggtcttcattggcctgactccagtaacaagccaaacttcttcctgcctctgggccttggctaatctgcatggaaaggtagtagcttggctggctgcctcatctt

SEQ ID NO: 98500 - DNA, 1071 bp, Homo sapiens
gctgaggtcattccactgcactccagcctgagtgacagtgtgacactccatgtcaaaaaaaaaaaattttttttaaattaaataacataaacttaaaaattcggtttcttattcacgttaatcacattgcaagtcttcagtagtcacatattgtacagtgcagctatgggacatttccaatatcacagaaaattctgttgaatatagtctccagcctctgtgtaggatctatctactttgagttcaccaaagaaaatgtacattattacctcatttatgtggcatgaggaaacaatgttccaccaatatattcaccattttgaaatttccatataatgggatatagtcctctgattatctaaactttcttttaagccatgattagcttatatagcagataccgtgacttttcctatgaattacggttgttctcatgaccatgagaggtagatgaaataaatagcattgttttctcccactgtacaaccaatggccagaatcctcgcttctggcttgcttgtgtgaatttttttaatgcttgctttttttccccttttcgctcccttttatttgggctcccattgtcacaccatactattgtctatatcccttcctgtcagtgcctttccttttagcaatcctgtgttgctgccaccacacacaatctgctttttcttcttgtttttaatttgttgataaacttgctaattaatctttctagaatttggtctaaaagataaatgaactccattcactttaatgtttgggttttgtgacccttgttttttggtttttcgctttttgttgttgttgttgttgttgctttaagagacagactccgtctattacccaggcaagagtacagtggtacagtcatagctcactgcatccttgaactcctgggctcaagcaatcctcccgccacagctatagctaagactacaggtgtgtgccaccacaaccggctattttttttttttttttttttttttactttttgtagagatgggatctccctgtattgcccaggctaatcttgaatgcttgggctcaagccatcctcctgccttg

SEQ ID NO: 98501 - DNA, 1539 bp, Homo sapiens
gatgaatatcaggtttcttgcagtcaacatgtccttccccctaaatttgttcttgcagtcttgcctctcaattaatggcagttccgttcttctagttgataaggtcaaaatccttgatgccatctttattttcctctcatctatctatccatggaggatcctcttatcctccacatctcatctatcctcagctctctttgctcttatttaagaacatatccatcccgaattgctgccatcatttttcacctgggttattgctatcgtagcttcctcagtcgatagtatcttgtcacttcactgtggtggtttttcccagtggcctgcagaatgctgaagggtttctcctcaccacatgcttccctgacctctgactggtgtatctccttccccaggcacaccagccatattaactgccaacctagtgtgcattttacttacttattttgtttattgtttgactctcgcattaagaatgtaatccctatgacaggagagtttcatgtttttgctctaaccctaggacctagaataattaatgatgcagcaatagctcgataaattgaaagaataaatgaaaaggatcacttaatttttcctagaggaaactagtttgcatggatagtatgacttattctttaagttttttagagtggcatttcctggacctggacctagatttcctgatttttagatgttaactttttatatacagcactgtatgctttttgtgggaaaatagtgttttttgtaaatgaatttaaataaatccttgtcttcaaaataagaggaaactacctatactgaattagaactatttaaataatgatttgtgtgatggccaaagagttcttatcagaagtggcaaaaactacatacaggttggcttccaataacatgagccaggtatttttcagtaatattttgaagtgtcttttctttctagacatgcacatgatggtgtccaagccagaacagtgggtaaagccaatggctgtagcaggagccaatcagtacacctttcatctcgaggctactgagaacccaggggctttgattaaagacattcgggagaatgggatgaaggtaagaaatcgtgatgagagtgttttgtaacattcactctcagttgggaagatttgcgggaaacaggaaattttctctttttttgatacagtcttgctctgtcacccaggctgaagtgcagtggcacagtcagggcccattgcaggtaaagaataccttacttaagcagctgttcttcagctatgatgccaggatttaacttctttgtcacatagcatttatgtattccactaaagttttctgaaagctactgcttgttgaaaatacttacatttaatagtcttgttaacttttaaaaaataagaacagatatttctactgggcctgctatgccacaataatataatacagaagtaattgtaaatgtgatatagcatatttgtgtctgttacaggttggccttgccatcaaaccaggaacctcagttgagtatttggcaccatgggctaatca

SEQ ID NO: 98502 - DNA, 6493 bp, Homo sapiens
acattttagtagagaggaggtctcactacgtacccaggctggtcttgaactcctgggcttaagctgtcctcccaccttggtctgccaaagtgttgggattacaggtggcagccaaccacgcctggaagtcttgaaatttccttttgaaactattatctctaacttttagatctcttggaagttgtcattgactattgaggatttgtctgtcttgtttacatgacagtctctgcaaagacaatacagattgctgtttgccaaatagaacaaagcttgctattaaaaaccaagtgttccccagtaatatgttgtattggtatagttattgtgtgagacaattggagttttaattgctaatatttgctgttggatttttttgtttgattgtcccccacccccacccccaccaacatacccactttaggagttacttatttcctcatgtatatatctaggttcactggttgaggacccagttcccatctttggatatagaggtcgatggtggagtaggtcctgacactgtccataaatgtgcagaggtgagattgctcttcaactatgactagaccaatttcccgtcaaatatgtctccaggacattgtctcatgggccagcgattccctctgtggttcctaagttgactttctttcttggaaaagtattttttgttcacatgtacaactaggaaaataaacagccataagtggatatgctttttttttttttttttttttttctttttctgagacagtctctctttgtggcccagattggagtgcagtggcgtgatctctgctcactgcaatctctgcctgccgggttcaagcgattctcctgcctcagcctcctgagtagctgggattacaggtacctgccaccatgcttggctaatttttttatttttagtagagacagggtttcactatgttggccaggctggtctcaaactcctgacctcaagtgacctgcctgcctcggcctcccaaagtgttgggattacagatgtgagccatggcgtctggcccgtaagtggatattctaaaatcacataaattgttaaaattgtaaatcctggttttctcaggaaggctgaagaaagttcttttttataaaagaatatgttgaatttcagccctttggaagatcattaagtttcacggccttggaagtgagaaatttttccaaaatacggaattaaaaggtactaccaaggggggaaaatagataaatctaattgacctaattattacattattctttagaacctacatattatttagttgttccttgtaagaacttgctagaaccatttttgatgaaaatctaggcctgatacctctttggctatctgtatagaagtaaaaacttttttttacttttttttttttttcagatagctagtctagcatagtcaggctcctgaggatgccagcccttctggtagcactgcaagtgattaaagcttacatgactgcttttcttccacagtgtgatgtatctacttccaggttcttgtataactgccacacgtttctgcttgatatatacctatcaaaagcttgacagtagtaaatacttatgcaggaggggctggccagatgatgagtgagctcatatccttttgatcgcttgtggaattgctttgtactaaactgtgctttgccagtatactattcctgcttttatgccagaggtagcaaattttttgtgtgaaaaatcagaccttggcgatgaccttaaacagcaggatatgaagaactcccacaagcttagcgttccaataatggaacactaggcataaatgggttaactgaagagaatatttgcagtgttaaccctataaaactcacctttataatttctgtgaggaatattgttagaaatgttgtcatacatgaagtgacactatctgtctggaaaaattttcctcagcctgtggttctcccacttctccctctttgttctagcaatgaatcacaaaacagattgggtttccatccttgaatcagatcctaggaagatcagagttaaatttggacccaattttttagcttttctttttcaatttctttgcttccatatttaaatgtatcttaaaaacttttttaaagccacttcaaaaccattctgaaatgcaatgaagtataaagagacattctattttttgacacaaaaacgagaactcacttaattttgccgtagtttatggataattttacatttttagcaataattgtcctttcacactcacaaattcatataaatataattcaaagaataaaagtgtttttttagtaactgtagaggcattggtgcatattgggaaaaaccttagtggacttgaggagtaaaggcttttaaaccttatctaaaggtcgcaaagataccatgtagattattaagagttggtttaccagaaaggtcaatgatttcttagacacatttaaaaatagtctgacatcctcatctgtgaacattttaaatttttcttattgaactagattgcttaagtctgcttaatctcaaagtggctctcatatgattgaaatgttgacagatgcaagggtagacactctagtccaggaattctgttttaggtttttctacattttcctttgaggcataacctaactgtttacttcttccaggcaggagctaacatgattgtgtctggcagtgctattatgaggagtgaagaccccagatctgtgatcaatctattaagaaatgtttgctcagaagctgctcagaaacgttctcttgatcggtgaaaccataaggagcccagtgttcctgttcatgaaatctcccttttactggaaaacaggaatattgactaccaaatcacaatgcaattgaagccgtactgcttttttgagcagttattcattccagtgattaaaactgattgtgcagaatattctaagaggtcagaaattggtgtgtataactacatttttagtgatgcaatttattgattagtgagtaagatactgtttttattgagagatttgatttttataaagtaaaaatacggctgcattagggttacaaacagaaaagtgtcttaatgtctaaggagggcatattagctacactacaaaaacaaattttgtctgtacttctgaaaagaattttgttgtttctcagctgttttccaaaagcaaaggaagtctttatggtttttttctatttcatgttattgtgatttgtttataagtttgggtggggtgcataccatattcttggttcttaaaatctatcacttttcaccttacacttgatgtgtgaaaactataaaaacaatgtgtgaaacccaggggttctaaaatacaagcatagattttatcagggtgttttgtcaaagcaggttattcagtgattcctccccaccattcttaagaacgttaaataatgctgttgtgttagctctgagtagaaaggaaaaagtaaaacctctgtttggaggtaatattgggttgaattctgactgcccctttctagctggacctttaacaaatcacccaatcttttttgtgtttctctaaagtcatttatacattaaatgtaattatagcaactgtggggttctgttgagaattaagagctaacactatatatgtaaagtttccagtactagtcccagaatttagaatatgctcaacacaaagtaaacagcattatataagtttatatttttgtgagttataaagtactttgatatattctcattaaatctgtaaatcacctctataagtaagtggtaataataaagcagatatttttgtccccatttaaaaaatgaagaaattaatgcttaatagggtggtaccctggaaaggatctgggaagtggtagaatttctggtctgtacttttacaaatggagcccttgggaggtgggttaggtaaaagaagctttttacttaacgttgtcttatttccagtctaattttacgctgtagcagaaccagatggctgagaaaattctggaactatggatcttgaccccaaggatatattattttattccaagaaagatcaggtaggcgaaaagatgacaggatacagagtcaatccataaactaaatatttataactgttctgaattatacagagtctaaaaatatgtgtcagctacttcattcctgtaaatactcttgctgtgttataaatatggcaagaaataaacatgaccaatatcaatagacttcttgaggctactataagttttgagaaataaggttcaaaaaataagaatgctaacacttaagcacagactagagcttgcttgggtttcttcctgcattacaaggtaaaaatttgttaatgtttgtttttattcagcttgggaaagctttgtgccatgaatacgtcgcatttaataacaagcaacacacggcatatagaaataactttaattaaaaaacttacatagaagattataatatcagacgtgacaaagatttgagtttatttgcctggacaacttgggtttgtctggcttttgttttctttttctttaaaaataaatgtacagtaaaactacaagcaaaagtttgtcagtattgaattgaattttttaccccttaaaaggactagtataatttccaatctctaacaaaaacttagtgtcaaatctcacagataaggccaaatggccaatattttcagttatgtgggtagtacaacttgagtaaccttttttacatgacaaaaagtgagttatataaattgtcctcaactttcacataggaaaaaaatggtttaatagcttcaaaaggaattttctttcatgtatactcttcagtatccaatattgaagctttgttctttgaaaaattttaatttccaatctaggatgcaagcaagaatatatgtttatttgaatagagtaagctatggcaaagaatgaccaaattagctagaaatagaaatcagccagaattaactaatttcttgctaatctagaaatacaatcatcttttttttttttttcaaattttatactgatagggctttactgtttgtggctcattttaaaactggtgtcttctcttcatgagacacattaattggtaaaactcaaattgagttttcaaagatgtgatagtattaaagtgcaccaatatttgactcaaatttgcttgctttattttgttaggagtaaacagaaagtagcctgtgtttagtcccaaagatagcagtgattttgaataaaggagttttgtgttgcctggatatatgaatttctgtaaataacttctgttggttaaacatgttaaaacaacaacaacaacaacaaaaaacttctgtctctatattcaggacgttcagatgtcttttattagtggaaacctgtgttttatctattctgcagcttacatttcatagggtagttcatacatgcatttccaaggggagtgggtcattgccagtgttttaaaaactacataggggtgtgtgtgtgtgtgtatgtttattttatacacacatatttgtatattctaatatattactaaggcaattttaatgaattaccatgtatataaaaaaatagctgtcacttggcacacaggtttgtatgtatgtgtatatatatatgtatgtatgtatggtgtgggtacatagtcttaaaaattacccagtaatgtgatttgacatcaagttgcagcaattaatatcttggtgtttgtaagtaagttgcatgataaacacaaatgactaccacttgtctgtagatgaaaatctggttacccttatggttccagaaggaaaaacagacttatcttgcctgtttcataaacagcataaaagattaatacatgcagaacatgctcttattctggaggggatgggggatccagaacagggctttatttcctcccatctttcctacatttacatagttttcttaacctgttccctgtcacctattttttttaacattagtaagtcctagaccaaaggttttgtattcttccattccatctgactgcttttttggatggtggccattctctggtacactggtaccgaagatttcaccatggaaagctgtgcttgacctttcaacctgatcctttttttcatcttgacataataaggctgccatgtcttcacccttcagtggaaaagcccgtcgttcccaccacaaagactgaaaggggaaaaattttcagttaagtttcaactaacttgttttgtttaaattcatctaacaagtaatctgtacatgtctatattgtaataattgttctgttctttagcacataaatgtacaatttttcatttcaacttaaatagcaactcaaaatggaatatattgagaattgttgagtgacttttgggatttatttctttactttgcctctgccaagaagaggaaatgctgccataggcagtggtcttcatttccgacctaagagtactttgggaaagtgttcttaggtttgatatacttctacagtatcttcattttcattattaaa

SEQ ID NO: 98503 - DNA, 1035 bp, Homo sapiens
cagacttcacacaatcttgcctttttgagttttggctattttaaaaatgatcaaatgtataataaatataaaataggaattttctcatatatataataattatgtctgatttatttccccttccctcaaagctcatttgtgtttctaaaagtattttagactttttgcattttagattaaacaggtttcttgagaaattttttatttttttaaagaaaaacatattttggaagtagtgatgttaaaatggattacctaaactccagtccccagtgtgaggtccattattaaagtagattgaaatgacctactttatatatacagagaattttcacattatttgttagttaaatccattcctgaggctgacaacataagagaggaaaatacagaaactaatttcatcattatataattagctcaaatatattttgaatacaagctcattctatgtagtattttacttctggtgcacaatagctgatgttacaacagcatgttttcctttttactggtctcacccaaaattcatgcagaggttttgttcatttcacatggattctatggcttggggttttaaatttgtaacctgcctgctgtttcttctgtgccacttgctttgctcccatagtgaccacctggcttgctctctctcttcatattttttgtgccttagggagaagacttcatcagaaagatcttctatctggaattagaaataaagatttttgttttaatcagaaacattttgaaatataagatcaggctgggcacggtggctcacgcctgtaatcccaacactttggaaggccgaggtgggtggatcacgaggtcaggagttcaagaccagcctggccaagatggtgaaatcccgtctctactaaaaaatacaaaaattagctgggcatggtggcaggcgcctgtaatcacagctactcgggaggctgaggcagagaattgcttgaacgcgggaggcggaggttgcagtgagccaagatcgtgccactgcactccagcctgggtgacagggcgaga

SEQ ID NO: 98504 - DNA, 1201 bp, Homo sapiens
aaaaaaagaaatataagatcaggtttcaaagagtttctcatgtagaaaacagtaggaagcaaactaaaataaatgctatctgtgtaagttgagagaacaaatgttatgagatgaactccaaattcctgtaaaaggggagtcaaaattttttaaaaattatttcattattgttatttttagacacgggtctctgtcgcccaggctgtagtgagtgcagtggtgcagtcatagctcactgcagccttgaacttctgggctcaagcaatcctcccacctcaaaaaacttaaaaatacttgtttcctattggttcatatttgaagacttcggtaggctacagatgagttcgtaatactttccatttgccatagcttagtaccagtagtcttaatgttttattcattcaggagtttttatggatcgtccattgtggagtacatactattctaagaagatgttaatatcagataaaagtaaaactaataatcttagacaagtcagcattaatttaatgaatgacttatctaggttttgaacctggaatactaccttagttagggtgtttaagaatttgggtttcttggctaggatcattcagaagtaaggaagaatacattagaagaggaaagggcattagaaggtaaattttagtagttgaaaaacatgaccactggacatagaaagattgttacttgacagaaaccaagtgtcttcaacagtgtcatcttctagagaccatcaccttggaattagtttggttatacagtatttttccctataatcttatcttgatataattttatccatacctattcacaaccccttacctgcaattccaaaatccaaaaatctgcaaaaacaaatttttcataattcatttggtgacatagcctgatctgaaatgatgtgaggctatttttagtgtttatccaactcaactatgaatatttcactacagaaacattaatgtctgattacttttacgcccgagactctacaggtattacgtgatatgtttaccacattacttttttaaagtccaaaattttctaaaccgaagagcaaattggtcctaagattctgaaaatggcatttaaacttaaataatgagtgagactaatctcatgcagaaaaatataattaatactgacaatgaatgtggatattcacgtaaattcagtatctcaaaaactcataaacaaa

SEQ ID NO: 98505 - DNA, 3460 bp, Homo sapiens
aaaccaattttaaacagcttttatttatttaaatgtggcaattttatactcagcacagctaaatgtattagtgtttccttggcacttccatggttcaaattgttgtattttaatacttaattttttaaaagaaaaacatttgtattatgagaaaaggacaaaagagaaaatgagactttatttttggccttatggtgaatagtctgttctgtatagctgcattttatacataataattatgtactgactgaagtcagtggtacgctgataaactggcctggccaaaaagtaacagagaaggaaaaaaaccctggtttgtatgtttgccaatttctttggtgtgaaaatacctaccatagccccttttgagccatcagtagtttaataactggctcacagaagtcttctatatttaactatctgctcagccagctagctccagcctaccattgcaagttgaaatatatttttgctatagaacgtcatagccacaaatgttattacttatgcaacaagtatccacagattgagttctcatataactcttctagaatattatgctcttaatacctcaaagtaattatgaagtagtaaaagaaatgaaattagaatagagatgtatagcaattgactgaaattgtcacccacctgtctctgtttgcagccttttctgtctctacttcctggtgtcatttatattcttaagaagctgcattcatgatttctaaaaagtttggctaacgttactgccagtagggagcagatctgtgtatggcattcagggacctccacaaatctggacctaactttgtctctagccttccattatcaatctggacctaactttgtttttagccttccattatcaacctgcacaaaacagtatctggctaagccttacacacttgtcctgtgcctttgttgtcgtatccctatgtaaataccttctccaccttcccattccttcatggatgacttcccagaccttcccactcatcttttgaatgtgtttattgctgacttggcaatgcatcaaaatcttttttttttttttttttttttggtcacaggtattactgtcttacagtgtgaataccccatgaaaacgtagaactctttgcaacttatgtcacacctgtatcttcaagggcaaggattatttgttgctatagtttttatgtcactaaagtaccttttagtgtcatatacatagtagataacactggataataataataaaaaagactaagaatgctaaagtagtctaggaattcctaaatcttaataaaaactgagaaataaagttgtgatactatataacacttaaggcacgagtaatttttttttcaccgtttcccctccatggctatgaaggaactgggagaaggatgctcctttcattaattaaaattcttcactttgaaaatttaagtttattagggaaggaaggaagaaaaatatgaagatgtaagtatacataccttggagtaagtatttccttatattggagtttctctaatttagctggggctactaatgacatgggaatcacaatgttatctatgtcataagagctctcacttctcaatctccgtcgtgcagtattctgcaaaacaggattacagtagatttacagtactgtctagttacttgtaatgataccctcctttcatcagttatgtaaatatggcagtacacgttacataatttttgtaaatacattgttataaagtctgactaaaaaatgttaagaaaaccaaaaaataaaacatttttctatcttttgtaaatcagaacaatctcttggtagatgtgtaatgtgtatttatgtgtgcaagcatacaagcttatttttaagaccacaaaaaataggtcttaaatgcaaaactctttatcagaaaagaccaacatacatcaccctaaatgtcaatgaaaatgatcagtaaccactttttattaggaaaggcagtgaaacatttttggtcagcccttcagtatactcttcatttatgcattcctggttcctgagtttcggaattcatttctaaaccctcccaccttttgacctctctattccctggccagataacaaaaaaacaaacaaacaaacaaaaaacaggacaagaacaagaaagtcctgaattctcattagtaagactttatttagcttaatatgttaaggaatagagatgatcatgataatgtttaaatttttaacacataaaaagaagctataaccaaatattaatgaacttttagcttcatagttaaaaataagttgtatgaatcaaatatattgttttctaacaagatagttataaatgtctgttaatatgtgctagtaaggctgttatagattagcaaaatataaattattttcaaaatcaggtgtttttatttttaaagctattttagagttcaacatatggaaaaacctactcgtgatgaattctggattcttgataaaacgttgacattggaaacagcagtaaaattgctatgggatcctgattctgtgtgttgaaaatcagattcttcaagtttagttctttctcctgccatggaaagaaccattgaatgttacacattaaacaagtctaatatcattagaattactttcctaattagatgacaggtgattgattccttgttttgtgtgtgtgtgtttaaattcgtgtattagaaaacaaaaaaggaaatgaaaaaagaggagccttacttgcagtcatgccacaagttatttccattttctggggctttggcagtttttatcgaatatatttcttattgttccctgaataatccctcatctcatccctttattcttgtttcctgtgactcctattcatagttgaaccaccagaactatcttaattttcttatctaatctcatttttcatatctgactttttatcctaatttatgtgaggtatctgtccttggtcttctgaacactcttaattttttgaaaaaattctgctattataagtacatgtttccgaaagtacttgttctctggtactctttttttaaaacagcatcctgttcttgtttcatagatgaaatttctcatatctctcaggatattgattagaagtttacttctgttagtattttctgtatatcttccaagttctttttttttttttttcctgttttggttcccagttactgtgtgtgtgtgtgtgtgtagtaaatatatatatgtatgcgtttacttactgcccttattttagtacaagtgttttaaaatgagaatatttcctgcataatataaaatctaatacccagtccatatttaaatatctccatttgttaaaaaaaagtcctttatagctagtttcttcagataaggatctatatataaaaattggccattgtctcctaggtttcttatagtctagaataaatcatttttcattacattgacttttgacaggctggaccagatgtcctaccc

SEQ ID NO: 98506 - DNA, 1116 bp, Homo sapiens
gatatataaatcttggcgatcagaatctttaagttcttgcttacctttaaatctggaaataagttgggaccaagtaagattcaacatggtcagactagactgtgcgagcaagaaccagaatcatttaatatctctgatgccttagttgcatcatctgtaaaatagggataatagcagcgaccttggataatgattacatgagtttattcctgtagtagtaagtaaaagtgtctgatgtgataagtgtgcagtaaatgttagcgttatcatgattgtatatctgaacccccttatttccagccttggtctaacaaccaaattggcttctttttttgaaaggtttggagatgtggaaaggagtggaaaaagaaatatgtaagctgaagtgccaaactcacactgaaataaagggcatggcctaccagctgacaaggagtgtctggtttcaagatggcaaatgaccctaaacatgatagacaaatacgttttacataggtacatgcacagataggcacatataaatccacatttgcaagcaaaaagtggaacctgtaaagcagaatttctgaggaatctctaaaagactaatactatatggaatttgaagaggaaacccagagcagaagcacatagtgaagtactgccacaaagatgtgtgacgccactaaaggtgctctagacccacaagaaaggaaaactgggagcaggacaactatctggatattgactgcacatgccaatatctcagtcagactaacagaatcagagctttaggcagagaaatgaatggttggagagagaaggcaatgcccaggtgccctgctttgaaatgtcccgcccatccccaaattagtctgaaaatttcaaatgttgtataaattcccttcccatcaaaagtgtcccataaacagcagtggtagaagagttttaactgagtatcacagcttcaatgatgagtatagaaaactccaaaaatctgaataccaacacaatcaaaaaagaggtacaaaccacaagtggaagaaccatctcaagaaataatgaagcattcatggaatacagattagcaactctttaaaacagtattgccaagagaaacaggtaagaggccctctg

SEQ ID NO: 98507 - DNA, 1527 bp, Homo sapiens
ctatgtttctggcttgcttgtgtgggttatggtgctattgttcctcctcttccatctatctgagacctaatttcagaattacagaaaacttgaaatagaacaaaaaatttctgtatacccttttctgaaatcccccaaatgttaacatcgtatcacatttgctttacctccttctttcagaccacaaatgaaatttagttgctgacatgatgcccctttagccctaaatacatcaatgtgtatttctcaaaacaaaggacattctcttatgtagccatgcagttcagtaccattagctaatctatagaccttattcagatttcaccaatatctctataatgttatttacagataatttcaactattcattgcagatggcattgcagttgtcagatctcattaaggtcttatatctgaaacagttccactgtcttccataactttcataactttgaacattttggtaagtataaacccttaaattggttttgtctggtattcctcatgattaaactagtcatccattcacttttcaacccactacagtttggcttttctctgcttgttgcctgaaatcagcaatgccattgtaaactgccaaatctaatggaccatacaggataaatccaagcaaagatctgtctactgccttcacacaacttaccctacaggaatgccaagttatttgtagatatttgttgttgtttgtttgttttgagatgaagtctcactctgttacccaggctggagtgcagtggcgccatttcggctcactacacgtctgcctcctgggttcaagtgattcttgtgcctcagcctcccgagtagctgggaccacaggtgtgcaccaccaccctcagctagcctttgtatttttagtacagacggggtttcaccatgttgccaaggctggtcttaaactcctgacctcaggtgatccacctgcctcagcctcccaaagtggtaggattacaggcgtgagccactgtgcctggccttatttatagatatttgaatatatcatactgtgtcatgtctccatgacaagacatatgtttgtttttgttatttaaagacttgttactcagtatgggccaacagcatctgaatcacctgggaccttgttagaaatgcagaatttcaggtcccattccagacttactaaatcagactctgcattctaacaatatccccgaagtaacttgcttacattttaaagtttgagaagcactaatctggaacgctccacccttctttctctgtaaattccaattaagtagtcgaagctgcacttaggcatcaccaactttctggagttcctctccttgcccatttctcatctccctgaacctctctttttctgccttctaagtagttacatactccttatttatatcttctttatataatttctttttaagatagagtctcactctgtcacccaagctggagtgcagtgatgcgatcattgctcattgcagcctcaagctcctgggctcaagcaatcctcctgcttcagcctcctaa

SEQ ID NO: 98508 - DNA, 3320 bp, Homo sapiens
cccaccaacatttttgctagagtatttaaaagcaaatcccagacatgtcttttcatctacatatatgttagtgtgaatctctaacaaactgaaaaagtacgtctgggtttatgtaaccacaatgcattattacaagtagcaaaattaacaataattcattaatatctaacagctagtccatgttcaaatttctctgtttcaaaaattatatgtgtgtctataaacagcaggcttattcaaatcaatctcaacaaggtccatacattgcatttgattgatataacaataaatatttctacacgactataattttaccagatatagaagtaaaatatttttatccttttatatcacaacattctttgataagtaggtttccatccttatatgaacttttaagatattttttaaggctgtatattccactgtaatgtatttaaccatatccctattatgcttttcaagttgttgctaatttttcattatcacaaaaacatgttaagatgaatacagttgcgaaaaaagctttcatatttaggattagactagattcttggaaatggaatagttgggtcagaatgcagggttaacagtccagtaaacatttattgggaataggtacaaaataaacaagggagtttttaagccacactgaacttataaaaaaatacgtagtttaaacgccttgtaatgcattttgcagagctcctcaaaaggcttgtatcaattcttaatatccaagatatttgagggtgctatttttactatagttgtgccaaaattgatgattataatgtttaaaatcattaatgttgcaggcaaaagtagtaaatatttgcatagtgtctgactataagctcagttaatattattttcattattatcatcaagtacacttactttttcttgttattcttttaagacattcatttttaacatttaactttttaatccaactgaaatgtattttaatgttcatccaccttaaatttgttttaaagtgctttatgagttagtgatatcagtttttaattcttccaaagagtcgttatttaatgcctttgattacaaaggaaacttagttatatagagcatggctccaagccagactgcttgggtttgaattctggctcttttattactcaactgtaatttggggaagattagtcaaggagaatagtaatacctaccttatagaattatacagacttaaataattaagtaatataaagcccttcaatcagtgctgacatataaatgatgcttcataagaatttgttgttgttgtcattattatttattgactaagccattttatcaacatggtaggaaataccaccttctgtctctaggctttttttaagctcccttgatctgccttctatcagaaccaccatgttttagtgattataacttcatagtcctgctattaatcttctaaaaatgtaattggctattcaacattttctgtctgagataaacttccagaataacttcgttccaataatacctctgattctgattaggattatattctacttgtaaattaatttggggaaaattgacaactttagttatgatactgtcttctgacaggaacaggatatttctctccatataggaatgtcctcatgtttctcactgaacttttgaagtagtcctcatgtaggtactcgttaagtttgattaaaaatactttatattttcattgtcaatatgtctaacagaatttattcctttacataggctatctagttactattggtacttataaaagctgctgatttttataaatttattttataataagaccccagttctaacaggtattcatttgactcgagtttttgaggtagattatttcatgtagaaataatttatcttaaatttatatgacttttctgatgtttagattttaactttgtagataatcaaaatatgttgttttctttcttcttctaattgcttccaagcatagaactcacccacatttacagaactcataaacatttcattataatttcctcaagttttattttgtagttttaatgttttatgtacaattcttggaattaactagaacttattctgattcatagcattaaatgagtatgtaaaagaattttactgggaaagactctctccatgagaaccaatggttctccactttcccactaatatacaattcttccctgatatataatcaactatagagtttacttcattgatctattttcttaaatataaacaaaatagattctacattattatagatttttgtcatgtttccatatgtgcttgggctagattttctctaaactttttataataattccttttatattttcccctgtttagtcttcccattgtgctttagaattattttaagttaaacaaattctatgagaacttcgagttacattacattaatcatatgaactattaggaagaatttatatatttattgatcttaccatacagaaatgctgtttctccacatttatttaaatttttattatatttatcagtaatagttcataattacaattcaataggtatcgcacatttcatgttaagattgttcttgtattttatgtgtacatgagttgtaaaaagtgagtattaaaaattaaggattttcatgtattcttttcttagattttatttttcttagaatgcaaaaatagtaagtataaagacataaaaaggcatatagagtacaagaactgtaaatgtgacataccaggtgatggagatatgatatattcatctacaaatttattttcagcaagattgccttttatttcagtcttttttaacagtgtttcaaagtgaaaatgaagaggcacatctggaaaaataaaataaaaaaggtattttcaaataccactctttgtaatactaggattacagattgtaacattaaaattgctttctttctataaatagcacataagcttaagaaaataagcaaaagtttgagatgtaacaactatcggaagtgacaaaatactctttccaagcatgttggtagcagtattttagaaattactggttaggtgcacttaatcaacaaattaaaaagctaacagagaaacaacttcatgaacttcctaaaatagtacataagatgaacagtaattataagtattaataaatactattcacagatgaatggaaacaaatatacccaagaagtctttaagaaaacctacacccaaatctggctgactctaaatccattccatcccatccctacaaactttgcatttgaaataatgaagcttccaaaaaattacatgcttttaacgtcttgggag

SEQ ID NO: 98509 - DNA, 1012 bp, Homo sapiens
ctatgtgcctttcttaatacccgcacgtgacctgtcagcttttgtaaaaatatttcattgctttgaaacattacctttcagttgttttaaactagaatgcgagtaccttgagggatttatttgtatttatactcctagcatttatttagtacttacatatagtaggtattgagatttttattgaatgtaagaaggaatggatatcatgaaatagtagataaacaatctaatctcatttattagagggggcataagagtcttaggataaagagtatttataccagctctcagggttatgtcatcagagaaatatatttgctaataagaaaacaggcagtaaagtaatggtgagtagtttggttctggagaatgactacctcaaattctggctcatcatttattagccgagtaatcttggatgagtagtatcacgaagcttagttttctcatatgtaagatgaacagaacaaagatatctattctcatggagttgtgggaattaaacaagaaaatgtaatgtgcttaatatatacaaggctcagtatatgctaagactaaatgttagctacattattattgttatatggattattattttatcatattattaaggtttcctcaaatatagaataaaatagttcttgttaaaaacttaaatcaaggtaatggtgtagctaagaaaccactctactactgataaaaactaaattgagattcagggcagggagacaggttcaaaacatagtgctttacaaataaatcagtcccttgattttgagaatttaaaagaccatcagaaccataagcggaaaatggaacaaaagctaagttgagatatcccccagtaaagaagaaccggagataaccaatgtgagggatgttttctttctcccctaaatatttactttagttccaatatagacaagagtgtaaaggttccacaaaaatcaagaactgaaaatttaaaaccacctagagtaatcctagcatttttgggaggttgaggtgggag

SEQ ID NO: 98510 - DNA, 1023 bp, Homo sapiens
cttgaggttgactatacttataggtacgcagttttcttccctctgcattgagaaattcaatgcagattataaatggagaaatattttatgacagggaaacctccatgtataacagcacattagaaaaagaacactgaattaccattactcagaaacatttcaacagcacagccatgttaccaataaaatgctcaaaatttaacaagataaaaacctagtaatttcccaaagtaaatcaagttggtttagaaggaattaaagaatcaacttacacagatagaacattaaccgtgcatgtgactagattaattcctctacaacaaatttaattgtcaaggcattgcttagttctaatatctactgaaaaaaaattgataaaataagatttattagattctctgtatttagaggattagatttcagtacagaaaatatcgttacttagaaattgttacaaggaggcttacctgatggcaatgatagaacagaatggaaagaggaatctaactctgatacatgttctcttaataggtaagactccgaattgtgttcatagctactccaagttgaagctgattgcaggcaaggcatttgtgtagtgtttaaaaatgctgtttcttttgaaggcaaagtctgcaaggaaaaaccgtattagaatatcacagccaaagcatccataaatggcatatctctacatttatttaggttatctttaaataaaattttccagttctacaaaaagttttacaaatattttgctagatgttttcccaattaactttaatatttattaattcaatcataaaagggatgtaaaaatataattaacttttatatattgaatattctacaactttgctataaactttctttttctaataatatatagcttcttctagtctttgattatctaaacatactagctgggaatgataactgtaatttttttccttcaatcctactagttttttttttagggagttccaaccatgctggatgggttcaccaattcaataatgaata

SEQ ID NO: 98511 - DNA, 1273 bp, Homo sapiens
tactattgctatggagaactcattctgggcccatttgtttatacttgagctagttcccacatactttataactgttaagtcagtatctggtagtcctgtctaccctccttcccttctcttcatggacctttatttgtccatattcacttttgaatgttaagtttccaaaatagacagctggtattttgactaagattaccttaaattcaggaaactggatgtctcccacttttaagtctttatatcctatataaaagttttaaatttgtttccatagtagtcatatatatatatagtcaattctcagaaaattgacagtatgcttttgggaatgtaccttgttttttaatatatttttaattggttattactaatgtggaaaaatagtattagttctaataatttattgattctgttggattttctatgaaattacttcatgtgaaaataatgacagttttatttcacccttacaatcaaaaaaattttccttcagaactttggagacattattctattttcatctggagtcattaatgagaatttcaatggcaatttcattcttacccattataggtcatagtttgcttttgttagctgttttcccttcgaagctttaacatcttatcttctagatattcagaaatttcatgagaatctgtttaggagtgggctgtttatttaattcacaatgctcaaaagtttgtgggccttatcaaactgaagacatcatgtcttctttttggctgtggaaatagtcatgtataatttctctttgtgttctgggagatttatttgactctattttctagttcttatactaaaaaattttaattatagctattttattttaaatttctttctttcttctttcctttttttttttttttttgagacaaggtattgctctgtcacccacggtggagagtggtggcacaatctatcaagactcactgcagcctctactgcctggctcaagcaatcctcccaccttatcctctagagtagctgggactagaggtggataccaccatacctggatcatttttaaattttctgtagagacagtatctcactatgttgcctaggctggttttaactcctgggcttaagagatcctcctacttcagcctcccaaagtgctggggttacaggcctgagccaccacactaggccttattttaaatttctaaaggcactttttttttgtttgtttgtttcatgattgtttctttagtacaacaggctgccctggaagttattgtctgttctt

SEQ ID NO: 98512 - DNA, 1031 bp, Homo sapiens
cagtggtatgatctcggttcactgcagcctctgcctccctggttcaagcaattcttgtgcctcagcctcccaagtagctggggttacaggcatgcaccaccatgtccagctaatttttatatttttagtagagatagagtttcaccatgttggccaggctgctctcgaactcctgacctcaagtgatctgcctgctttagcctcccaaagattggattacagccatgagccatcgtgccaggcctcagttaagtatctttcaaatgtattttcttatttaatatcaacacacctctagaaggtagcctttttcttcttttcttcattgctgattcagctaatgtcttaatttagagctgtccctgtgtcccaaagcagacgccaaggcaaagattgtttaatatcaatggtcacaaatttcttcaatccctgtgtgtatgcccctttgctgaaatttcccctttgctgtaaattccatccctgtgtgtatgcccctatttctccatccctttgaatttgggctgaccaagtcacttgctttgtcctatagaatgcagtggaaattatgttgtttaagatctggtgggctgggtgtggtatttcacacctgtaatcccagcactttgtgaggccaaggtgggcagatcccttgaggccaggaattcgagaccagcctggccaacatggtgaaatcccatctctactaaaaatacaaaaattaggtgggcatggtgggacttgcctgcaatcccagctactcaagaggctgaagcatgagaatcacttgaaccctggaggcagaggttgcagtgagccaagatcgttgacactgcactccagcctgggagagaaagtgagagtctttctcaaaaaaacaaacaatagggccgggcgctgtggctcacgcctgtaatcccagtactttgggaggctgagacaggcagatcatgaggtcaggagattgagaccatcctgggtaacatggtgaaaccctgtctctactaaaaatacaaaaaattagccgggcgtgg

SEQ ID NO: 98513 - DNA, 3089 bp, Homo sapiens
gcactccagcctgggagacagagcgagactccgtctcaaaaaaaaaaaaaaaaaaaccttgctggttttacggctcagggggcatcacggaacctgccaacatgtggtatctcccccggacacccagctttaaaatttctctcttttgtactctttccctttatttctcagaccggctgacacttagggaaaacagaaaagaacctacatgaaatatcgggggtgaattttgcccaatatctggctgaatttcccccatacccaggaggtggagcttgcagtgacctgagaccacgtcactgcactccagcctgggtgacagagcgagactccgtctcaaaaaaaaaaaaaaaaaaagatctggagcctaggcttcaagaggcatgtaacttcctccttgtcatattggagcactgtcctgaggtgccatggaaggaagccattctagctaatgcagcatgagaggccacaatgagaactgagttgccccaaccaacagccagcaccacctgccagaagagcaagtgagtcccacttccgccagcacagctggccctccagctgaatgtagccatatgatggtagtcctatttttatggatgaggaaaacaaagtagtaagtaatttgcacagtactgcacactattaagtagaacaaggattacaatccagtatgaaaccactaaaatgtgctgcttccctacaaaaaataacttctagactctttaatttggtagcttccaaatttatctgcaattatataaagcatattttctcacaggaatatgttatacatgctataaatttatctctccagtcaacctatagaagtccctggagtacagaattgttacagcaaggtaagaaaatcctcaactaagataattcccattgtctaaagcagatgctccagtaggtgtggcatggaagaaagagttggcttcccagcagcataaaaatactacttaagtaactttttttttttttgagatagtgcaatggcatgatctcagctgactgcaacctccacctcccgggttcaagcgattctcctgcctcagcctcccaaatagctgggattacaggcacgtgtcaccacgcctggctaattttttgtatttttagtagaaatggggtttcaccaagttagccaggttggtctcgaattcctgacctcaggtgatccacccacctcggcctcccaaagtgctaggattacaggcgtgagctatcatgcccagcttccagtaagaatttaaatttctatgagatgatatctttatttttctttaaaatcttctattatttgttcaaaaaagtggcctgcattcacataaagtttacatacctaatcattcacattttaaaaaggaaatgaaaactttcaaatgaaattattatatgtaccttaattcgtaccactggattattttattaaaccactcagcattatgatttgagaatctatgaaataacaatgatgatacagactacaaacactacttttgcaaatctgccataggagacagataaaagatcacagatgaacaaattaaaataggaatagttctgccttatttcataaaggttataatattcattattaatgttacttcaatttatacatgttaggtcactacagctgttttcataaatatgaaatggcttgtggattacatgctaaaattcataaaaaatgaaaaaattatcctgctcaaaatagtttcccacccaacattccataatcttaataatgtgaccattttgaatttaatttactacttctgcaagaccagcgtcttgatatgcaaatagcgttcttcagagtaacagtatcattggtaaacagcttaccagagattagcaggtcaactagtgacaaaacaggccagttatatttgtatggaaataagaagaggaaaagaaaagagctgggtaatttgaagaataccatgagaaaacaggaagcatacataacatcactagataccagaggggtgggaaccaccatgatggggataatacaagataagtgagtgtcctgcaaataaagtttcattcatttaaaacttctgcccagttcatgtttctaatatttatatcacattgatttatttattattgctcaagggctgcaactattaatagagaagaagtaatcaccactgctactccccacccccaatatggaggagggtgattgggagcatgaccaaataaaactctgggcttttccctaccttcaaccaaccatttctacttttattaatttcatataaaataacctctgatctaagtgattgaatacacttcttgacttattcttactcaaacaattaggtttattaactaaaatcttataatacaataagtagactgccctaactcaaaatataattattgtaactattagcttcctatataaacaatttgtatgtccaattacctacaacccgcttctatagaaagtgtattaggaattctaatcttggatgccagaggcctctgttcaccattcccagtgggaaagagaacttcctttgccaggagttaatcagggtggcttctgttgtctaaggctgagacatcaatagtatagggcctaacgttgcacagcaactgggtataaagactatcaagaaggagctgaagaagcatattatgatcagataaacatttttaaattattaattgcaagtgaaattttaaagaatgctattagctacatttatattttaagaattatactagagtattattctgaaaaacattttcacatctagctatgcctaccagtgtattttctggatctaaagatacatctatattctaggtagataaagcaacattatcaagcacaaagaagcatagattctccaagcataaactaaagtgtaccagtaatgaataaagtggcttagacagcaaaagatatgattctcttagaataagaaagccaaacattcttaaacagccttagaaactacgtgaagttttaacaattgtttatatgggctagtcatagaaagaaacagtctgaaaaactcataaaagattcaaatcagatgtagaaatcaagcttatgaaag

SEQ ID NO: 98514 - DNA, 1399 bp, Homo sapiens
taacttattttgcttttcatcacagctggtttagaagtacactaaaggaagtatacccattattttgttcacacatgaaaaatatgttttacaaaatgaatgtttctaatgaagtatacttaatttgtaaaaattgtaagcatgagcatctaaaactgtattgcttatgttctagaagaaggaaaaggagcactcaacaagattaataaatatcaaacctaaaaaggaaagcaacgttacttcttccaaaataactgacagctgtgcagattttcttcttctgagcaaacatttatggacaaatatgtagtacatttgtgttaccctcttatctttgacagtacattttaaaaatcatcttgacatttcattttctctcaaattagtttaggcataatagatctttaaaaaaactggggatgtgagaagtttcagagtacactgcttgcaatgtttaaaaaattactaaagcccactttagtattattaatatctactatatcatttttaaactatatttgtaagttttctacatgtaattattcaaaataagtgttatgctaaataacaatctacatcttctcatgcatgaaatatgctgatggtgaatctttgatcatgttttcttcccaaaggcagccttacctgtggagtccaataaaaagtagggctcaatctgtacagttttcgtttgtggaaactctgaagtggccttgttcgggctgatgtactcatgaaagtcaaggatgaagatttcagtcttgtcctgtcttttctctttttcttactgtgcttctggttaagtaaccagctactggaggaagacagctcatctaaattctctgatgcactgaaatgccatgaaataattagggcgtgggaagggaataaaacaaaacaaaacaaacaaaaaagacaaagaaaactaaatgtaaattgccttgatctattatgacagaaaagtattaattttaaccaattttgtggtaacaattggtaaaatattttgtattaacgggaaattacatattcaagttgtgaaaaccatctttacatctattttctcctgcaaaacaaatataccataagttagaaaatgctcatgagtttactagtgtaatgtaattgctcattgtaaaacaataattcatgtcaattacagtattttaactatttacacaaaattctttttgtgtatgatgaaaatacatagattacaggtttttaaaagaactaaagtcatcactccattattagtttctgttttttttgttttttgttttttgtttttttgagatggagtctcactcagctgcccaggctggagtgcagtggtgcgatctcggttcactgcaaccatcgtctcctggtttcaagtgattctcctgtctcagcttcc

SEQ ID NO: 98515 - DNA, 1114 bp, Homo sapiens
gtgttcttctacttttgttaaaaattgttaatgttttcattccttctcatttgatcacaaaaataattgttacaaggttttataaaaatgtagccagtttatgttaaaatttttgatatattattataaattgaagctatttttgtaatgcctttttgtattttaagatcattttatcatactttttgagcaattcagaacttccttattggattccagttaatataagtgataaacgtgttttcaaatttctaaatcataaaatacataaaaaccttaacatcttaaccatttttgagtgtatagttgtgttattaaatacatttgtaatgttgtgcatctgtcgctatccatctccataactctttttaccttttataactgaagctctaaacccattaaataataactgtccactttcctctctcctcaacccctggcaactatgtctgtctcttatgattttgactattttaagtacctcatatgagcagaatcataagtttttgtctttttgtggctagcttatttcactagcataatgttctcaagtttcataaatattgtagcatattagaatttctttcctttttaagactaataatttattgtatgtatataccacattttgtttattcattcatccgttgatggacacttgggttgcttccagtttttagctattgtgagtatgctatgaacatggatataaaaatatctctttgagaccctgttttcaattctttggggtaaacacccacaagttgaattgctggatcatatgggaactttatttttaatttttttgtggatctaccatactgtttttcacagtggctataccagttaacattcccaccagcagtacacaaggttcagatttctccagattctcgctaacatttattttctgtttattttatagtaacctccctaatgagtgtgagatggtatcttattttagttttgatttgcatttgcctaatgattaatgatgttgaacatcatttcatgtgctactggcttggcttttggatatcttctttggagaagtacttattcaagtcctttgcccatttttgaattgggttgcttgcttgtttttttcttgttg

SEQ ID NO: 98516 - DNA, 1050 bp, Homo sapiens
atgaatgacaatgcaaacaccatgtaaaaactgttacataaaacttttatacgtaagtagatgtcaagtaccagacaatccatttgaatggtgctaaatctaaatccatgtaataaactgtagcatattcgattttactataagtaatttttatttgttaaaataggcatcgttattagctaattatttaaatcattttttaaaagctatcaaaaattataaaaaatataaatgctctgctacatttcaaataagcataccaaatatatagaccttaaaatatttaagataaactgttccttaaaaacctgattcctaggattcacaacctacagatcacaaagaatttacataaagcctttctttcatgcatatttaaaaataagggttgattcctagctcctcctagtacctcttgtcatttggcaagagcactacagctagagaaaaattattggggattacgggtggtatatgtgtgtgatatttaattaggagatgcagattgcaaaaaaaaaaaaaaactgacagaaactgaagatataactgtaggacaacaatgacttaatgacaacatgtaaactttataaaaaacttatctaaaaattcatttattgtcaaaacccgctgactgtagaacgccaagagtgaaccctaatgtaaatgatgatctctgggtgacaatgacgtgttaatgtaggttcatcaattgtaacaaatacaccactctgttgtgggatattaacactgggaaaggttatgcatttgtagcatgtaggaacaggggatatgtgggaactctttgtactttccattcagttttgctgtgaacctaaaactgctctaaaaaatagtttattaattttttaaaatgcactggaccataatggaatatctttcaaataatctttaaacagagaaaatatttattctaagagatcatttgctgtcagataaacagaacacaattattatggctttgctatatagaatttattcattataacaggattttacattatatcaatgtttctgaaaggccactgtttt

SEQ ID NO: 98517 - DNA, 1040 bp, Homo sapiens
attttccttttaagtccttgagcatatttacaatagatattttaagctctttgccaactactttcatgatcattatcatttccacatcagtttccattaataatttttctccgcttctttgcatgcctaatagttgaatacacacatgtgcacatacatacacacatgtctagtaggttttatataaatacatattttaagggtactatgattatgttgttaatgtgtggattttgtggtcttccttaaagagtgatgaattctgttctgacaggttattatattacttgctgttcaacttcataaatttcagcttactttaaagctttgttagagcatgtgtagagtagccactacactaaggcagttatcaaattgagggagaggtggatagtctgaggaaaataactagtaaattaataagtgcataggcttaacaactatgacaaaatgagatctttggctgtggtattttcacatataactgacaggaagaaaaagagaatggaaacctacatttcggagggaactcgactaggaaatactaccataagcctaacaaagactatccctgggagccaaatctgcaccaatagaaagcagggtgagaatgcagtggtgtctccaataagagtacactaacacccatgttagatacagtcacaaagaatcatagaccaagagtaattcccaaagagcaaggtcagggactatgaaggacaaatgacaagggagcttatctcagaaagcaaaattaaggtcctagcaagaccttactccactgccagagcaagaagtctattattgtaaggaacaggaactatcatatatggcccattcttttttttcccattgggaattttccttgtcctttataccatcatacaagaagcaagaggtcaagaaaattaggaaacttgtctcttagtttattggtcaccacatcatgatgaaccacacagaaacccgatatagaggactttacccaatgaatgtgactttgggttatcatccttgagaagatggtatgttttatgaat

SEQ ID NO: 98518 - DNA, 1045 bp, Homo sapiens
tgtatagaattaatattatattattttcccaccccagggaattatgttatgaaattgattgtatttaaattttatggcatctttagcactgaggaaatgcaatatttcaaatttatgcatgtaagcatcaggatcatttaaaataatatgttgcataatatatttaagattgtcagaaatatttttcatttaatgtctagtaatattttaaaaatgtatgtaattcattctgttacagcattttaaaatgtaaatttgtgacgtatttggcatttaggggaatgatgtcaatataatgtagatttttacacactttgtgtgtgtatccacaatgtgggttgtttccagattacttcaaacttgttagcattttgaaatgatcaaggtcaagcttttctcaactaaagaggaattcttagcagtagctgaagatctaaacaaaatgctaaaagtcctatagaaatatcctcctgtagctcagtaagttgctggtttattggctatacatttttctgtgttgactaagctttaaagatattttgcttgtgttaaaaagaaattgactaatgaaaaatgctgtctctagaagatatttttaatttttattaaactggtttctattagaactaatgtcttcaaggatgcacatcaaaaaaagaagagacccaggatatgaagctttaaatgtggactgctttattttaggtacaaatgccagtggaaactttccatttttataataatcattattgttttgttagggctcagatttaaaagttccttaggtattgtgtggtctggcactatcttcacaataagtctaactatttttattttgcagaacatgaggttatacagaagtgcatatattgtgttagagcaggaatgcctgtacttgattctggcttagtggtagtcatttttttgattaataaaggtagttttaatttttatcctatttcttttcagggcccattatagtgtttcgcaggcccattactaactcatttgtgtgcattaggaaaagattttccttccactgagc

SEQ ID NO: 98519 - DNA, 1051 bp, Homo sapiens
agggtttattgcactgtactcaaaagaaaattgtacctggccactcaaatgtgcctgttagttcttcagctgctgaaaaagaggaggaagtacatgctcgtttacttcattgtgtaagcaaacagaaaattttacttagccaggctagaagaactcagaaacatttgcagatgctcctggcaaagcatgttgttaagcactatggtcagcagatgaaattgtctatgaaacatcaactccccaaaatgaagacatttcatgaacctaccacaattttgggtaatagtttacctaaatgcactgaaattaagccagaagttaacacattgactgcagagaataaattgtgggatgatgcaaaaaatggctttgcacggtgtacagctgcggaaatccaaagatttgcattttctgctacagggctgttgtctcatgttgaagagggtttggattccgatgcaactgatagcagctctgatgacgatttggatgaatatacccttagaaaaaatgtggcagtgtaagtgcaaaattattattagactattttctgttccatatatagcagcaattatcttagtttccaggtatgttgacaagaaatagattttctaaaatcttaatgctataatctttttttttttttttaatttttatttttgagacagagtctcgctctgtcgcccaggctggagtgtagtggtgcaatcctggctcactgcaacctccgcctcccgggttcaaacaattttcctgctttagcttcctgagtagctgggattacaggtgtgtgccaccacacccagctaatttttgtatttttcgtagaggcaaggtttcaccatgttggtcaggctggtctcgaactcctgaccttgtgatccacccgcctcggcctcccaaagtgctgggattagaggcgtgagccaccacatccagccaccataatcttttatgttataaaacttttgttgaatttttttaatgttttgtttgttaaattattgtgtgtgagtatatacatactatttaaaaataaatttactcaact

SEQ ID NO: 98520 - DNA, 1052 bp, Homo sapiens
ctgtaattggcctaggttagctatatgaaacatttaggtcacaagtgtggaaataatttattatttgaccctacttcagggttctcccctctctcaaaatactgttggtagtcttttcactttatttaagcatcaagtataaatctgctgtctttctgataatgttttcctagtttgtttctttgctctgcatttaagagagctgggattatccagattccagttaaaagaataaatttaatgttcaggggcagatttggataggatattttccatggcatatatggaatatatgtatgcattctagaatataaatcagaatctggagcagtattttaggggataggaattcagatttggcctttaatctttaatgcacattctcaggaggaagagtggttcttatatagattatcagtttcaactctgagcgttgagattagattagcaaattttttatttttctttagaaagtttgtcaaaaattttttgaaatatgtgacctatgtattaatttgtaaaggtctgattattaactgtctggaccaactcagtaactattgacttggtaattatctcactgtgtacatgcaccttttgaggatgatggcttttactgtatttcatgatgtccaagggatcagattgcatttaattaatgctaaattcataaatatgtatggtttagaaatcttaaaaaatatagattaaactcctaatggaaagtctggagacaacagggcaagaccttttatttgtagtacagtagtccatctttatttttggggtatatgtttcagatccccagtggtacctgaaatcgcagacagtacttaaccctatatatactttatttttttctaaccatacatacatatgatcaagttgaatttatgaattaggcatagtaaaagattagcaacaacagtagtagaacagttataactatacataaaagttatgtgaatgtgctcttcttgctcgctctcaaaatatcttaccttactgtactcacctgtttttggactgcagttgaccacaggttactcgaa

SEQ ID NO: 98521 - DNA, 1027 bp, Homo sapiens
ttttacaaaattaaatcagatgaaacatactcattatttttattttgaatttgtaatctctttaatcaaattaatacaaagctatacagattattaacatcttaatagttttttttactattattccaatttaggatgaatgccatattgaaaaaataagtaatttatgaaggacttttattgtttgtacttcactaattgaatagtttatgagttacctggtaagacaaaatttacagtttctaatatattttatttattcattcaatcatctgatttatccagagcttatgtggatgccagagttcagccaatctatggtggtacaaatgaaataatgaaggagctgattgcaagagagattgtctttgacaagtagacatctgcccacatcctggagtcctattacagctaatctcgttttaaatctgctcaagataaaatgtaacttggaaagcgaggaaacactaaacatgtttttacctgctctctctatagagaaggaaataaaatataaatataagattaacacagtggaaggacaaatctttgaagccaaaattctagttttccaatataaggtttaacttacagttttttatgtagccaaaggtaaacggttttctgaatcttgcctaggtgtttcatttatctctaaaattctaaaaagcataaatcattcaaatcttcaaaccaaggcagaaataattttatgtcgctatagtataaaaacattaataagatagcacattgacttttaaagggaaaagtaaatataacttagcatgtaaactcatttcggctaccatttgctccaaattccctagaacagtggtttttaccactgtactccaaccccgtttttaagcaatggaactctttcttcaaacaaaagcttatgcagaacatctctgtgaaacgctgctgagtgagaactgctttcattgaagctggaagccatcataccttactgccttgaaacccctaggactcagctaagtatttgcctaaccctgaccagggaatg

SEQ ID NO: 98522 - DNA, 2363 bp, Homo sapiens
tctggtttgaagttttacttcagcttctagaagtttccagcatttacaaaggaatgactcttgtatgagagaatcaggcttagatatctttactctttcatattgtaaagacagtgcataaattcccaaatgtggcatcatgtaggcaaaaaaatatcttgagacttgttggatccacccttattttccaaataaagtgtcatacatagtgtcattgaactaaactaggagtaggcttagaaaccatcttcagggattttcatggaatactcatctgttttcgatatatagattatttgcctatttttttctttttttgttccatctttatattgtctaagagtaaacttcaatgtgtgggttgggagtgggaaactttgtgctgattaaagggtagatatttgacctaattaaatatatgatgaatagaaatggagatagaaaaaattaagggaaacaataagcggggaagaaagttttgatgtgacccagcatgttcagaactagaggccagaatacagagatggaaggagtggggtgccaaccttctcattgcttagttttggaatcattcgatgccagttacattctctgtttctagaacagggtgaaataaaaccaggggaaagacagtcagttggagttttcatcagcacagtagttatgttgatatacctgtaaggaatctgcccctcagagctttactccacctgatacaccctggtcttgcttggtcctgggtctttttacactcccattctactcttttccagaaatggtaagtatcaaaactgtcccaaccaacaatgacagtgaaagaatcagttttataacttgagaattgctgtagccagcattaaaagcagaccatgtatcttctgagaatgtgtcccaccaccctcctttgagaacacagctgtggctttggacttggtagtacctaggtgggatgtgtttaatttctagtttgagtttcactgcaccacctttgcctgtaactttccatgtatatgctattagccacagtgaagttcttactcatttcacagcagaatgatcagaactgtttctatctgaattttcacaaagaagataggccagctgaccatatctgggccttggacctaagaaatcaactagaatggagtatacttttggagctacccaaagtgggaacccagtatttcaagttcaagccaatttcctgagggaggctcaagagtcagtgccaaagagaacagatatacactccaagttcagagtgtgagagcctagagtcaggaatgaaataaagcttgattgaagcaaggacagtcagcaacaattgagaatggtctaaatagaatgatttccaaaaatgctaatgggttgtccatggccagtaggaggaggtaggtacatagctatattaacattgataatcccagaccattcagtccaagctagagactgctaaacaagctattgagaggtacgggaggtgtattcatccattttcatactgctatgaagaaatacctgagactgggtaatttattaaaaaaaaaaaaagaggtttaatggactcacagttccacatggctggggaggcctcataatcatggcggaaggtgaaggaggaacaacagcacatcttacatggtagcaggcaaaacagcgtgtgcaggggaaccactctttataaaaccatcagatctcatgagacttactcactatcacaagaacatcatgggacaaacccacccccatgattcaattatctcccaccacgtccctcccacaacatgtggggattatgggagctacaattcaagataagatttgggtagggacagagccaaaccatatcagaagggataatgtgaagggatgaaagaggatgagggtactggattttgatctctttagtactctgattttattctattgctttctacagatctagattaaatactgtgcaatattaaataataccttatattttgatgtttatgaacatatatagaaaccccttgtccctccagatgttagaagcagagtagcaaaatctgtatacttaatttcattaataaagaaaaaaatcttcaaggatttaatctctggaggaaaaagcaacaggtgttttcaacggctgtacctaaataactgtaccacaagatggtgctcacacattaaagtcatgctgtttttcaagaattttgcctcgtctaaattttacaatctgaaacaagacattgtttatgttttaaactatttttgcatcttttagtacaaatttccttagcactgaaatatagtgagttttaaatttaagctgatttggtaacaaatgccatttttatggaggaaaaaaccaacaattc

SEQ ID NO: 98523 - DNA, 1021 bp, Homo sapiens
atagcatttcaactgtggcagctatacagacattaggaactagacagaaaggtaggagcttggtagacttataaggtttttgagcaagggagtcgtgtaatggagcaatactgttgaaaaaatatttttgccaagttgtatagaatttttttgaggaacatctttttcaaaatatatttttaaaacatcctttggcctcctctgtgccaaaaagaattctaagcacttaagatagatatatgaataggaaatggctatgagctcctagtaaggaggcacgttgatgatcttttattattgtgtcacctataaccatactgccaccactatattcatttgctgttgtgtagacaacactaacattatttgcccatttttcattatttgtatgtatcagtgctgtgcattttaggtgatgggagtaaccaacatcattttatacccctactatttcaaagagagagagataaaaacagatcattttggtaaatttgaggtgttgtaggaccgcttaacccagcctggagaatttgagaccttttggccaatctgatgtctaaaccacccaggatgagtacaattcattgcagcagagttgggaaagggcctttcccaagtagcagaaacaagattttcaaagactcataggtcaggaagacctcgcaacgtgatggacagcaagtagtttagtagagctgactgaagaagaggaaattggggaaagtgggacaagcaataagccaggtaaggagaggtaagctagtgccagtttgtgataagttttctatttcctgctaaaggttttgaatttatcctgaagcctattaggagctattcaaaaatttttaagtgtgaaggtgatatgatcagattgcatttagaaaaatctctttgacatcatgatgaatgatacagctgtagagagatcagttgtaggaacttaagaaatgatgagggctggaaataaggtaattacaatagacttgaaaggaagtgaataaattccaaaagtattaagatg

SEQ ID NO: 98524 - DNA, 1014 bp, Homo sapiens
gtgggaagaaaagaagatagaagatggaatatggttcattttgcctgccctcagagatggattgagcactgtctatatttttggtttgatttggcctccacagaaaaaaatgttgcaattgttgaaaaacatccagagtttcactggccctttccccttccatggaggaaagcttcattatatataattatgtatctttgtatgttgtattactttagcattttataaatgctttcatgtttattttattattttttaaagaaatagagatggggtctcgctatatttcccaggctggtctgaaactcatggactcaagcattcctcctgcctcagcctctcaacatgctaagattataggtgtgagccactgcacctgatctcatgttgattttattatatggctattataataagatatatggaatatagagatatgatttctgtataagaaggaaacagaaaataataaatgaagtattttgaccaagttcatagagcaaattgttgacatctttggagccagagtgttctgacaccagctgtgtgatcttgggtaaaaatctctgagcttcaatgtctcttatcaatgaaattgagaaaatgatactgaagaagattattgtgagggtctaacttgttggctttactaagtagtatacgttttcatttttaatatttcatatataacattcaaaaatttaggaaaaatttacaaactgagctatgtcattacctttatttcctttgatatgtccctgtatagaagaattttttttttttaaacagtctcgctcttgtcacccaggctggagtgcaatggcgcgatctcggctcactgcaacctccacctcctaggctcaagctattctcctgcctcagcctcccaagtaactgggattacaggcgcccgccaccatgcccagctaatttttgtatttgtagtagagacagggattcagcaggttggccaggctggtcttggactcctgacctcaggtgatccgcctgtct

SEQ ID NO: 98525 - DNA, 1158 bp, Homo sapiens
aaaaaaggaaagaaacatgtaatagtaaaaagttatttttttaaaaaccctttaagtctactttgattaattacatgaaatagatcttttctggataaggactagaaaagaaaaggcagagtccaactaaggaagaaatacactaaattagaatttaatgcaaaatagaaaaagcatcctttggcaagatttgaatatatgataagttttttagatgtgaacttgaaaatgtacaaaatgatgcatagattttcaaaatttctttcaggggtacttcaagggtaaaaaaggctgaagaccactgaactaaaggagctacaaaactgtctcatttgaagcttggtgtgggagggatgggagtaggtcttaaataattccattttacagaatctttatcagagattgatgggtatttttatctccacccagattggctttgtaatgtggcgattacatcaacatggtttgcatcttatacacctgcaatttgaaattgtgtgattctggttaaaatactaattttggaggctttgcattattttaaacattgtatatgatatgaaaatttatcagtattactctaccgtactatttgaattttacataatgtgatccatatgtcacctgacaatactacatttcacctcaagtcagacctgtggttagttctaggcatcatcttctttaaggatttggagatggagaccgagttgaataatgataaggtacttcttaattccagctacatgaggtagatcccatcaaaagtggtggcgcccaaatttgaacccagctttgtcataattcaaactctttctacttgcctctcaagtttctctgtgaaagaaatccatgttgttcagtggcactaatttggatatgaagagtaacaattcacttacttttcctattgcatatatatatttttaagatgttctcattccggaggggaagaacgtctagaaactccttctgctaaaaaattaacagatataggaattcgaagaatcttttctccagagcatgacattttccggaaaagtgtaaggaagtttttccaagaagaagtgattcctcatcactcagagtaagtggcacattttcctctaatgtaatgtatactaggggtattataggaccatttcctagaatgccata

SEQ ID NO: 98526 - DNA, 1236 bp, Homo sapiens
accaaatccccactgagtgtgtactggttcctgcaggtagcagtctcctattatctcctgtttagcaccaaaagagctaatattattggaaactgaccttttaaaggccactggcagtaggatttaaaaagcagcccactgctcagtttccaggatcagcttcctccttctgtcacttgtgtaagttggcactaccttgtgcctctcagattgctgaagtgctgctggtaagcatgtgcatgctctgcctttcttgtgaaagttttcaatcagcgatatcagcacttacagtaagaagtaaaagtagtgcacagcaaagctaatttgcctttgcctggggtgttcagcttgaaagaataaagctcatttggtttagttaaatgtcttactctactgtgcctatgcttttagctgcgttactaagcaagggaaaaataacagtttctctgagccagagaagacttgatcacagttctccaagcatcgtgatagcaatgcttaaccccaggaagatttcaaggcagggagaagaacatttcaaataagattcttgttaacccatttatgcctagtgttccattattggaatgctaagcttgtgggagtcatttacatcctactgctcaaagtcattgccaaggtctgatttttcacacaaaaaattgcaacccccagcataaatgggttagctactgtcatcagttagcaaattcatccacacaaacacaattagagtttggtttttttttaagcttttcaaaacttactaaactggcacaattttatatgtatgctatttgttgtatttatgcttaagagcaaaaaagttttgatgggattttaaattcaggcaaagcctacaacgctgagacaatcccctaacaacatggtagtaactaaagaaacttttatactaggcttcttagttttaaaaggaagtggcatcattgtttcagttctagtttgtatttttctctcagatatttttcttctttaaaaatctttcccagaagttggttcctagaaaactcaataccatcatctcttatctctatacagggactaggtaataaaaccttcaaaggttgtcaaaggtcatcaagcagtgttcatttatcctgtcacatgtttctgtttctatagtaatttagaaattgcaaatagttaacttttcatcatgtaaaaagttaacattatcctatttccatagataccatggacggcggtgtggcctga

SEQ ID NO: 98527 - DNA, 1627 bp, Homo sapiens
acctcttaacttttggggttgtctctggaagaaatcactatactaatttaacttggtctcattttcagtttgctgaatggtgcttagagtatggagaacatggatgcagaacaccagacacccctttctctctctttgaaggtattttgtacactttatttatttgccctataatatcagcatctacttctctgcttggtaattaatgtatttaagttttagcaaaaaattttataattattcttaaactacttttttatttcctaatatgctaaatcgatattaaaaatcaattagcacatgtaataccacagtcccaatactggtagtcatcaggtgactcccttttatggagccaggcacatgttgggcattttgcagacgccctcataaatcattcagcaaaaacatacaggcactactaccttcatgtcatagccgaggagactgaggctcaggagcttatgtttggtaaatggcagggctgtgacttgaacttgtctggctccattctttctccagtcttccaccgggatataaggctgaacacctcactagtgatctcttctaatgttgaactgcagtgtatgtaaacgtagatagattcacacttcatttaaatcattgccgttaatattgtaatgttgttaatgttaaaaaatggagccatccttcgtttttgcagagttgtaactgctctcggggggtgtcagtgaggtgaggaaaaagccataggatgccgaaggaggagggccaagaggacacccccaccctccagtgcggccttgatccagaccttagggacgaggccatcactggtgggcaccctttgttgatgtttgtgtgtttgaatagactgaaatgctgtgactttttttgtcaataaagatatgggggaaaaagaaccatcctatgaaatggagtcatttggtataataacttttgcctctttctctttcttcaggaatggctggaacaatatatttcctggctgacctgctagtccccacaaaagccaggttccctgcatttgaactctgaaaggatagcatgccacctgcaactcactgcatgaccctttctgtatattcaaacccaagctaagtgcttccgttgctttccaaggaaacaaagagtcaaactgtggacttgattttgttagcttttttcagaatttatctttcattcagttcccttccattatcatttacttttacttagaagtatccaaggaagtcttttaactttaatttccatttcttcctaaagggagagtgagtgatatgtacagtgttttgagattgtatacatatattccagaacttggaggaaatcttatttaagtttatgaatataaccatctgttactgttctaaaaatgtttaaaagaaactcaatacagataaagataaatatgtgactattattgggtattacacttcacttctctttaatatttttcctccaactggagggcagacaattttctgacttgcttttctctaggtggttcattttgaaaggggacagaaatataactaaatgcttccaggagaaaaattccaagagttacaatctggacttggtacctaaatatcattttttaaattcttgatgcctatttgga

SEQ ID NO: 98528 - DNA, 1031 bp, Homo sapiens
tttatggctaaatattattccatggtacattttctttatccaataatccaaagaatgaatgttcatgcaggcacatataaagtgcttggcattatttcctgcagtgggtgtgcctgaaggtgaggcagagatggactggaaaagattgacgtttctttgaccagcaatgctgaccctttgctctttactagaggcagtggcttcactgtgcaaaacaaatgtgtgcttagtggagggtacctgaggtcaagggctagccatatagatgactatgagggaaatgcagtccgcattctatgatagtcattactttttgtatattccgcaaagttttggtataccatattaataaaacagcatatgcaaaagcacctaccagaacagctgtcagaacgcaggcactcaatgaacataacttcccttctcccagcttccccatgccttccttctaacatgtactatgctctttatctttataaacctctggagccctcttatgggtctctgaccattcagggttctcagtttgaatctgccccaggctttgatttttttctatagttttacttttataaacatttaatgactgtatatatttttctttcttgaacctacatgatatctagctagtgtaaccaaagggcaatttatttagaaacaaggtattaaattaacttaactaatatttattgaatgcgtactgtatgctagttaatattatagtgatgagaatatagtaggaaataagattagtcaaagttcctgtctccatggagcttataccgaaataatgcaaagtaggactataattaagtagtggatatattatttttgtcatcccaaatgtatttatctgtttccttattttatggtttctataccccagtatttctatggggaacttgtcatccttatttgattggagtcttagtgggactgtacctaaaaatactccaatctcccttagctaattcatggatatagtaaaccatgctggaccaatcagattctctgttaggttgagtaacaag

SEQ ID NO: 98529 - DNA, 1025 bp, Homo sapiens
ttatatatccaacccattacccacaatgatatttgtaaagtagaatcaattttccttatttcaggtttccagacataaatatctatttttatttttcagaaaaaaagagaatagagtaatactattgttgactctaattttattataattatgtttagaatttttggaatttgctcaacatagccaaaaaaagaagtgaaatacaatgttatggttaattttttcaacttaacccaattggaaaattccagtcttcactataacatgtttagatattagctgctaatatctatcacaagagtgagttgatgaaattggacagatgggggttgttacctcagatgatgctctagacaagcaagtgtcacagacagaggataatgaaatgctataaatatgatacatgtgggaaatgggcacctttagaaaattttggttaggtgacatgttttaacatctaggggttccttatgggtaggatggccctttaggagaaggctctgtgttgacagtgtggatttagggttcaggaacttagcttgaacaaaagaacaaaacctagggaattcatatatgatgatagagggaaaaataaaagtaagacattacttttctgccgtttccgtggtacattttcatagtcagggtttcaggaaagtttggtaggagaactggatgttggagagacaactagacgtgccatgtttcagagtccagggtagctatttcaatattaaaactagagaaagaagaggaattggtgagtaggaaaaaataactggattaaggtcttagaaataagctgaaacaagaagaatgaaaacagaagagataaacaggaaggtaacaggaatcatgtatccagagtgtgttgctattagatgcaggtgtttaaacgtaatagagcaaaatggatctgagaaacttagaataggctagtctctaacatggagcaattatgtttatattgtactgtttcagaagccagaacttaggttcatttataagaagacatattttagttc

SEQ ID NO: 98530 - DNA, 1072 bp, Homo sapiens
catgccagctttcttctgacctccagttcttgcatttctttttgggaagagaaatccagtttactatgtttaacattcaactaccaaggaaccacattgctggctagaaaaaggccctaaaacttatttattatgtattttatcaccatcacaaggttaagacatataatagaaagcagcgaggcataaaaatcacagattttgtgctattgtcttacactttgtgaactctttaaaacaaggcaaaatgtagtaagtaatgggaatgaactattagaccttttaccctcattagaattcttgggagctttctctcctttgtcattccattggtcttctttgctactgctggcacttaataactcagtgcttctaaaaaggtgcctgacccaccagcttttacattttaaatttattttctgttttatatattaactttaagcaaataactataatgtgtcaattatgtgtaaagaagtatactatgaaatgtagatcatatagtgagtgttaacacctatcctcagtcattgctataacgggtaataatttttaatctgtggcttgaatttagttgtgtgcaaattattttagaaatagtatacattaagattataaggagatgaatttatttaacagttgatgcatggatgtggaatagttacaatatcgtaattcattggaactccttatgctgtagtctagaaaccttaaattttaatcattatacatgtcttttatttctaataaatgaataaaaataaagtaatatataaagatgccttttaagataacattaatactctattattgatagtaaaaggcaatgactttgaaaaagtcagaaagtatagttttttgaagcaaaaagattaaaaaagataacttctctcagataatgaataacaaatgcatgttattatgaaaaggtaacacatttgaaaaacataatttgcttttatatatatttggcagagctatatggctgtttttgaatgtacaagaaataatgccatctaaaaatttctatttttttttaaaaaaactttggagaaatcatgcaaatagttta

SEQ ID NO: 98531 - DNA, 1014 bp, Homo sapiens
tatataagttgaattatatttagagatgccttgttcagttatttaggttggtccatttctggttcagattcttctttgttagagaaatccagcagccatctaatattttgaaattagaaaataaattcttttcatcaacaaatttgtggtacaaagtaagtcaaggctctcaagattggccctaagaacggtctgttaattcttaggcattgtgttttaatgtttcataatacctaagagtatatgtacatgtatgcccacaatgacgacatttctcaagataggaagggagaaaaatatcccatgaaatatggcatttcttctgcttctaggttcagtccatttttttgatgcctgactttgtccattccagtccatccgtgacaaccctctggaggaaaatgttcgtgacttctttaaccctagtgtttaccctttgtgctctggctgctcagatttcctctctgcccagttccaggtataacagcacgaagaactctgagaagaatagaaccattcttgaggcattcagcctgtatgtgtttaatgctggcttcaagatcctcctatttagcaattcttccctttcaaatctaattatttgaaagcatatgctttgtcctattctgaccacttcaaataaaatgctttaggaagaaaatcttttctgatatccattttatctatttcaaatcatgcagcaacctattagtacttctgagttaacagctacttccaactgaactagaaaatcatttacttcttcctattttaataaattctctgtatctttttataaaactctagttagtacagtcagattagtcatgagcttactgattactcctcaactgagaatttaacacccatttcagatatcaagggatctatatagaagcattatattctctctaacggcatattcaagaaggtatttgcttgcaatatgttataatatttcagaaaattctaatactgatattacttctaggtggtgagcctcaagagatcaga

SEQ ID NO: 98532 - DNA, 1032 bp, Homo sapiens
cagtaataaccacagttgggggatttataaaggaagggaaaggaaaggaaagttggagggctaccacagcttaatttcaagacttattggaaagctacagtcatgaagacagcatgatatcggtgtaatatcacctatattacacctatattgcaactgatttttgacagagttgcaagggcaattcaatggagaaaggacagtcttttcaacaaaggatgctggaataattggatatacatatgtcataaaatgaatgctgattcatatctcataccatgtataaaaattaactattaatggttcacagacctaactacaaaacctaaaactaaaatttctaaaaggaaacataattttttactcttgaattaggtagaaatttcttagatataacaccaagaacatgatcaaagaagaaaataagtaagatttcatcaaaattaaaaacatttttctgaaagatattgttaagaagaaagtcaaaaactggaagaaaaatatttgaaaatcatatttctgataaagggacttgcctccagaataaataaagtactttcaaactcagtgtaagaaaacaaataatccaattaaaaaaaaactggcaaaaactttgaagacactttgccagggaagtaatatacatgacaaattaacacatgaaaagatggtcaacatcacgagttattagagaaatacaaattaaaaccacagtgagatatcactacacatatattagaatggctaaacttaaaatactgaccatacaaagcattagtaaggatatgaagaaactgaaactctcatacatttgctggtgggaatgtaaaatgtacaccactttggaaatgtttgtcaattttttaaaagatatactaccatatgatctatgcattccacccaatagaaatgaaagcatttgttcaatagaaaatttgcacacaaatgttcatagaaactttatatgcaataaccctaaactggaaataacataaatttccattaagaggtagacagaattgaaagcctgga

SEQ ID NO: 98533 - DNA, 1067 bp, Homo sapiens
gttgagttgtttgttctagaaatccttagaagagctgtatgaagctgatcatcaaaccaaatggaatgtctgtgaagaagcaagaggaagaaccaaaggtaaaaaggaagtaacctaagggtatttgtgttgggtttcattgggcctttggtaagcctgtggtagaagagggaggagtcactgtgttgtcatttcacctcaccagacggaatcaactgtctccaccgggatcagaatcaactgtctccaccgggagggagtacttagtgaaatcccttgatcaggaagtaggagaatttggctaagagggaatggcaacagagttcattttgtatcaatgccctgggcccacatattggttctggttttgtggacataaaagcttaaaagactttgattaacatctatctgttctccttgaccctgtcacaattctgattactctaaataaaacacagcctttttcaatgtgagaaattcgatgcaaccacaatatgtgagttttaaccatacccctcttttttacaagtactttgcaaatgagcacgattgttcctgactttatctaattcactctcaaaacactcatggaaaatgtagggtgtctgatactttatcttcattttattggcaaggaaacagattcaggttggttgtgattttgttcataagcaccccaatcagtgaaaaagctaaaactagactctaattccacatattcttagttcagtgttttaatttctaaaccagtttattcaccattttattgataaacccaattaataagagaatcagcaggcatactttaaaagtaatgttttgcttttctaatttttaaacagaattatcccaaatgaactcactggcacagtcattaagactgagaaatacagtattaagtagcaaggcaaaaatcatttgaaattaaaatattgttgcagaaatttttttaatgaataaattatcctagcttggttcttctaaagacccctttgtgacctaatttaaataaatgtgggcttttgattacttacaaaatttccttcagagttgatcgaattctttgc

SEQ ID NO: 98534 - DNA, 1031 bp, Homo sapiens
tactggaataaatttagggaatctcaggaacaagcatataatttgtccaagatttatttcttctcagaagtgtaagtgcagtttttaattctgtatattatttaatattttaccaataaaataaacttctgacataaaaagtttgctataaaaactttctggtgaaaattctgtacacaaacatgtcttccaaatacagaagactaaattgttgactataccaggcttaaattatcattgccattgtgtatttgtcacacttccagttccagaggtttggatacatgtgatatctgcaatctacatctcaatcgttagtcatctccatcattactatatagtccaccagagcagaaaacaaagtattacatgatttgttaagaatgacatctctgctctttagacagctttcatacatatcttatttcacttttaaaaaagaggagtgtacatcagagcctatcccctttctatataagaaaatagaccttaggaaagaaaattgtgacttactccaaagagcatagtagtgcacttaaattacacaagaggtctgagtgctctgatctggtcaataacactactagaatacactactgctatagaaaccagtatttcttagaagtcaaagataaaattaagaagtcatagcgattgttcaatcacactggcaaaaactggttgccagttctgcttcatgttgtacaatcactacgtgagtcatacacatctctttgtttcttagattttacaaatgtaatttatcttttgccatgagaagtttgttctgttataaacatcttcataaccagaaatgcaaaagggcatatatgactgcaaattcattttattgagtgttagctagccactatccttcaggccagtttgaactccaccatcacatttgagatagctgttagagtttttcctcactgatatgtatttatagaatttcatggatacttaccacattccccagtaatttcacttccatgtgtcacacagaatgaaaaataccataaattcaaatg

SEQ ID NO: 98535 - DNA, 1248 bp, Homo sapiens
aaataaattattataatcaacattgaattatctgttggcagattgaacttttagagaatcaaatgctaacgaaaaatttaaacaagtatattttgagagaagcaaagatatgtcccctaaacaactggggcctcagtcttaccccctattccccagattgcttagccctccgtaggcacaggccctttacaggtggtgctgaagctggaaccaagtgggggaaagtgggaaaggggtaggggcactgggtaggtagagcagagggtaaaaccaaagaggagaagggattgagggtagcttctgataccatttatagaaacaaatattcttaaatactggatatcattttaaccacataagtttacattcatgccatttcataccatactttttctgggtttgttataacaataatttgagattatccttaatctcctctatctgttgttaacatgcctaatgggaaattggccatacgaggtaggagttgataaatactgtaagagaaaaacatggttctgtaaaatgctgctagagttcatcattaacatacgtctcatataaatagcttggcatatgtctctttttaaacagaaccatgatgaaacttatatctattcccttctcttgctgtatgttatttatttgttttccttttttgtggtagatatgagagttgctgtcattttggttgccattagctccatgaaatgatttaactattacttgtttttaaaaaatatctgacatagttatatttcctagtctttcttttctaaaacatgtttttccctgtgttgttcttctagtatggaattttttaaaggaaaagaggcattttcactttactcagaaaacatttatcaagagcttactatgtgccaagttatatagaacattctggggtataaaaataaatggacccagtcttttaatacacttactttatagtctggtaggaaatacatactttaaaaaaataaaataaaatgaaacaaaagctctaataaggatgcatacacagttctctgggaacatagatgtagaattaacctaactctggaaaagtcaagagaggcttcttacatgcaggagtgttcaatccaaacatgagggatgagtaaaaattgcatatatcaggcaggatacagagaatgtatattcaaggagaaaaagaggcttggagatataaaagataattaacagcttccctgatgttgagtgtaactgcagtttaaggagtggtag

SEQ ID NO: 98536 - DNA, 1046 bp, Homo sapiens
gatagccttgaagtgtctaagaaagaaaaaaataataactttttttatgtgaaatgtaaatgacattttaagaaggggaaggagaagagggaaaggggagacaaataaataattgaaatgttttatgaacaaagatcagctaaagattacagtcaagttgtggccgggcacggtggctcacacctgtaatcctaacactttgggaggccgaggtgggcggatcatgaggtcaggagatcgagaccattctggttaacatggtgaaaccgtgtttctactaaaaatacaaaaaattatctgggcgtgatagcacacgcctgtagtcccagctactcgggaggctgaggcaggaggattgcttgatcccgggaggcggacaccagcctgggtgacagagcgaaactccatcctcccaccccccccaaaaaaagattacagtcaagttattagcccactgagaaagtgaactgcacttttaaaaacatgtcccagagatacattacataaagttataggaaaataaaaggtattagtctatacttgaaactcttgctattcagtaatcttgagatttactatacaaatcatctactttgcttcatgtgaacttttaacatagtatttaagtgacttttttttttttctgagacagggtctcactctgtggcccaggctggagtgcagtggcgtgatctcggctcactgcaacctccgcctcctgggtttaagtggttcccccgcctcagcctcccaagtagctggaattacaggcgtgcaccaccacgcccaactaatttttgtatttttagtagagacggggtttcaccgtgttggccaggctggtcttgaactcctgacctcaggtgattcgcctgcctcagcctcccaaagtgctgggattacaggcgtgagccactgcgcccacccttaagtgactatttaatgatgaatcaatgcttctgctacaaaaatgatttttattagttttgtctcagatttttcagttttataggtgattatagttctttcattcttataaatttgat

SEQ ID NO: 98537 - DNA, 1023 bp, Homo sapiens
catcagtcgaaacagaaaaaaaaaaaaacaaaggaaaggaatctgaaaactaatcttttttttgaccaattagtgacagaaatttccgagttactcctttcttatatttcatcgttagctgatttgattgggaagagaaaagagattttaattttacccctgtcatgctgggcgagaattcactgtttcaaaacagaactgacaagtgaatttcattaagactgataatatggcaacatagtgaaagcttgcaactattatcagcatgaagaaattttaaccaagctattatttttgaccaatgttctattacttgtcatagcgatcttgtatctaatgatggtgaatataatgggttgaagaggtttcattttaggttttcattcaaaaattgtgtgtgtgtatgtgtgtgtttcattttaatatttttaggttttgcttgcattgtagggctaagttcatagtgaaaaaagacaattatataattttgtttatatttgtcgtggaaacaggctaggaagtattagtgagaactacctgttgatactgacatgtatcttcaacagtaaatattctgctttctgataaagggatatatggtagggctacaagtccttagttcaggaatttaagtgaattgctgtgagcctttcttcttcccaattctgtgcctttatacttctccttccacacagacagacacttgtagtgggattgtgatctcttcttgtctccacctaatataaacagaatatgaagttaggactatggcttgattgttactgtatctttagtgcttagcagtgtgtccggtacaaaagtcttaccccataaatatttgttgagtgaaggaatgaacactcacattttatcaccttgaaaccgggcgtaaaagcccagttcttaaactcactcgttacattcaattccttttctctgcagattctttgcatttttctgtttattttgttgcatttcacttgtttgcctattacttagtaaatgagcttgtgtttttaaatg

SEQ ID NO: 98538 - DNA, 1049 bp, Homo sapiens
cactgcactccagcctgggcgagagagcaagactctgtctcaaaaaaaaaaaaaaaaaaaaaaaaagtacatagaatagtatcagaactggaagcccaaaggtcaattaaaaaaatttaaaaaacaaattgcaaagatgttaagattgtttcccatttttatagttcatacttacttactattttcattcattttgttgattgacagcattcactatagataagaggtagttcatggcagtggtttaatataaattattagagaaaatttaaatacagaaagttcaagaaattcatatttctgtgatggaaaaaagactagtattattttacttgagctatggaatactacaatttaatatctataacacttgtgcttttcatggatacattttaagaaccactgatttaaacaagtgacacattaatacacttatttgttcactattatcatattcatttggtgttagaattctgtaaatgtagaattaagtcactagaaaatccttaaaataagccttctctataccagattcagtgaatttcatgtatataagatggataattattaagcagcttgcataaagatattccacagtccttttggtaaacttgtacctgtgtgtaacaatcttttattctgaggaaaccaaaattttccttgaaatgatttatatattagttgtatgtcttcagactcactaagttcatatacttttatttcttttatttatttattttttttggagacggagtctggctttgtcgcccaggctggagtgcagtggcgcgatctccgctcacgcaagctccgcctcctgggttcacgcccttctcctgcctcagcctccggagtagctggactttcatttcttaatagtgaattgtagaatttggatgtagaatttggaagttggacatctctcaagcttcttttaaattaaaatatcataatttatcctaaacaattgaagataaatattccatggtattaagtatagggaaatgacatatctcatttattctcttttctatattaaacatttaatt

SEQ ID NO: 98539 - DNA, 1014 bp, Homo sapiens
catggcagcccaagtagggttcaaccgtgtaggtaggatctgtattattaattttcattatgccaaaactgacaaaacattacgttgaaatcataaagcactagaaaagcaaatacctagaaagtattatctgttctgtaagaaaaacaacaagctaaacattttaatatattattgagtttgttggatttataatattgggacttctctttatacaagtacctggcctttaaaaagaaatactacctagagtagccacaggtactgttaatgttgccaagtattcctaagtatattgtagttagattagtgtgaggaacttccttaaaaaatttaagtgtaaacctgtaaggttactcttattggttgtttttcatagtttatttagtgactattgcacggtaatgctttgtattagatcaacattaagttagaattcagtggctgtattaaatagccttttaagacagtatgttaaatacgtggctttcaccaaggggcccctatggtattttggcaattttactattttttaaaattcatacctagtttgaattgagattcatgtaagtgaaacaccattaataaggatttttagttttaaattttagtttgttttattataaaatagtcaatatctatcattcttaaaatcaagtattctttatagtagtcctacttaatatgcagtctgtaggctggaaagcatttgttaccagtctgccttgaaattaaatatagaagttgagtaaatgcttaaaactgtcaccaaagtttgatagagtaataaaaatagggggcttgtattttgtttttgtcaaatttgacttgattatacaaatgtgatgaattagaaatttaaaaaaccaattggtccttcccacagaaggatatttcatttgagaaatatcactttagatgacattagaagagttatccatgtgcttagtgtcagttagcttaaatgccatacattaaaatataaacatatcaaaaacccacttatattagtaa

SEQ ID NO: 98540 - DNA, 1085 bp, Homo sapiens
ccttttcacttgaaacactgctaaaaatggtggttaaattccattgaaagaaacaacaataaaaaggcttagttaatgtggcaattgtagtagggttaatagtattatacaaactaacactatgaggaaatacattttaaatcacaaatcagaacttgggaaatacactttcccctgttcattgtcaagagtgggaaacggaagtattgtaattagccttctggtgcaagtggcaataaatgcagttgcagtgactgcagtgatggatgtagggactcaggatcagaatttgaagagggtagacctagagtaattgttagagcccctgcccttagcagagcatgtcttgactgttgtgcagttagcagctccttgtgcctagcattttttctggagtaggtgttcaataactactgattaaattctggggcctaggttcaaatcttggctctacttaccagctatgtgatcttggatatgttacttaacctctccatgcctcattcctctcagccctaaagggttgaagaacatctctctcataaggctgttgggagaattaaatgatattaagcttttaaatctcttagcaaagtatggagcatataataagtgttccaataaatgtgagatatgattattcagtaactgtgggttgaatggcagtatctcgtaaggcttgtgttggagaggcagtgttgaatgacagttgctcctttcagtgctggtctgtttattggggtcaggagtttttgtgaaattaatttctttcgctgttcagcacagaatactcagatgcctaatattttaatatttgtttcttctcttccttatgtacctcaaattctgggctttttacctacggaattttaccctaagtgctgttgagtacaaattacgaggtacaacagttagatgaattttttataatatgggttactttttccaaattgtgattattggatgtgaaaattgtgatttttataaattatattttaatgatatatgttttttaataaacatttttgatagaatgaatgcaggttaattaaggagaaggggaacatgcacaagtaaaaggaagt

SEQ ID NO: 98541 - DNA, 1032 bp, Homo sapiens
acactccattgtttttcaacctaatagctgtgtgaccttaggaatgttccttagatttcctaaatttagttccttcagctgtaaaatggtataataataataatacttgccttaagttttgaagaaataaatgtaacaattgcatagagcacttagctcattttttggcacgtttgctgttgtgatttatagactgcaaatatttgcatatagctttttaatatttattagataaggcttctagggtttgaaaattaatgaataccaaccccattctaaagttaccacttgcattctaggaaatacatttgttttgccttgttttaagatttagaataccttttttattaaacagacaaacaaaacaagtttgcatcctcacatttcaccatttcacaaatctattgtggtatttcacaaatctattttattttataatggtaactttatttagctttttctatttgcttttatattatacttaatagtattttaattattatggttgatcatcatggtaatttaatagcctcttaggaagggaaatgctttataaaaacaatcaaatctaatttctttagttcctaggatattttggaaatacatgtattcttaagttagttaattgggtggaaaaattgcagttataattctttagaaaagaatgttgacatatctaaccaaaaattctgatgatagataggacttaaagagaaaatgtaaacaagtgtgttattgatttcaaattacttttatttgggttggattagctgtctttatgctaggactatttgtgtgtaatatagatcaaataaggtgttcagaatgggatgaactatctggaaggaagtggtgttatctatactactacagctggaaaatatgacaattacaaacttaattgatcaataccgtatcacatcattattcaatgattaaggactgctaggtgaaactgacataatggggttttctttttggaaaatagtatcttagttgtattggtattccactggatatttagtaaaagtg

SEQ ID NO: 98542 - DNA, 1064 bp, Homo sapiens
acatctcagacagaacaatataaaaataatccatattgtatttcggcccatcagatgaaacttactttgtgattccttctgtttcttggttagctcatttccaattcttgcatagttgttcagtattggtttcagactgttctatactggcaggtgactattttgaaaattgtttaaagttcaaaatttttaaattaattttatttttcttatctatttttttataatgtttatgtataaatttactttgcaggtagttacttaaatgggtatgaaaatacatcatgatgcaaaatttgtttctattactttaaagctgttaagtggatcaactgtacagtcaatgctatttatcagtctgatggccaggtggcatgtatggaatcggaagaagtagtaagtctagttttacaaggctctgaccaataatcaggtcagggaatctagtttattcttttcagagtacttcacattaatttttttcttagctagtttccatttttagaacctagcgaagcagaagtatattatgatttctatttttcatatgtggaaattgaggcttgaagaaatcaatttacctcttagagaacttagcagaaagatgaagttatcaggattgggacataaaattgtgatattaccttgtgggttagttagataactgctatctctacaatgtcaccttctcagggtgtctgccgtgtccaatactggcccatatttttgtgacaaatatctcagaaatagaagagttattatgagggtggagtgatatcagattatcttttcaggcgggtgttctaatgcactttttgaaatagagcctatattatgggacttaccagctttctgagttttcttctgtagcttagtttggcagtcacccttgcttggatttctgtaggacacaccctaatataacaccagatgggcttgatagaaaatcttctgttttaagtcgccatacttaggtttgtgtatatacccaatgtactttacatttagttcttgtttattagggaattaaataaaaatagttctgatttaatttctttacaggt

SEQ ID NO: 98543 - DNA, 1043 bp, Homo sapiens
ggctggtccgtggggcggggtgagagatgccggaatctcgcgagagctcccgggggccgttgggtagcgtcttcgctgttgcccttagggacggctgtgggcctgctgggggtgggggcccgaagcgccagagatggctgctcagcgagggatgcccagctccgccgtgagggtcctggaagaggcgttgggcatgggtttgacggcagccggggacgcgagggacacggcggacgcggtggcggctgagggcgcctactacctggaacgtatccttcccgtggaggcgcggcccgctgcgctggcgggtaatgggtgttgggacgaaggcgagggcctcccactggcggcgccttttgagccttggggccactccggaggagcctctgttggacttcaaggtgctgtttttgccaccacagtcttcctgagagccactcactgaatttctcgcccttagtagcccagggtgtcctgtacctgttagaagagttgggagaccttccaaggcctcatacttagtaaccactcagtacattttggatggagggttgctttttatgttaagacagcacaacaaattgcttcaaccctcctttcaaataatgggtttcctaaataagccctcaatctttcagaaagccgtcccaataaattcaacggaggaacgttaggagactagggaaagacctctgccattggactttaaggagctgaagctcagaatacccaacccacgatcctgttcgatggtccagttaatgcttaaatgcttagttttgatagcattatcttcctgagtagttccaagtttgactacttaataataaatactaatagtatagttgcttttttttcttgagcaaataaataatgatctggtgagctacacagctcagagatattaggaataaagcagatggtgattagcgatttttatcggaagtaccagaaaaattgaataacaatgtgtggataattaggtccactatttcttgtgtaaggctttagaacttctttcctctagttatatagattaattc

SEQ ID NO: 98544 - DNA, 2057 bp, Homo sapiens
agacttcatcactatgcaatatatccatgtaaaacaactgcacttttaccccttaatctataaaaataaaaaattttaaaaaagaaaatataaactatccataatttcaccacccagggccaaccacttaccattttgttgaatagcagccttgactttcctcaatgcatttatattaatgcatatttatgagtaacttttaaatataaactgcactaataccatattttgtaagttcctttttcattcaagagtacattattaatatattttatgaaaataaattttcttctaacttaaaagaaaattactgaaaggaaacctttgttttgtaatttcctggcataaatttattcatagaagagaagccagatctctccacacctttctttctttctgcaattaatggaagacatgcaattcctggtgaacaattttagataaacagccagtgttattctgacaaggaatgtgtgaatgcattaacttggggtgaatctgcttatctgaggcaatgttatatggaaaaatcaatgctcagatgtgaagcagagttcgtgttttatttattaattcatttttattaaatatagttaaagagggcctttctcacttaaagaatcatattaaaaccaaaattagattaatggaactaccatataggaacataatattgttaagatttttgataagtttaaagaaacatgccttttcattgagaagtagagaaaatatttaagctcttgtaaaagatggcagtaaataatttgtatgatatcatttattcaagtattatctgtacttgtagaaatgtttttgcaaggtatataaattttgtattgtctatggatgtaatgtaccatttagaattttatattttacattagaagtgtatgatgattcagaagaatatattactagaaccagtgttctctctattcttcattccatttctcaaaagtgttttgtactgtttgccctgttgctcactatgattttgtatattcatctaatggattcactgggaatttggtatagcatatttctcacagtgctgcctggcacactgtttcagttcctgatctcctttgaattattgcttgagtttgctaattttcttttaaatagatcaaagcagcctctttatgccataagtttagctccagtgacattgaatagtcattgtcaagtactggttgtttgttgaatattatgtttaatagcaataatacgaaataacatattactcatgcagattattaacttaatgttaaaagaagccaggattaaaatgtatcactcaaataaaacatcttgtcttactaacatatcagattatagttttaattttaacagtttatggctatttctcaaatctatctcattcaatagaacttaaaatctaaaaaattagacaaggaaaatttgtgtttgctttactctacttgacatggaagatttgaaaggaagctgcttgatccttagtagatgcttaatctttattttgttgagtggatattaagcatggtgtgctttcacagcacattttagtaaagtgcttccttatagcctggttctactgatacattcttagaaaatgtagaatgaagttttgtttcgttttgtcagtagttttttattgatacatcataattgtacatacatttatatatgataattgtacatgtgatattttgatacatatgtatcaaatacatttgtacatatgataattgtacatgtgttattttgattacatacatacaatgtgtagtaatcaaatcagagtatttagggtatccatcacctcaaacatttatgattttttgtgtgtgttgggaacatttcaaatctaactattttgaaatagatgataaattattgttaactgtagtcacgctactgtgatattgaacactagaagttaacccttctatctaactgtttgtatccattaaccaatttctcttcatctcccctttccacccaacgttccccacatacttcccagcctctggtaattatcattctccctgctacctccatgagatcaacta

SEQ ID NO: 98545 - DNA, 1031 bp, Homo sapiens
agtattattatctttataataaatttggagtgggaggggacaaagtttctttaaaaggtcacgctaagttggtatccatggctaccatctctgcagaatgtggtgcatagcctacatatttaaattataacctgtagttacacctaaaatacaaaaattagaaaaggagccttaactgactgctgtgattctcatgagttggtgaaactttacctgtgtgactaaaaacaccttatgggttaaaaactaaccataaaaagaaaaaagagaaacaatctgctttttggtagagacctcagagattatcttgcttgtgagaagttattttgttaagatgaggaaactggtccagagaactcactagtgactcacccaagatcattctactcacaaatggcaggacctacaacaaatgcctgtgttttttctctatcccatactaccccctggggcacctgtgtctttaaggctattaaagcatttgctgttatgctttaatagagcctttgatctgatatctaccgaatgaacttactggactgttctaggacaaccataagggaagactgtctgtcccacacttggggcaaccccacctctacctcagcagacattactaatcactgtactttgtttctgagactgcaaaggatcttgagatctttctcaatttttgtttcagacaaccacatctaattagtcaagttggtttatcagctggaatacatttaccatttctaaactaagccatgcttaaaaactcaagtaatttttaagtgtatgtgtgtgttgctttcctctgcagcagactagaagtacgtaattttccagttaatgatattccagtcagtaactgtggctcagtacaagtgattttcaactgggaggctacgccctcctagtcgaggatagaaggggtaaaaacaaacgaaaaaacaccatcaaagggtaagagaaagagagtggaaagaaggaatgtggttcaaaaaaattctctaggcgatttttatgcctgcatttgccacagtttc

SEQ ID NO: 98546 - DNA, 1075 bp, Homo sapiens
gctctgaaacactctctacaaccagtaatgcatttgtcccacatttcattctgatagaaaatgaacaccatagcaccaaacaaaaatccgaggcgttagataatgtctggattaaataatttaagactctctaggattttggttgtcattttttatttataacagactttaagtcactttctgttgcctcataggtcacattttagacaggtttgtgtctgttccttgcatctgaattcctgattgtaaagacacctatgaggtctcttagtttttgtcattcattttcttggtttatcacccctcccttctttttgttgtttttccctgactgttaagcagtttcatctttgcttttgttaaatatttgacagcagttagtttgtgttaagctcttgaaacttgtgattgtactttctgtgtagatatacatgtaattattttttatttttcaatcatagattcaagcttccttcttttttaccacaaatcattaaagttatttgtgtttccatatacctgtgtcttgtataaaattggcttattctgtgctgttgaatgaggctcaacatgacttggtgaggaagtctattaactaacaaaagcttatcttttttaacataatgctttttaattaattttgaataaaaatatttctaaagtgtactagatactttattaccttagattattccgaatacagtataactttgatagtttggaatagtcattaagaaacaattacacactgattgctttgtgtctctaaaagtgagaggctggtagcttttccacattctcatggctattttctagttctacttgaatttataactgtttccctttttccttgacagctgccactttgtagctatttttctgtctctgctaatactttaccatatctatctcaattgttttttcttttgacttgctgaaaaatagaaaccagatgggaagtatattagcattatgattgaaataagggtaaatgagcaatgtgtgaaggttttcactgacttcacctaaaagatagtttagctacttgaattttagtaaatagaatttttccttt

SEQ ID NO: 98547 - DNA, 1879 bp, Homo sapiens
tgcacaaaattactgaagatattgtataaaattacttcaggctatgtgcataaggtgtacaagaaacaaacgaattttgtgtttaggcttgagcctcatccttaagatacctcatgtatatgcaaattttccaaaacccaaaaaatttatgaatctgaaatgcttctcctccaaatgtttcaggtaagggatattcaacttgtatttttattttcctcattcatatacagtgtttttgaatacagtattttgatctgcctttaacaaatgttttctcattatttcagttgccaaagctgtttgatggatgctacttctatttgtggggaaccttcaaacaccatccaaaggacaaccttattaagctcgtcactgcaggtgggggccagatcctcagtagaaagcccaagccagacagtgacgtgactcagaccatcaatacagtcgcataccatgcgagacccgattctgatcagcgcttctgcacacagtatatcatctatgaagatttgtgtaattatcacccagagagggttcggcagggcaaagtctggaaggctccttcgagctggtttatagactgtgtgatgtcctttgagttgcttcctcttgacagctgaatattataccagatgaacatttcaaattgaatttgcacggtttgtgagagcccagtcattgtactgtttttaatgttcacatttttacaaataggtagagtcattcatatttgtctttgaatcaaaaaaaaaaaaaaagtctaatgccagattaggaattcatgttatgtttaccatttagaagctgggattgcttttaaaggtttttctttttaaaattggcatgtttttgatttatcatgtctttctattcagattattgggtatcaaagattaatgaggacaccagaatcttggttaaatagacaagtggtatcattactgtttgagtcttttaatattctccatacctgccaccagtgaaaaaacttgccttttttttttttttttttttagtaaacagaatattatcaaacaatttattttggctttattgaaaaaagagtatttggtctaaatgtgccaccataggtgttaaattctcctatctgcaattgtctttatcctatattgtgttcatttcttttcttaataatttactttgttgtgtgtttctacactttcatccctgttttttatcttgtatatcatcaggaaattgtgatttaatcattaacattggtttttttgtgtgtgtggtaaaaatcaacactaggctcatggtacatatttttattctgtacatttgcttgtaactatcaatttgtaactctgtttatctactacatgtgtatatatacttagagcattttctctaacacattttaatgttagtattttttaaaaggtctgaccagtctagcaaattgtcagtccaacgtcattactttaaattaagaagcagtcttcttctggtaaaccttgttggtatttgtaaaataattttgaaggtcttaatttcttcctttgtaaaaggaaaaggttttttttaaagtttttaggttggcatggaggcagaagttggtgattacttgatttacaacagattttttccagatcatacaaaaggccatacagtaagtatagaagtaggtatggggagggcttactaatatcaaataggcaaggccttagtgagtgggcaggataccacctgagagtggccagatgtggggaggttactctgctctgggtgctctcattcatgaatcgacaaggatacattagattattttgaaacatttttttaagaagcagaattctttaataattccttcctagacattgaatatacttataaaattaaagacttggggaag

SEQ ID NO: 98548 - DNA, 2019 bp, Homo sapiens
acagagtagtgaagaactttagttgacaaacaagtgtgtccccagctgaggtcaaacaaggtgatactttacctcctcttttcagctctcacgctgtaaacaagtggccctttcacagtctgttgatgccatgttttttgcatttttgtgtttttgttgctgattttattatttaaaatggcctcataatacagtgctgaagtgctgttttgtgagtctaagctcaagaagatggtgatgtgcctttcagggaaaatattaaatactgtgtaggataagctttgttaaggccttaattgtagtactgctggccctaagtttaatcttaatgagtcaacagtatacaataaataatgtgtataaacagaaacatacataaaacaaagttaagtattgatcagttgatggaaatgctggagccacaggcccacagaaatgtaaccctgtatttcctttaacagcagtgtttcattattcactaatcggtgttcatagcatctttatagaacataactactgtagataatgagcattgactatactactcttgctggatttggggaaggatacaagtacttttggtagctgttatcacagtaattttgatcaggatcttttcttagaacaaacagttgtgtccttggtcatttaaagttagaaaagtaaaaagaaaacagaatagaataaattggtattttaagaattttctttttctcctttgaccagaaaatattggtgtgtgatttttagcattggattggttaggccttatgatttatgagtattttattctagattgtggaaaaattaaagttttcagagcactgcacaatgtacacgttcaatctatagtaaagtattttgctcattggatgaatattaggtaacatagcattcatagtttttataaaatgatactgctctcatggttctctattaatttataagaagagagttctgtctgatagtatttacaggtgtaaaataaacttatatacaatcaaataaattctactcaggttctactcaatttaaacccagagaagtaacaatggaacaacttattccatattttcttaatgatgttctactttttctttccatatttaatattgtgatttcgtatttgtttaacaagagctataaatggctaaaactctggctgtgtattatttcctgctttattagtatttttgaataccacttcactaatacatgtaaatcattaatacttccagcatatttttttaatatttaaaatatattggtcctccattattttcagaaacaactttgcattcaaacattttattcaaaaaacctattatctttgcttttaacattgaaatacatgcaaaatataaaagaatattttattatctttctggcaagcaaatctgctcccacatttgttattctttgaaaggttagccattttaagtaggaaaagagggaaaagctgaatctgaaaaacgaatcttctcatgtttgtctatgtataagctattaaccttttttctttcactgactttgtaacagaagtttacgtaatgtgaagttcttaggatttctggacaagagtagggagttttcttgttattagatataccatgattgagattatctcagtggcatccttaatatctttaaaacatggatgtaattttaaatgtgcttgaaaaattaaatttgatagtggattgcttgttgacagaggaaaataaagcaataaaatttcatttaaaattaagcactctgagatagagcatacaatattaatgaaagttcaggattagattattgaaataaagtgacaggaaacagcaggaattttcttcttagggaagagattatgacttctcttgtacatgataggtgtttaacacagtttgagcattcctaatctgaaaatccaaaatgctgtaaaatactaaactatttgagtgccagcacaacacacacgacctaacatgatggctcacagtctaaacgcagacacaactttatgcacaaaattat

SEQ ID NO: 98549 - DNA, 1392 bp, Homo sapiens
tctaataattaggagaatttttggacgttagactgtgttcggtttttaaccatacctatatagagacagacaattttgatattattcataatacaagagatagactattttgatattttgatattattatgcataatacaaggtcttagaattgatacccaagttttgtctaagaaaaatttatgatataataatatatttttgcaatagaatttaacctgcttctcaatgcattaagtaaaatagcaaattacacatcttgtaatgtgaagaaatatatttctacatataaatatgctgatagccagaatttttactaaaatgtcaaaaataaataattgctaaatgatatttatatggagccagaatttaatgactgtcgacagtatttaatgagatatctcaaatcttaaatggaaacatttagcctttattttatattttcagcctttatttcattgtcctttcacttttcgctatggaagtttcaaatttcaaactcatttctctgttcttttacttaagttttccaaaaattgcagtgatagtatgctactgttttttcatttttgtcattgttgtaggctgcctattgtgatgtccctttttactaaagtttagtgctgttatagtttactcgactaaaaagtctaaaatataatcatttgcaaaacacttgttttgcttttacaatctgggtgttgatttttaatagaatcaaaggaaattctttaatttttattttacttacatactgttatcttgagtgacacacatccctaatttaaacatctttagtttagatctaatgacatactgtagtagaacatttgttttcatatagaatagtgatgtttgattctgtattttaattttttttttttaggatattttgtattgactaaaagtggttaattctgattcccatagctatttcagttacaaatagccattaattccagaataataacaacccttttttcccctccctcactctgtcacacaggctggactgcagtggtgcaatcatagctctttgcagccatgaactcctgggttcaagtgatcctcctgcttcagcctcctgagtagctggaactacaggcactcaccaccatgcctggctaattttttttttctttttagttgaggcagagatctcactttgttgcccaggctgttcttgaactccttgtttcaagcggtcttcctgcttcaccctcccagagtgctagcattacaagtgcgagccaccaggtctggcctaaaaattctttaaaatgtggatctgtttactactctgggatttgaagagtgagaaaattctaagtatggctttccatgcagagttaataatcgtctcctcctttggacatttaacagatctccatt

SEQ ID NO: 98550 - DNA, 1063 bp, Homo sapiens
ttctcacaggccattagcaccaccctcatacaaggttgattttggcattaaagaggtgataagaatgaaagaatagaaggtatataaataagtcatcttacgaatctcatagagtatgaataagatgaaactgtatcctaaagatgcaaactaggccaagataaaatgttttctactgacctattcttttagtacactgctttcaaaatttttttgtatcttagcctttttttctaaaataaatttaattctacatcttcttttcttatctcattatgaaggggagaacagatggctgtcatcttttctttaataatctttccctcttccccactctcatctaagtttaaataaaattgcagctgtagaagttgtaaaattccccagtacctaagggaattactgaaggaatgtgccagacattttacactggatttatgtctgtgagatggggaagggctaaattgagtgttttttcatttttgttttagctgaggagagatggaccctagaagacaatcattacatcatcatttaataaataacctcataatcaggctaacacattaattcttttcaaacaaattctaacaagttggcttctttaaatggatactgagagtactatggaattttaaaattaaatgcaacttttattctatacagactttgctaattatttaaaaaaaaacattcgtataaattaagattgattaggcaactttatgctgacagaaggcttccaccaaagattgtctaagaataaaaaaaaataacatcctttgatctaatagtcccagttctgagaatttaccctacgcaagaaatacagatgaaagaaaaagtatttgcagtgttacttctaacagcaagaagtagagaatataacctacatatgaaagattaggaaaattctgaaatgcctgaagatactctctggaaaaaatgcatatttttaatatgataaatattaagactaaaagattatgaaaaatagaattgtttaaattttaaacacatcaaaattatatcttcactttcaacaatatataaatgtatgcat

SEQ ID NO: 98551 - DNA, 1234 bp, Homo sapiens
agcggtgttagatgttaacattggacactgaaggaaaagtacgtgggacatctctgtacattcctttgaaacttcctgtgactataattatttttaaataagatgttaagaaagaacagtgggtatatttattgaaactctttatgaagcaactgatggattaaaattagtttataaaaatggttttatggctttgtgctttgaaggttttatggtagaatgcctgatttatcaagatcttaattatgttattaatttaatctgtagttagaagttgatttggtttgtaaaacagtttcctttcatcaattggtattcatgtcattttcaaatacagctaccacttctttttttgtgatgcttgtctcaaccaatgcagtctgatccagctaagaggctgtgactagcaatgccactccatctgttctcatcaatccctattaattagtccctcctagttatgatgagtttgagaagtataagtaattggactaatttgtctcacttagttttgaactttctttttccttttaaatctgtgaaagtcttattgagcctcagtgtttaaaaaattcatttaaaatggtttcatgattagggatgcttttgtatcaaacctgtgccagaaacctttccagtggttataaggagaaatagattttcatcatagtaaggtcgcagtaataaagaagccatacgaaattttgaatgttaagacatttaccacttaacttttgagtctagttcttgtgaatatgctgaagtggcatttggttacatatacaggctacatgatttatttccataaaatatgccttctttgggaaatgtgggttttgtcactttaatatcttggccgtgtcgtttttatagaaccactgatggactcggactaacttaatagtgtgctatttggtgattctgacagtagtgaataacatcctctaatatcaatggttcttttaggataaaggatggatggaatcccttactgaagttcatatcgtcatattttctaatatagagtacaaagagaaacagattcaaagtttgagatacttcctttaaatagtcactgggtttacaaaaagaaggcaagaaccttcaaatagttctttcctaatatatatttctcatagtttctatactgttctcagtgtcaagcatctcagtttgattctttgtttgttttttaagagatgaggtgtcactcaagcaatcctccagcttcagc

SEQ ID NO: 98552 - DNA, 1976 bp, Homo sapiens
tttggagaactacctttgataatttacatatgttttaaccattgggagatggctgtatactttgcatcttgtaatacatctaaattttttttcagtaataaactacttatagacaacaacgtagttaggaaatgtaaagtttaaaggtttgcatatattttaggacaagacagtatttcagaagagcaaatttgtgacttttgctagtgacaaataaattgttgtgcagtgtaatgtcataatcccttagctgtaatttgaaaataaaaatttgtgtttgccaatatggctttaagatatatggtttatgatctgatttttcatattgatggccaggttagagaactagatactaaatagaagtagtcttacacttaagtgtaaaaattgttgcctttgaagattcagatataagcttacaaaatatagatgagttataagaagcaggccaaagaaatactttggcttgtatctttctttctcttactgctttttttgtattttagtaactcatgttgttgttcctggtgatgcagttcaaagtaccttgaagtgtatgcttgggattctcaatggatgctggattctaaaatttgaatgtaagtgttggatttgagagaattaagaaatgaattagactagttttgtttttcatggttattaatgcctgtgattaaggaacttgatgttaattttcttacctctggttagtcactgcattttggaaaagcttctggctgggcgtggtggctcaagcctgtaatcccagcactttgggaggcccaggtgggcggatcacaaggccaggagatcgagatcatcctggctaacacggtgaagccctgtctctactaaaaatacaaaaaaattagccgggcgtggtggcgggcgcctgtagtcccagctacttgggaggctaaggcaggagaatggcgtgaacctgggaggtggagcttgcagtgagccaagatggtgccactgcactccagcctgggcaacagaatgagactctgtctcaaaaaaaagaaaaaaagaaaaagcttctcatatttatggtgtcatttagatgtccttagtaaatgtatatacatatgttctggttttaaagtcttttttcctacaataccaactatttcaatgaaaagtaaatggagtacatagtatacttttaagcctaagcgattcatgttactgttaaatgatatattgaatttaataacacatgttttaaatatactgcatgacatgtctgtgaaatgaaagcaatttattgcttttcctttatgattacctgcataacacccttttggtcttagttaatttaatccagtatttttaggaagctgttgggaaattgactgccttttactactttagttggagtcactataccagctatctcaacctccactgaaaatgtatacctgttcccctcttcttgctgatagtcaacccaccatcaccttcagagctgcctgtcaccttccctgctgtcactcatttacatttctacttggattctcttgggacttaaaatgaaaagaaagctcatacacgattattttctactccttaatagttaacatatctacttttgatactatggctaacatagaacagtggattgacctttttttgtttattaattgtttacaaaagattagtagttacaaaagattagtggttacagaggaggaatgtggggagcaatacagttgcgtatcttgatgttagtggtggccatgtaacacaagactacctgagataaaattatgcaaacaagtgcatttataaccagtgaaatcaggccaggcacggtagctcatgcctgtaatcttagcactttgggcgaccgaggcaggcagaccagccaggccaacatggcaaacccccttctgtactaaaaatagaaaaatgagccaggcgtggtggcacatgcctgtaatcccagccacttgggaggctgaggcaggaga

SEQ ID NO: 98553 - DNA, 1251 bp, Homo sapiens
acaagactgtctcaaaaaaaaaaaaaaaaaaaaaaaaaatatatatatatatatatatatatatatatatatacacacacacacacacacacacacacacacacacacacagaatttcacagagaaaggtgtcctaagtctttcagggtaaacattttagcagagtgtctaatagaatgctgttggctgccagtaacagaaaaccttttctcaaatgcttgaagacaatttattactttatatagaattaatcccaatgcaggatagctctgcatttgcttaatttagcacttagtggttgcatcaaggaaccaaattctttgtatctctttaccttgccatcctcagtttgggggatttgtcctcactaagaagtttcctttaatggttgtcgaatgattgccacaattctagatatgacagtggccaactgaaaaagagacactaaagtctttccctgaagcctttccgtggacttcccctgtgtcttattgtcagaaattgattttgacagcccctcctggggctggaggttagggtcagtctttgaaaggggggctacctgaacaaaactgggcttctgttagtgtggaggaagtgagcaatagattttgagtgtaacagccaacattccccactgcagtcaggtgtacaaagtgagaatggcagcccaaatctaaggaacagctgctcagagacaaggaggcataaaggaccttaggaatttgagaaactatagcatttactgtgagaggagtatgacgtgtgtttaagagggattcagggtaaagggttaggttgggaccagattgtgaaaagccttaaattccctgatacgagtttagacttaatagggtaccttcagtgtgtttataactgaaataggactgtctgcaggctagctgggagtaggaagagactgaaggctgattgggaggctgcagtagtggagaccaggtttgaaatgctgaggactggaattatagatggtagttatgtggggatggagagaagaagaagagttttagagagagttggtagactcaccagatcccagtactgctcagatgggggaaagtaacagaaagggaggagctgaggtcaaggatcattcacaagagtagtagtagatgccattgtttaagataaggaggtagcctaaggtagctacagtttgatactctcatagatgctttcatgagctagttgctttcatatcttgaaaaccctatgtcttctgctttagacttc

SEQ ID NO: 98554 - DNA, 2167 bp, Homo sapiens
cagatttctattttttgattgtcatatgtatagcatatgtgggtgaggagattgtgtagttggtatatgagcataataatttagagaatgaattaggaagtatcaagaatagtggatgagtttcttttaaaataccctgagattgtctgctgtaaatgtatactgtgacatgtgtcactttgttttaaattataaagctgaaatgcaatccgctgtattatatcttggctggagaaagactgttgccagaggaaggttgttggacttggacataaagaagagtcagaatacaaacttgtcagtgtttacccaggactgtccaaagaagaaagcaattggacctgatagtcacgaattgcagtcattagagaaacatttgctgtggttcatttcttattctaatacattagctttcttttcccactctgccatcaaaacagttttcaccaaggtcattagtgaccttgtctgtgaactcagtagatgcttatatccctcatctacatgatctctctctgcagcatcaaacggaattggcatttttctacctttcacttcccctaatgtttctctctgtttccttccagatctttttctatacatttgatacaatttacagaattagtattataccatgtttataacttcatgtcccatttactgcattggattttcacatggacttctgtggccattatatgaatatagcataatctttaaaaaaaacatagaagactataaaagaattgctcattttgaaaacttcttgccatggtatagtgtatttaaatcatattctgaaaccatatgtaaggaaacagaatagtagacagaagtcctttagttttaacaagttacttataattgaaagactttaggctgggcaatatttaatttcagtgaaattgaacaaggagaatatgaccttagttaagccattggaacttgttcttctctcttttttttcttatcttgaacaggatcaaactgggatctctaaaatctcttccagcgtaacattctgtgacttgtgaattagtacatgctgagaagtttgtatctctctgagccataatactttgttctgcgatggttgtgattattataggttattgtatgcacacatgtttaaattaatttttaaagtaccctgttaactatattattaaactgtttgttatgtggcataattttccttctagtagaacaaaatccctgtcctgtgaatttatctaattttttattggtttataaagactatatggcctataatagctatagtaaatgatttttattggcatttgaaagtctgtcacttatagtgattggtgattatgaagccatattttaatatgaataagaatgcagaatacagttgtgaaaaattcataatactatattcagtaaaaacaatccctataatctgatgtcaaactgaaattttacatcatttctcctttgagttcagcagcttttgattctagattcttctgcctaatatgagttctgagtaatttattttagttaaaattgtatattattaaggatgttgaaaaattgagtcgagtcacacatttgacttacttaaacacatctgcacttattttaccagtaatatatttggtctgcggcctgtcgattatacagatgatgaaagtatgaaatcgctattgctgctaccagagaagaatgaatcatcctcagctagccactgctcagtagtaagtatggatttagctttgggacatttatatattttattaaaattggttatgaaaggaacataatagaaaaatttccatttgaccaattgcttacattcaccaaacaattattgagcacttcctgagtattagctactgtggattcaaagacataatcacagtacgaccatctagaaatacttattgagcccactctgtattttaggcagcattcataaaacaatgaatatgactggtagaactcttattctcagggaggagcttaccatctggtgagaggtaggaaagagacaaactgtaaatattgaactaatataaataaaataatttcagacacttagacatgagtgtttcgaagatgttgtagagtgtcgttgggtggaggtagtgggcttctgcaaggccattgctttagctagggtcacagagtggagccttaaagc

SEQ ID NO: 98555 - DNA, 1056 bp, Homo sapiens
aatctccactgttttccatagtggttgtactagtttacatttccaccaacagtgtagaagtgttccctgtttaccacatctatgccaacatctgttatttttttattttttaattatgcccattcttgcaggagtaaggtggtatcaatatggttttgatttgcattttcctggtcattagtgctacacccttttaaacaaccagatctggtgaggactcaatcactatcacaagaacagcaaggaggaaatccgcccccatgatccagtcacttcccaccaggccccacctccagcattgggaattataatttgacatgagatttgggcggggacacaaatagaaaccttatcagtataggtaaagtatattatctacatataatcattttcaattcactgaattcgcgactgtccgttgataaggcattaaaagaactgactgtcgaaagtggtacatgtaaaagatattaatatactgtcgtgtactagatgtaaattcagcagttaagatctcgacattttcatatattccaaaatagttttaaatattttggtgttgcattgacccatgtcatttagctagtagacacatgtgcctttccattttcacagcaacatacgctttgtgtctgtaatgttcattgctttatatctgattttttcattggtttttcatactgtgtttggtttctacacatgagcacacagtgcctagaaggtttgatagaaagctttcttccatcagttgcatccatttcagtaatcatgttgcttattccctacacggccccttaacagttaaccaccatattccagtttctagtcctgggatcaaggccatttaaatcttatcttctatttcacctcattacttgtttgggtttatactttatcagtttgatacctgtttgttgaatgaacgtttatcctcagtaggattataggcaaggacagtgtttttctaagtcttatgtgtccctccaaaacacctagtttggtaaaactttaggttaaatcatgctagaaaagagagaatttactatatttaagtgt

SEQ ID NO: 98556 - DNA, 2032 bp, Homo sapiens
ggtatgaatttaaagtcaatgatactctttatttgccatcttcactatttaattttaaattaaatgagcttttatagttcaccagtgaagtctcccaatcctattttttcccatagaggctgtgttctttattaattttcctactgcaatgtttttgggccctaaatctttataattatggaggattcgaatgtacagtggaaagtcatatatctacttcatactttctcttttgttttgatttaactctaatattctggcaacttactgtttttatatgtcttgcatttaaataacagtattaagtcatttaacccttaatttttttttgcataaaaaaagtaccttttgtgagctaaaacaataagaaagtcagttctgttttaaccctagatcatgaaaaaaagatttataatctttgttgtctgggagtatttataactgttcaaaacatcattggtaatctgtcttccccactgccctctgtacatcccagtgtgaagctagaaccacagctcttacggtcacatgagaaccattttgagtgtgtggcgaataacatgtgcttctttttttttatttttaatggatatgtaggattttagaatgtggtacttgatctgccattaacagttttccttggaaggatgttgaattctgaagtagaaaatattacatggaccattggacctattaattgtcccactgccctaggttaattttaaaaaattaattgccagagataatttatgttttatagctttaaaaacccatgttgctagtttgaattactctgctttatcctgctccatagcaagcaaagtgacttgaaaaattaaatctatatgtttgcagttttgtagttattcatgaagggtttcattcatgaactctcttggtatcctgtcatgcgtgatagatttagtattagtaaaaatgcctttttgcatatgtttttgcagtttggatggtctgtacatgcaagtacaagtttaaatttgcccatctctcctttctctcttttattagtggtgtaatgaattcagatcaccattgtaggcaggtgtctgccatattattactgaggggaaaaggatattaaaaggttatactgcatcctgaatgtggcctttgggacaaaactgaaacattgaacaccacagtttagccctttcataagtacttccttttcctcatcttcaggatcagaaggattcctagttaggaaaaggattttcagagttatgtggttcatactctttagatagtgccacatgggaaaatgaaaatctactcttagaatgttgttaagaagacataattctatactttcccttagtaaacttccagattatcatgaaaaacatgcatcaattgtatcataaaattggggaaaatgaagatatgaggttaatgctccagacataacttattttgtgcccttatcttcattctgtatctgtcttccaaaaatgcaaatccaatacagtaatataatggcagttattgagctgttcatatatgctaggtactgttttaaatgcttttgatgtattcatttgattctggcaacaatcctgtaaaatagatagtgttattatttccatcttataaatgaggaaacaggcacgggatttaagtaattcgtgtaaagtcataagacttttgagtggcagggctgaaatgtaagttcaggcagtcttattcggtaaccccaactcttaactaccatgctacgttgatgccatccctcctgcttacaatgatttaggaagctgttcagggtttcttattgcctttgggaggaagtccaactctttaacacctcctctttgttcttatataatctgaccatagcttacagttcgagagtacctcatattcctgtggtacattccctctctttctctcactctccctttacccccttttttccttttttttggtggttctaaaaagttctaagtgctatctcacttaaagtccttcacacacttttctgtctgctaggatattcttattctgtttgtgt

SEQ ID NO: 98557 - DNA, 2187 bp, Homo sapiens
agcagcggcacattttgacatcacgggttgaggaaccaattccccatggatagcaatggggataactgtgctgacatatttgggggagatttactttcttaattcagaaacagttgtcaattttggaagctttcatttaatggaaaaatttacttagtgtttatattctgtagattgatttacactttaataagcagttattgtagaaataattattttgtatgcttcctaatagtttggaattattttaaatatttcattcccattttattttttctgtgtatttactattacaacaggtaaagcatataagaatttaaatattgggccggggcagttgaattatttcttaaattttttacatcattcacatgaggttctgggtgaactttttgcagtgtcaggacacagagatgcattagtgaatgccagcagctggattttaaaattggcattgtcaagagtgtcacaagcaaatgctgtatgtagattttgtatctttaatctgtaacttggttcatgtctccctatgtagtattttattcttttcagttaattaagtagttgaaatgaaaatgcaggtattgcgtctctgcccttgttgcttctataggtttgaaaagggcacaaaaaaattaagttttcaatggtaacagatgcaaataagaattataaaatgcagggcttctaggtcgtaattttttattggtaattatttaacataattgaaaaccaaattaataatgcaagaatgtaccataccttggtgctgttagtttcagtaaatgtgtctaatctcttttatctctcatcacaggttataagataattggggcaaattcaggggatgtgtatattcttccggtttttatttgtgtgtgtgtgtgtgtgtacacacgtgcgtgtttgtgtgtgtctccatatacatggacctatttctttgtaaggacctaaccgatatgaccctcccatatgtgttgcaagctatttggtaacgcaaattattgcttgggtcaggtgaaactgactagttttcattctagggttcttaaatcagccatgactactttaatggatggagcactggtcagggcgttagggaatctagcttttatttgtgactccattactgactgtatagcttcaggcaggttaatttctgtgccttggtgtcctcacctataaaacatgggtgatgcctgctgcatttctatttcttcagagcatagtgaggattaatgagccaaaacacagagcctgtcttgtggtttgtacaccatgattcgtcactgcactgtgagggcttattaatatacaaggagtggcatgagacagtgagtgagtctgccttcacaggtgccttcagtgttggtttaagtaggactacctagtgaagtggcaaatttaggtatatctgttcctcagcactgtccagtagacctttctgtggtggtggaaatgtttatatctatgctggacattcagtagccactagtcacctttactattgaacacttgaaaattagctattgctaccaaggaataaattttaaaatgtattttattttaaccatatgtgccagtgactactgtgttggacagctggttgatacagctgggcagttgggaagtagggtttatttcacccaagaggttgggattgatattggataaaggatagtagggcagatgaagggacagatttaatcctagggtacaagagtatggtggctgtttctaaaaatttcctttccagactattggtcttcatacttttttcctgtgttttttgcctcttaaaaacatgtcgtagtcattgttgttcatctgattggctttacaaatttcctgactgttctcctccttttcaggttacttttctttattcactctccatcctgcagccagagcacctgcagaagaacacgagtctggccaagtcatttatttgcttaaaatccttccgtggcttcctcttaatgtttttaaaataaaggttaaatcccaaaatatggtttataagaccctggatggtctggtgctactttcctctctgttctcatcggtcttcacagcttctcctttccccctttccttcaagcattttttgcaccagcttttctgaatttttgtttccttaaaatatgtagggtcttttacctcctagcctttgtacatgtctttgca

SEQ ID NO: 98558 - DNA, 1684 bp, Homo sapiens
tagatcagtcgctttgctggttggactctactggctggctaaccttttcaaagaaaggttaattttatttttttcttcaaagccactaaggcaagttgtagtaaagattggttagtgatttagagggtttagtgcctagtttggattcctttctcctaaaaatagacctacagatgttgagtgtgatatcacttattatgaattgaaattgatgtacttaaaaagtatagaatgccagagatttattagaatacagcattgtttatagttcattagacataaggaaagatttggatgtaaggcatctttgaacactccattgttgccgtttctgtcattcagcaagctctttttgtattcctactcgtgttatttctcttatcaataacagcagccatacagcaatttgtaggttcagcaaatagcttatcttaaaagcattccttcacggatacttactttgttgcatgatatgtgtatgtactggtacagattttatgtatcatcttgttattaaatatgtagacttttttcttaatgtgttacatttattgtagaacatttaaggagctaccgttggtttaaaactacattttcttctaaaaaacagaaaagtgcttgacccaaggctcaaatgagaatagcctttctttttttatgagttacacagatcttgattgaaagattattaatagtaactttcactctgtcagcaacttatagtgtttttgagtatttaggtaacaataaatttactgcctgacgtttacatttatttttctaaagtgtgatattataatatcatccattgctctttcttatcacttctttcacttctttttcaaaaaatttaattagcatgaagcttgcaatcatgggcacctgaaggtagtggaattattgctccagcataaggcattggtgaacaccaccgggtatcaaaatgactcaccacttcacgatgcagccaagaatgggcatgtggatatagtcaagctgttactttcctatggagcctccagaaatgctgtgtaagtagttcaacgtaaaaattatttttaaaatggacctatattcttgaatcaaggtgtgtgataaagcagactttaaaatagtcaagttgatggctttcttcactttcacaactaaaattagatgtgatcatcacattctgcactcataatcagccttcatgccctttttatgatacagttggtccttcatattcttgggttctacacttgaggattcagccaactgcagatcaaaaataattgggaaatatcaatgacagatcggataaaaaaaatgtgttacatatataccatggaatactatgcaactacaaaaaagaatgagatcatgtttttttgtgggcacatgatggagctggaggccattatccttagtaaactaacgcatgaacagaaaaccaaataccgcatgttctcacttataagtgagagctaaatgatgagaattcatgaacacaaagaagggaacaacagacaccagagtctacttgagtgtggaggatgggaggagggagaggagcagaaaaagtaactattaggtactaggctcaatacctgggtggtgaaataatctgtacaacacacccccgttacacaagtttacctatataacaaaccttcacaacttaaataaaaacctagaataaaag

SEQ ID NO: 98559 - DNA, 1107 bp, Homo sapiens
tgaccttaaaagtctactcatttatagtaggatttagttggatcatgacacacaagacacagaaagttcaaaactggaaggggtcttcaattttaatgctatttaataattgacggtgtcttaatatgaaagtcgaattaatattgtctgccttcagagtattttccttgccttgtgcctcattttaattcacttattccccggatcttgctcatctgatttaaaaagaggttgtgatttctaaagtaaagttattgtatttcttactattcctcatctgccttctccattgcatcagtgtgctactgttgctactgttataacattgttgcatagctctccagagtactggaatagagaaatagagaaattgaaaaccacttgttagaaaagacttgtaaggctacattacagaagctctatttcgtatagttgaattagttgataatgggtggtgattttagtcttgaactgggcggggagcagggggataaaaaatttaatgctaattctgtgggctgatttgaataggtttgtactgatctctttttttgccattttaaacagagcaactgttgcttcctagaaaatgttgaacaaataaggtgaatataaactaaatgtattaggatggagtaactgccaataaaatggcagtttttggctgttttttaactttggtttcactgagtagtcttctgggctaaacagttttggttgttttaaacaatactcagaagccatttacaaatgctcaaaaattgtttttttcacaagtgaaattatggcttttaaaacttcattgtgagcacatgatctttggccagtgtcctttatttggtacctgaaatgaattttgaatatggctttctaatagattttgtagtctatattcaagcatgactgtacttcttgatatctcagaataatttatacgcagacaatttcttttttgttttgtttttttgagacggagtcttgctctgtggcccaggctggagtgcagtgacatgatcttggctcactgcaacctctgcctcctgggctcaagtgattctcctgcctcagcctcccaagtagctgggattacaggctggcaccaccatg

SEQ ID NO: 98560 - DNA, 1097 bp, Homo sapiens
atatgtgctgggaaaccagaagattcgtgtgacttgttttattgcaatatttgctttatcgcagtgacctggaactgaactgacagtatctccgagatatgcctgtattttattcagtaaattctaagaagctacagaaatatttaacatattttagagcttcattccagttggttcatttttgtttgtttgttttaatggcatctaattgccaagaagggaagtctttggttcctggtcggttcatttacatggaaaggcttaaccatgctaggcaagtcatttgtcttatacttaattgtaacgttctgtattgtttttatgaatatgtttattaatggtattttagaagagctaacatttataataaggaaaagttttgtttttatgtgtgtgtttttggaaagttaatttatattgttggaatatgtgtggatctgcagtatgtacaaatgtgtgaaggatctttcctttgattgaaagattaggaataaaagattcagtgggacacacacacactcttattttcagccttcagtgtattacttgaaaataccaaattcatttaaaatttttaataagccttggcaaatactttccttagataaattatgtttgctgtggtttaagaaaagttcaattattctttcaagttgtgaggagcccaaaagtgagtacttgaaagtaatttaaagaagccagaatcaaaacttaatttatttcctggctacttcatatcagttcaagctattccagttactgtagactctatctaattatcataattttatttatgcgcatgacattacatttacatgaagtagaaagatgaaaatatgacaaaactttcaagtactagagaggagaaagcagattggttataaaaagcaagccgtttgctaatcagctatacagttcaggggtggggagaatgttaacagaagacactttgataatatgaagaggtgacatgaaagaaaaatagcaactgtctaacaaccttaaaagagagtctacttgtattctttaaattgtcactccgtttctgtttgactattcccttgagactcttccatttcacaattgtgtttatatta

SEQ ID NO: 98561 - DNA, 1638 bp, Homo sapiens
gcaacataaaacatttgagaagaacatggagtagacattgagtgtggtccaaagattcctgtatttctgtgtggagaaagggaatagcataaactgagcttatcccagctgctgctggtttgttttccttgcttttcttccagattaatgaggaatacagtcagctctgtgtatctgtgcattctatgtttatgggttcaaccaactgcgaatcaaaaatatttgggagaaaagccaataacaatacgcaataaaaaaatgcaaattaaaaaatatcgtataacaactatctacatagcatttatattgtattaggtgttataagtaatttagagatgatttaaagtatactggaggatctctgtaggttatttgcaaatacatcattttatatgaggaatctggattttggtatctgctgggattctggaaccaatcccccacagatactgagggatgactgtactctatttctgataccagtgaggcagggaccttacaacatgaccacatatcctttggacatgttgaatttttgcacttggctctggttgtgttttagtttgatttttgcaaagcctgacttaacaaaattagacattttttgtcatctctgttatatatatgtatattatatgtacatataagctattgtaaacaaagttatagacataagtagctagtgtaatgattatttttgttcattttgctggctaatacatagtaatttatatattttgctttctgggaaatttttggactatcaggcaagcatttacttatattggtggcgactttttcttctaaccataagaataatttatctttattaatgaggatccctagggtctaggccagagttttgtaagttctttcttaaaggtgcagttagagtaaatgttttcagctttgcaggccatgaaatctctatcatagcggttcagctctgccttcttagtgcaaaagtagccacaggcaatatgcaaactaataaaacttacgtacaaaattgggtgactggcccataggctatagtttgcctactcttggtctaggcatgtgaagaaactgtaatagaatattaagtcaggataaaatgatggcatgctcctgtcttggtgaattttctctattaatacgttcaagattacttcatatgagttttgtcagtttgcttagagttttgccggaattattaaatccatttttatttccttgaacttaattattaaatgcaattattgtcaccagttgtcagattatgttatggtacattttttaaaagttaatttttattgtttttaaaatcaccaattaatagtgtccttttaaatttttttatgagttgaatgtatgcctctcgccttagctttattttaataaatatatccttaaaatcagatttgcttatataaatatatttatatatttttttcttttttgggggtggggggaggggcgggggacagagtcttgccctgtcacccaggctggagtgcagtggcacaatctcagctcactgcaacctccgcctcctgggttcaagcaatccttctgcttcagcttcccgagtagctgggattacaggcacctgccatcatgccaggctactttttatatttttagtagagacggagt

SEQ ID NO: 98562 - DNA, 1595 bp, Homo sapiens
attctgttagatttgtattttatgggtttttttgggtactatatttggaatataagtttcatgttttgttctctgctatatcttcagtctctaggatatggcacaaagtcggattcagtaagtattgaatgagtgaatatctgctatcaaagagttcacactctaggagctgagaaagaagtacataattaaaagatgatacactttaggggaactgtaaacaaaattcttcgggagctccatgtgggagcaataaatttcatgtaacagatttctttttctttttttctgtcagatttgaaagaagataaacctaggaaaagtttgtttaatgatgcaggaaacaagaagaattcaattaaaatgtggtttagccctcgaagtaagaaagtcagatatgttgtgagtaaagcttcagtgcaaacccagcctgcaataaaaaaagatgcaagtgctcagcaagactcatatgaatttgtttccccaagtcctcctgcagatgtttctgagagggctaaaaaggcttctgcaagatctggaaaaaagcaaaaaaagaaaactttagctgaaatcaaccaaaaatggaatttagaggcagaaaaagaagatggtgaatttgactccaaagaggaatctaagcaaaagctggtatccttctgtagccaaccatctgttatctccagtcctcagataaatggtgaaatagacttactagcaagtggctccttgacagaatctgaatgttttggaagtttaactgaagtctctttaccattggctgagcaaatagagtctccagacactaagagcaggaatgaagtagtgactcctgagaaggtctgcaaaaattatcttacatctaagaaatctttgccattagaaaataatggaaaacgtggccatcacaatagactttccagtcccatttctaagagatgtagaaccagcattctgagcaccagtggagattttgttaagcaaacggtgccctcagaaaatataccattgcctgaatgttcttcaccaccttcatgcaaacgtaaagttggtggtacatcagggaggaaaaacagtaacatgtccgatgaattcattagtctttcaccaggtacaccaccttctacattaagtagttcaagttacaggcgagtgatgtctagtccctcagcaatgaagctgttgcccaatatggctgtgaaaagaaatcatagaggagagactttgctccatattgcttctattaaggtaggatgcttactctgaaataccatctcagaatgaggccaactataaagcaatttctttgcagtttttgaaaaatggcataggattactaggataattaacctttcacagacatgatacttcctctgaaccagagaagccagattcatagggagagcatctctacttcagttggagcagtggcccctgagtctgggcgcatgatcttgtaggagaaaaccaatatttgaatatttcggcttttattttgccaagtgcttttgcttttgtctattttaccttcagtttttatcattttgtttacctgtcttcatgctttatgaatgtagacaattgctaagttattacag

SEQ ID NO: 98563 - DNA, 1067 bp, Homo sapiens
gaagcaatatggagcaaagtctctcctctatgatttcttttcacagccatattgggcaacagcttcattgctgagggactagacatcactcgcctgtaacttgaactacttaatgtagaaggtggtgtacctggtgaaagactaatgaattcatcggacatgttactgtttttcctccctgatgtaccaccaactttacgtttgcatgaaggtggtgaagaacattcaggcaatggtatattttctgagggcaccgtttgcttaacaaaatctccactggtgctcagaatgctggttctacatctcttagaaatgggactggaaagtctattgtgatggccacgttttccattattttctaatggcaaagatttcttagatgtaagataatttttgcagaccttctcaggagtcactacttcattcctgctcttagtgtctggagactctatttgctcagccaatggtaaagagacttcagttaaacttccaaaacattcagattctgtcaaggagccacttgctagtaagtctatttcaccatttatctgaggactggagataacagatggttggctacagaaggataccagcttttgcttagattcctctttggagtcaaattcaccatcttctttttctgcctctaaattccatttttggttgatttcagctaaagttttctttttttgcttttttccagatcttgcagaagcctttttagccctctcagaaacatctgcaggaggacttggggaaacaaattcatatgagtcttgctgagcacttgcatctttttttattgcaggctgggtttgcactgaagctttactcacaacatatctgactttcttacttcgagggctaaaccacattttaattgaattcttcttgtttcctgcatcattaaacaaacttttcctaggtttatcttctttcaaatctgacagaaaaaaagaaaaagaaatctgttacatgaaatttattgctcccacatggagctcccgaagaattttgtttacagttcccctaaagtgtatcatcttttaattatgtacttctttctc

SEQ ID NO: 98564 - DNA, 1045 bp, Homo sapiens
ctctgttactcaatattttgtgatgtactctgaaattcagagaatggaattcttttaaatattatcattaaggaattttctgtgcagaggaaggaccagtatttttcttcatgaaatgaatatgttgatttatcatgctgagaagcattcacccataaaaattgttggtagctgttaataatgtgatttatgttccagcaatagtgttttgctttttacagttttatcttagaatattatcttagatattcagaatatctaataaaattcagaatatacagtcatctttgttgtgctccttgcttagttatgcaagatacataattaaaatcttttgagtaaagttattattaccagatgaatagtaaaattgtgttcatatcaattacattgagtatattatcttcatttactcatttataaggtaggaaatatgtacacctgagtatgaaatttcttctttttatattgaggttttttagtcagttgagtatgttgctgctatatataagccttaattttcctttaaaagctcaattctacatttttaaagtttttcaaaaattgagaacctcagggtttgaacatggttttaattgaaaatgtcatctgtgtttaaaataattaaaaaaaaatcaaatacaagttattacagactatcagaggattaacctttatgactttgtaatcctgagtctttcttgaaaagtaatcctggtaacatttcattttgacctttcctatagacttgagattatatcagaagtgacttggttttgaaatctacttaccactgcaaagaaaataccttgttgaatctagacataaagtctctatgtgaatggatacgtcattctgatactttccaagatcctgtcttaataacactttgtggaccaggtcatgttcagctatgatatttaaaagtttatgtaggagaatctgcccttattcatatacatactcctgccttcagtaggtttatcattttactgtcttttcagtgtagtgcttccatttcatctgcaggaagtgatggtacact

SEQ ID NO: 98565 - DNA, 1987 bp, Homo sapiens
aagatgtggcttttcaactgttacattacttactcagtcctactggaacccatctggtgaggccaatgaaggaggagatttatagaattcttattctggaattcacagatgggcttgtgggggggatcgtgaatccctctttttacatgagtatgtatagattttcatcagatttgcaaaaggtctataaaccccaaaattagaaaaactcttctaactctgaaactttagtccttagataacccaggtaattgagtctacaggttttaaaattgtctgaaaaagtcaaagatcttttcccaaaagctactttaaagccttgagatactagtcccaaaacaaaacagaaggtctttcccagtgtctgcagtagttttgggtattttcatgcaatgttaagatagaaaaagttaggatgcacgactactatgcattaggcattctatctttctgttacatctctgtaacctttagaagctacagatttatttgtagggaaaattatgcagactaataatcaggctaagtaaagtctcttcatagcaaattacatgagcaaccttagatttgatgtatgtattttactctttaaaacagtattcaacaaggatattacaattgaccattgtatgttagaataacctctgctccatttatttctgttcaaactgtttagtttttggaattaaattctgctgaatgggttgcttttttttttttttttaattattttaaagtaattgtgtaagtgactgcattggaactggatgtccagtgtgttacaccccggcctggatacaagacttgaagataaatagacaactggacagcatgattcaactttgtagtaagcttcgaaatttgctacatgacaatgagctgtcaggtaagaactatccctatctctcttagttaaattcatcagttaaaaactgatgaattcatattcataaagtatataaaacatctatctggagttctggaatacgtatttcagattttaaaatctgtaggttttttttttttttttttaaatagccattgagtctctctatgttgtccaagccggacttgaactcctgcactcaagggattccccccacctcagcctccctggtacatgcatgtgacacacccggtggttttttggaagatcattttgagaaatgacgggaaccatagagataattaaagtctaacccccttattttatagttgagaaatcaaggtccagagaggtgaaataaccttgcctacagccgcatgtgtagttagtactagaagctggagaaataaagcccatttctgactgtaaatccaggaacttttttgctgctttacattgcctgctttttacatttatgataacttctgcagaatatatatggaatagtgattttggccttaatagcacttaactcacttaaatacactttcccaagatagaatacgacatttttccatggatcacttttctagactgaattaattagatgagcacattttgaaagagcagaaatctaatattcattttcttttctatttaagtgggggttaacgttttttaaattgtccttagactctgtgtattaactgtgtatctttccattgtgctttctgctgagaactaattaactgtggaaagaaagtaaaatgttttgtatcttcataattggatattagagttgtctttttattgaccagatcatgctattttagtgtgtgtttgtagaagaacgtgttcttgactggcaggatgccatggatgattgataatgctcatataaaattgttagatttctatttttaaatcttttgttcttagaatcctgccatgatgtcttattgtcagctaaagatgaagttgattatacaaaataaataaatgtggcaaaaactttgagtcttaccacaggtccatatttttaagaattagaacttaaatcactttatacctattaaaattttccttcagctagttatctgc

SEQ ID NO: 98566 - DNA, 2241 bp, Homo sapiens
agaaaaggttgcatggcttaggtgttacagattgtgaagaactttttaatagtaaatttttttttaatggtaaacagtgtgtgaaaagaattaaaataacacagtatatggccattcagtatttgttaaatgaacgacagataagtgtgaatcttcttcagtaacttataattatcagtttcttgtgtatccttcaagaggttctatgttcatataagcattgtactgcctcagataagcagatactaaacaccatgtagttgttgcatgattcatttaaccatttccttattggaaacatttaggttgtttgtggtcttttgctgtaacaagcagtgctggagtgatactgatgtcatgtgcctttacatttaaaatgtttttaaataaagttatacatgaacgtagttgacagagtcaataggacagactattaatgaaaacattctttgcttcatccttcatcacccctgagttctatgcatcagaaacatcttttgtcttttttttagttttacaagcatgtacctctacatttccaaatatgtttatattgctatttatttttttttccattttagatgttattaacttcctaactattctcaaagatgaattttcttactactgttaactttgacagtggaagttagtggatgtagaattcaaagtacaaaataattgtcaagaattattttgaaggcctcgttccacagttctgtagcatctcttattacccttgagaagtcttatgctatcctgattcctttttttaaaaaaagtatgacatttaattttattatttcttaaatctctggaaggttttagaatcttgtctagatatctttgatgtttgaaagtttcatttttgcaagtatctagtgttgctgaaggacaaattcctggcagtggaatagctgagttaaagttggatgcatttatattcttgataggtatctcctagttgtaataattttttaaaaaagtttttctaaagatacatgttcttgttgtgttgtccaggctggagcgcagtggctattcacaggcacgatcatggcacactatagccctgaactcttgggctcaagctttcctcctgcctcagcctcctgagtagctgggattgcaggcatgtgccactgaatttggcactcccttctctctcagcttggctcacacacttccttcttgttccctcccccaatacacacaagtgcacatacttctcattcacatttccattatctttccttatccgttaacagcaacacaaatatatattctaactcactaattagaataattagtacaactgatcaattattcccacatgttaaatcattactaatatgtgatagcaccttattgctagagtgaaggttaagaactatagctaaagagttcagtcatcttaggaaggaaatttaaagttgagaaacagaatcaaggcgttgagtcaagtattgccagagaaagccggaaggctacggactgcatcctgggggtatgcctacatggagaggtaggaaaagcagctaaggaaatgctgaaataggcagatcaatgtgtataaaaatattaaaatgcggtggaaggaaaggtttcaggaaagaagatgaggtcagtgctgtttcccagagtggtcagagagaaggggaccaaaaatgctttggagaacagtttcagcagagtggagggagttaaagctaggaaggtgaggagatgggagtagctggtatggagcactcatttaagaacttttatctgttcaagaaagggaagagatggagcagaaggtagaatgggaggtatgatcaaaactgtgttttttctgtgtcaaaggagagattacctgttcatgtgtagatgcaaatgagagaagaaaggcaagtattatgaatatctagtgctttgggaggcagaaaagatatgggaactataggtagagtagcacattttaggaagagtgactaaaggagatcgaattttcctcttagactctaggaagggtaagatgactggtgaagagataaaaatgtatttaggtgttaaaaaacttacaccattaagttccagtaaagttaatgagatgaggaagcatagagattgttttgaatagccatctattcatttgtttgtttatttatagaatattgaatacattactttggtagagatacaaacatgaagaggctaccaaataaattttatgtctttattttattttattttaatatt

SEQ ID NO: 98567 - DNA, 1013 bp, Homo sapiens
attgagcacccataaagtgccagaccctattctgggtattggggatttgttagtgaacaaagcagacaataaattccatctcttagggagcttttatggaagaaacaaaatgaaattttacatgtatgtaaagtattgagtttggtggttgtgatagaataaatgataaataatgtgtgtcttaatctaaaagaatgtggtgtttgcttgctacatgatttgggagagacaaaatagataatatatatgaatatatgttgtcctgaaaaataacaaagccggtttcactttttatcccctaccaaatatttttccagtttctaactgaagtgagtagacagtaagaggcaacggagtgtaaacagacatcagtaaccaggcccagacttttagcatggctcacccatttgactacagaatgctattgaatgctattgatttttttttttttaatccgaacctctatagatgaactgaatcttaactcttagactgcatgttttcatgtaggggtctgcaaattttttcggtaaagggccaggtaattaatattttaggcctttctgcccgcaaatagtttttgttcttatttatttttacatctcttaaaaatgtaaaaaccattctttccttaagggctgtacagaaacagactgctggcttggtttggcccacaggcaatagttgctaaactgtcgataaagtcttgataaacttaatgtctcaagtttaaaaatcctttttggtatacaattttatatcacatggggtgccttttttttttttttttccctaggcaaagtttcactctgtcacccaagctggagtgcagtggcatgatttcagctcactgcaacctccttcccccgggttcaagcaattctcttgcctcagcctcctgagtagctggaactacaggtgcatgccaccatgcccggctaatttttgtatttttactagagacggggtttcatcatgttggccaggctggtctccaactcctgacctcaagt

SEQ ID NO: 98568 - DNA, 1175 bp, Homo sapiens
ttgcaataacttggtaaatattgtccttgtttttacctttatccactctcttggtttaggttcctccaatagcagatcctgaacaaggatttcagtgtaacttatttaggaggtgatctcagggagcattgtagagagtagtgcagagataggagtaaggagaaaagcccattaaagatttagtgttaatgaggtggttactattgtagacagccaggctcgatcttgctagggaacctctgagagactgagtagaacatgtctctgaattgtgacaccaaggggcacaagaaacttgagacagggaacccaagtgatagaatatctcccatatctaaagagaactgaagcactgtgcctttttctttaatataggaggtgcatggtgtaataacttgtcctttacattgaaggaatgtcctagcttgcctcaaaacatggactataaaaatgtcactaatgttctgcagccaattaagccaactgagttcctttccttgtgggggcccagtgtgcaatggctgcacacagcagcttccttggtagtgtacacagcctgttggttgtatgggttgctctgagggaccttggagacaggcctttccaatggatgttcatgtttctgaccttgcgctaccccaatgtaggctccaaacaggcatgcgaggtgcctttggaatgccccagggcactgtggccagggttcacattggccaagttatcatgtccatccgcaccaagctgcagaacaaggagcatgtgattgaggccctgcgcagggccaagttcaagcttcctggccaccagaagatccacatctcaaagaagtggggcttcaccaagttcaatgctgatgaatttgaagacatggtggctgagaagtggctcatcccagatggctgtggggtcaagtacatccccaatcgtggccctctggacaagtggcgggccctgcactcatgagggcttccaatgtgctgcccccctcttaatactcaccaataaattctacttcctgtcaaaaaaatgtcactaatgtaccctaaattttcttttttatttttattttttatttatttatttatttttttgagatggtgtcttgctcttttgcccagactggagtgaagtagcatgatcttggcttactgcaacctccaccccccaggttcacc

SEQ ID NO: 98569 - DNA, 1131 bp, Homo sapiens
taaaaattagccaggcctggtggtgggcacctgtaatcccagctactcagggggcgaggcaggagaatcacagggtgaacctggggggtggaggttgcagtaagccaagatcatgctacttcactccagtctgggcaaaagagcaagacaccatctcaaaaaaataaataaataaataaaaaataaaaataaaaaagaaaatttagggtacattagtgacatttttttgacaggaagtagaatttattggtgagtattaagaggggggcagcacattggaagccctcatgagtgcagggcccgccacttgtccagagggccacgattggggatgtacttgaccccacagccatctgggatgagccacttctcagccaccatgtcttcaaattcatcagcattgaacttggtgaagccccacttctttgagatgtggatcttctggtggccaggaagcttgaacttggccctgcgcagggcctcaatcacatgctccttgttctgcagcttggtgcggatggacatgataacttggccaatgtgaaccctggccacagtgccctggggcattccaaaggcacctcgcatgcctgtttggagcctacattggggtagcgcaaggtcagaaacatgaacatccattggaaaggcctgtctccaaggtccctcagagcaacccatacaaccaacaggctgtgtacactaccaaggaagctgctgtgtgcagccattgcacactgggcccccacaaggaaaggaactcagttggcttaattggctgcagaacattagtgacatttttatagtccatgttttgaggcaagctaggacattccttcaatgtaaaggacaagttattacaccatgcacctcctatattaaagaaaaaggcacagtgcttcagttctctttagatatgggagatattctatcacttgggttccctgtctcaagtttcttgtgccccttggtgtcacaattcagagacatgttctactcagtctctcagaggttccctagcaagatcgagcctggctgtctacaatagtaaccacctcattaacactaaatctttaatgggcttttctccttactcctatctctgcactactctctacaatgctccctgag

SEQ ID NO: 98570 - DNA, 1063 bp, Homo sapiens
tacttgggaggctgaggcaggagtatcgcttgaagccaggagtttgagaccagcctgggtaaccatttctaaaaataaaaaaaaattaaaaaaaaatagccagacgcaaactacaggcatgtacctgttgtcctagctatttaggaggttgaggtgggaggatcattcgagcccaggagttctaagctgcagtaagccatgattgtaccactgttctccagcctgggtgaccgaggaagactctatctcttcaaacaaaacaaagaaccccaacaaactccttatagaatctgctgaagcttttcttgagagtgcatcacagcccaacttttccctctgctcaatcctgcttgactcccttcccttcagcatgttgcagccttaagaaccttccttctggctataatccctgtctcagtctgcttccttgggaaccccatctgtggcagattacaaattgagccaaggcagtagcaatggagctagtgtagactttaggatattttaaggaataatagcattcactaccaattggatgtaaaaggaaaggaagatggaagacttaattataacttccacgtttacttggacaactgggtagtcaatggtgcattcatcaagataaggaatataaaagtaggagcagagtttgggggagaaaatgaccaatttcttcttgtacattttcatcatgtatataaaggaaaatgcaacaaaataatatgtggaaagttattaggctaaaccataaagtgccacttttataggtcagatttgttaaatattggcaatttcaaatggatgaaactaataattatatattagcttctacatgggaaaatttactatttttattaaaccttacgtaggtcatataagatttcagaaaggcaatatgtgtcagattcaaaagataatcttttggataatatatcatttacatttaagcttctgaaacaagaatataaatcacattgttgctttaaggcacattaggggatcttgatgagattgggaactttgatttacatcagttttcttgaagaagttgagacataatcac

SEQ ID NO: 98571 - DNA, 1012 bp, Homo sapiens
cccaactacatgtttgatattctttaattaagaatattatgctgggcatggtggctcttgcctgtagtcccagcacttggagagctgagacaggagaaccgcttgagcccaggagtttaagatcaccctgggcaagatggcaacaccccccttctctttaaaaaattgaaaagaccagctgggtgtggtgatgcattcctgtagtcccagctacttgggaggctgaggtaggaggatcacttgagccctggaggtcagggctatagtgagttgtgattacgccactacaatccagcctgggcgatagagtgagaccatctcaaaaaaataaattttttttttaatcaatgggatttaatttgattgaagacactatgttgaaagacattccttaatctgacttgttttttgaagctaatgactttgtttaacttttttaaattaggaatcctagctcgtaatattccagaagataatgctgacatggccagacttgatttcaatcttataaggtaaaaacctgaaattaaacttttaacacattacgaaccaacgacaaagactatgccaaacctggtgtccctgtgttttcttactcactataaacctttactgcgtaccttctgtgtgactttgtatgtgtgtaagcattttggtttggccagatttatataccaaaatacatactgaagttttttaggaagttacaatctaaatcttagtatgtataggttgagtatcccttatctgaaatgcttgggacccagaagtgtcttggatttcagatttcttcagattttggaatatttgcaggtaacatgccagttgagcgtccctcagaaatccgaaatgcttcagtgagcatttcctccaagtgtcatgttgacgctcaaaaagtttcagattttggagcatttcagatttcaggttttcatattaggaattatcaacttgcacaactaactgagttatttgcataaagatactggctgtttctcttaaatatacgtaa

SEQ ID NO: 98572 - DNA, 1019 bp, Homo sapiens
tttatgacctctctgaaggcaaaacaaatgtttcacccttagaatgctctgatatttttcatcattgtgccaatccactggaaaaagaatctaaattctaatgttctggataatagtgatcacattccaaaatgagaatgttatctgtaatcttgtactttatacttctattaaaatgttctataaatttttcatggcttggtggttctgggtagctaaggttatgcaagcagcagcgttgcagtgtgacgtggagggagtactgtgtattcagatccggggagcacctgctgactaaattacctctgctcgaccccagcaggacaccctgactttttaacacactcgttagaattctaaaatgtcaggctcacagtttatatattagttctctatggcttttgtttacgttaatagtactgacttgtttttttcctagatagctgtaaaccacatgagtggactttttaatgacagccagattcgtctttgttttatagagttgttgcctgcaatctctatccctttgtaaagacagtggcttctccaggtgtaactgttgaggaggctgtggagcaaattgacattggtaagtcagaaaaaccattttagaagactgagaggagaggattatttaaattttagtgagatttcattttgaattttattactgaggaaatagaaagaaaatagctacttctggattgtgttttgggattactataattcatttatattttctttttttcatttatattttctaagctttttttgtatgcagagatgcatctgggttattttcctgatttatttatttatttattttatttttatttttttgagatgaagtcttgctgtgtcacccaggctggagtacagtggcacagttttggctgactgcaacctctgcctcctgggctcaagtgattctcttgcctcagcctcctgagtagctgggattacaggtgcacaccaccacgcctggctaattttttttgtattttttatagagatggaat

SEQ ID NO: 98573 - DNA, 1068 bp, Homo sapiens
cagcttttgagagcagaagctgcatctgtttttgtttgtcgctgaatccccagggcttagaagactgcttggcacattccctaaatgtttactgaatgaataattagcaacctgacattttgcacaaatttttccttgtaggacttcttgaaactgatttgtctgctgttatatctgacctatttcctgcttatagtttatattctccattaagattctgagacaaaaaaatccccatgtactgtcagttcttatacttttcattttccaaagcattttcattggactatataaaagccttcattgttccttagactgtgtgtgcgtttcttttgaagtttaaagtattatttgtggtaaacatggcagaggcggccctggacacgtaaataagcgtttcttgtgcgagattcccaggatttctccccaacatgggcttatttccacaatagaaaaggcactttgccttttcatgtggtttgagtatttggcagtgatgttattacagagtgtatggttgcgattgtatctaaaacaaaattgaagcaagaacaaagatggggttgtgtgagtgtgtgtatgtgtctgagattttaatgactggtttgcttatgattggaaagaagaaaattcctatttatttcagctatttactagattaagcaactttcagcatttctctggcactttctatttcagttattaatgtctttgaaaatttgatatttgaaggggaaccggatactcttttttttttgaggcagagtcttgctctgtcgcccaggctggagtgcagtggcatgatctcggctcaccacaacctccgcctcccaggttcaagtgatctcctgcctcagcctcctgagtagttgggattacaggcatgtaccaccaggcccagctaatttttgtatttttagtaaagacagagtttcaccatattggccagaccagtctgaaactcccaacctcaggtgatccacccaccttggcctcccaaagtgttggggattacaggcatgagccaccgcacccatccagatacgcttaactatgagatgtttcaga

SEQ ID NO: 98574 - DNA, 1073 bp, Homo sapiens
aagaagaaagaaaaaacacattatttcttctcttcttccacccacagctgttgctttagcttgtaatataatttcttacatcgatagggtttataactttaattttgtactgtctctgtgattacctcaattgtttaatcttagttctgtatttacatgaattcctgactgatcactagtcttgtcatagtttctcccatccctaaatctcttattgtggatttatttctagactggctggttctggtcctccagtcgtgtgtgtgtgtgtgtgtgtgtgtgtgtgtgtgtgtgtgtgtgttcatgtacatgtgcattttttttaaagatgggctcaggctcagttgctttgttctttatcatcaagattttatgtttgtgtgtatctgtttggctcttaattatacttaaaacatttgtttagtcatgttatttttttgagaagtgtgcatacatctgaccttactgatcctgcttagtaatgtgcatgtatatttttacatttagttctaaatggagcccctggatttataaacttgtgcgatgctttgaacgcctggcagctggtgaaggaactcaaggaggctttaggtattccagccgctgcctctttcaaacatgtcagcccagcaggtaaagctctgtgctctggaaagctccagaattgttcgaaaggcatttcttcttaaatttttttgaatattaacaagttctaatgtgaatatagacatgctatgaaatctgaaagtcatctgttgataacagtatcaatgtaataatataaaatctgatacacacacacacacagaattgtgtaatattgtcaggaaaatgaggcaggaatttgtttgtggggtggaaccataaaagtttagaaaataaaagtgaaatgtcctaatgcaatagactaagtcttgtgccacatctttgaaaatgtaatggagtaaacataaagaagttcttctttggactctttatctgaaacttcttatagtcgttgtatgagatactttgcttctgtgtttaaatcatgaactccgcaattgagttgtctgtacaccacatcttgctga

SEQ ID NO: 98575 - DNA, 1600 bp, Homo sapiens
atcttaatctgtgtgttgaataaagctttatttgttcataatgttaattgaaaccataacctataatatttatatttataatatcttttaattagctaagtttatcatttaatgttcatattttaaatagaacattaatcttaaattgttaattttgaaatgtagtgaattattgtttcagatggatatttggctgttatgatgttttttacttatatatttattttaaattctttgttgtcttcatgccaaagttactgtttctgaagagcagaagttgtaattttaggtggtgatgcgatataatccatcttactgcatagtgggtaaaaaacagaaactacattaataaacttaccccatcagttgaataccaaacaggtattccagacaggtgggggtactgttggtagtaggaagacaggaagaaaagagaaaaagattaaatagctcagaaaggggaaaaaaataagcagaggtgaaggctgaaggagcatgtggcttggcactattttgttgctttaggattctttccatggccactgccatccctgggttacaggttacaggagggctgtgacatttgtatctttcgtcatgtcaaatctctgatttaatctggtcttgctgttaaggaaaacgccttgccggaagaggtcatttaaccatgtactaggagagtcaggactagaatgtgctcttgctcattcaaaacactccctgaagaaatatttcctcctgaggtacatgtgttaagagcaaatcagtcatattttcttagtttaaactgaaacgaacaaaaacttggagaggacagaaagttaggatctgctatacagaaagctgtattctaatagatttctcttttcaagtatagcgttagcattgtttgttggaggcagaaaccagaatatgctgccacattatttaagactgataattgctgctagatttttttaagaggtgttctctgatttttaaaaatagaaattaaaatttaatatttttgcaggtatctgatggtataattgccccaggatatgaagaagaagccttgacaatactttccaaaaagaaaaatggaaactattgtgtccttcaggtgagtgcaattcatgtttgaagcggtaatttgctcttttattctgtgtctctttctcccttgtttactctttcctttatactcatacccttctagtttatccttattatagtttattttccccaatcctgcatttaaaaaaatactattaacttggggttttgagatgagagtagctttcttaccctcaattttaactttttgctggttgtgatggctcatgcctataatttcagccacttgagaggctgatgtgggaggatggcttgaggccaagaattggaggctgtattgtggtactatgatgcctgtgaataacgactgcactccagccttggcagtgtagtaagaccatgtctctaaaatactaataatagtaacaatatttaatggaaagtctctccatccttctgttaccttttgaaaagataactattttaaatttcttgcttatctttcctgaaatagtctatgtattcagcaaatatttgcatgtgc

SEQ ID NO: 98576 - DNA, 1140 bp, Homo sapiens
agcctcctgagtagctgggactgcaggtgtgcgccactacccctagctattttttaattcttattttttgtagagatgagatgttgccatcttgcccaggctggtctcctgagctcaagcaatccttctgtcctaacctcacaaagtgctgggattacaggcatgagccagtgcacccagcattggtcatttattttaacttttttttttttttgacctcaaaccatcaattttattgaattgtagattattaatagtcatatgtcacatatcactgaagaggtataaatagtagttataaacaaacctcttactccaccccttttaatgacttaaaaattatttatatttctcttattttggcctgatatgttcttccacaaaactaataaataggttttggagaatgtgcacaaaagatccttttgagaagaaagtgtctttggaagaggtgttcactttaatgtctgtgttcctcaggttatcggcattggagcaggacagcagtctcgtatacactgcactcgccttgcaggagataaggcaaactattggtggcttagacaccatccacaagtgctttcgatgaagtttaaaacaggagtgaagagagcagaaatctccaatgccatcgatcaatatgtgactggaaccattggcgaggtgaaagacttggcattgggttctcggctgtgttaatattcagttcaaccctttatgtgtaacagattttaacttcatcaccacacagagaaaaagatactttcattgaaattctatgttgtctaaaattgatcattgaaacttcttacacatttctcatgttcttctgtctcatgtaactttcttcattgtttttgacccctttctgaaaccacagtcctctgtctttttaaattgcagccttggtgtaggtttgtatatttgtacttcccctgttgattataagcttttgatgacaaggactgcttttcacctacgtcgaggtgcctgccaccacgtcatgcatggtgcttgctgtccgatgggtctgtattcaacattaaatacaaattgcctgacggcaggtaaccctggggtcttctcccaccacattttctacatgtgccattaataacttgatacattttgttacatttc

SEQ ID NO: 98577 - DNA, 1096 bp, Homo sapiens
tcattatttacaattaagaaatcctggccgggcgcggtggctcatgcctataatcccagcactttgggaggccgaggtgagtggatcatgaggtcaagagattgagaccctcctggccaacatggtgaaactctgtctccaaaaatacaaaaattagctgggtgtggtggtgtgcacttgtggtcccaggtacttgggaggctgaggcaggagaattgcttgaacctgggaggtggaggttgcggtgagccgagatcgcaccactgcactccagcctggtgatagtgcaaaactccgtctaaaaaaaaaaaaataataataataataaaaacaagtcctaagaaaaatgcccaggtgctttctggcatggtgatttgcaccacatagaactaaagacgatgtcagaccaagcttcttcctttctctctccccgcataggatgaagatttgataaagtggaaggcactgtttgaggaagtccctgagttactcactgaggcagagaagaaggaatgggttgagaaactgactgaagtttctatcagctctgatgccttcttccctttccgagataacgtagacagagctaaaagggtaagtatggaattgggtgcatttgcttagagttgagcattatgtagaaactgtttcagaaatcctgcttttgatttttaaaaggtgtggcaaagtgatacagatcagtaatattcagagaaccatttgacttctccattgggtggatggagaacccaaatcctgttgttattttgcctttttgactgagtgtatctttgttagcatatgctttttagagggggattttgagttttgcaggtttttacataaaatcgcgttttgaaaatcaatatacttcccccagagtggtgtggcgtacattgcggctccctccggttctgctgctgacaaagttgtgattgaggcctgcgacgaactgggaatcatcctcgctcatacgaaccttcggctcttccaccactgattttaccacacactgttttttggcttgcttatgtgtaggtgaacagtcacgcctgaaactttgaggataactttttaaaaaaataaaacagtatct

SEQ ID NO: 98578 - DNA, 1070 bp, Homo sapiens
gagatgggcatgtttcattgtaaagtcttgtccagcagtctcctggcaaaggcagtgcttcattctagaatgaaatggccatttacaaagtaccaagttgcaaagggcccaatgggagactccttggcctttgatgtatcttgcctaagggagcctgctctgctgggtagcttcagggcacttgacgccagccccagtccatcattctgggctggctgcctcgtacagcttcaaccaatgctagtttcaatcctttgggggctccacatgagctgttttagagataaatttggctcctgagattgttaaaacctgtatgtctctaaagagtaagtaaaaaggaattcaaggaaatgtaaaacatgctttaatatctcatacctgactctactgaggaatgttaaaaaaggaatttcccatttgggactttcggctgaagccctgtttctcttgctcttttattacatcttttcttcatttgtaatttatataggtttctgtttgcaattcaagttgaatcttttattttaatgaggatatggagtgagacgatgtgataatgaaaacaacgtgcatttcaagtattttgaaaaaacttccttagtttctgcaaggtcatctttgtgtttcttctgctttatcagccttaatggtaatctttaaatgtttccaaacatgggaagtcccaacagcggtctttttttttttttcttaagagttgaattgtctcccttgaaaatgggattttttaattgtaacctgccacattccctatcacagtaatgggaacttactaaataggaagcaatttgagcacttaaatgtgctgatgtgatgtttcttaatcactttaatgagtttcataccactagaaatggaatagaagtttcaatggaaatataattaaatagaaaagtcatttcctgtacttgtaatttccccctgatcatttctttattcacctccatagaaagggtgccctacaggtgtatagtgatgttattatacagacttatttgcataattcacttagattattagagctgaaaacaatataaaatgtaacattt

SEQ ID NO: 98579 - DNA, 1049 bp, Homo sapiens
tttttgggatggagtcttgctctgtcccccatgctggagttcaatggcacaatctcagctcactgcaacctccgccttctgggttcaagccattctcctacctcagccttctgagtagccgggaccaaagacgcccactgccatgcctggtaacatttgtatttttaatagagacaaggtttcaccatgttggccaggctggtctcaaactcctgacctcaggtgatccacctgcctcagcctcccaaagtgctgggattagaggtgtgagccactgcgcctggcctgaatgtcaaatttaatcccaaagtttgtttcctcaatgttaaattgaaaaagaaatgacctttacagatcaggagtaaacaaactgtttagctgggagtttatcaagccatgccaaaagtgtcagctgacccaaagtaagacatgttagatgggggttatcataccatggggtttccctaagataaaactcctccatattatactattcaaatacttttaatatcttagtcatttttatttcccttgcaggcaatctctttgaacagaggtttattcaatgaaggaaaggtggagggaagaagggaagaattacaatggttagaaaagagcaactaaagattatttctattatacttctgaacggtaaactagcaattttaataaatattggggtccacttaaatctattaaagcagaaagtgtaaagctatctccattagtgaagagatgaagtgacaaaaaccaatcagtttttgtagcaactgatttagaaaatcttgtactgaaatcaacaattagacttgcacatcatagattttcaaatgtttgctgaattgaaaaagaatattcacaggaattatttcccccgaaggtgtcttatatcaaatagatgaacttcaagttgtggaatgtaaatcttttattaaaacagttgtctttccacagtagtaaagctttggcacatacagtataaaaaataatcacccaccataattataccaaattcctcttatcaactgcatactaagtgttttcaatac

SEQ ID NO: 98580 - DNA, 3044 bp, Homo sapiens
gattggaatttagattgaattcagtatctctctctgtctctctctctctctctctcccattaacacttacaacgactgtgattgtatgaccttagaactcagtcattctggtatgaaattgtgtgatggagaatgaatttgctgggaagttgattttggtctcacttcagcatcttctcattatttatgcacatgaaacctttcatgtgcgacacttattctattctcaagtgctaaatgaaacatttaagacaggagtggaaactgttcactttctcatatgaaagcaagattcagtgattctgtaaggaggtagtcactggtattgtgttaggtattaaggggcatatgtgcttaaacagagaaatatgtctaaaatatttaaattctaatataaaaaagaaagtgactgtattatttagggctgcattttagttgtaagaaaaaagtccaactcaagcaaaaatggcccacacaatggaacagtcccaggacccaccggcttcaggggctgctccagcaatggcgcccggactccctcttgctccgcgtgccttcccatgcactggcttcgtgcttcagcggggtctctgctgatggtgccattgatgactgacctccatgagcttgctttaccccctgccagcttaagaacagtagtgaaagagaacatgtgtgtcctcccatttccagtaaaaacttcaggcaggagcctcactggctcagcttggtcccgtttccatctcccatgccatctccggccaggtgacaggctaccatgtcactgcctagggaagtttaggaagagagtggcaaagtggtgcattagaaagaacatggccaggtcaccccacctcctgggcggcaggcccaactccaccagtggtccactgtgtgacttccctgctccctctaagcaagtcactcctctcctctgggtctctgtttccttacctataaaatgagaacgtttcttcatgtgatctcaagtcccttttaaaatcgctaggattctttgaaaaccttttctatcatctagtgcagagaacttgttgaggaagttgggattggaatgagcctcagcagatgggcaaggtttgaataggaagagaagagacatttcaggagaaagaaacaacatagagagacagatgtaggtataagatatggtaataagccaaaatgtattaagagttataaatgcatgaaatcatcatcaaagcttgcttagtgattaactgcttatattttgccagtgcatatgatgtgacatttttctttaactcaaacactaaattacgatgtcctcaggttatcataaaccccatttgacttcatgcctctactctctcagggctggcgctgtgacaactgccgcagacctgggggtgaacccagtcccgaaggcactactggccagtcctacaaccagtattctcagagataccatcagagaacaaacactgtaagtgcattagcagcacaagtgtgttccctcatactagacagtctctttctacaggtatctttcttcagaatgaaccaagtgttttaattaattaaaaaaaaaaacaactcataaatgacttaagtgaaacactgtattccataatatagtttaagttataatttatgtaactcttgaacatctcctattgcccagtatgctgctaggttcttgaaactaggaagaaatattatcctatctataagcagctgtcatgagtccccacctccccgcatttttttttctgtacactttacagtatttgccactaatttttttttccttcttcctttttaacagaatgttaattgcccaattgagtgcttcatgcctttagatgtacaggctgacagagaagattcccgagagtaaatcatctttccaatccagaggaacaagcatgtctctctgccaagatccatctaaactggagtgatgttagcagacccagcttagagttcttctttctttcttaagccctttgctctggaggaagttctccagcttcagctcaactcacagcttctccaagcatcaccctgggagtttcctgagggttttctcataaatgagggctgcacattgcctgttctgcttcgaagtattcaataccgctcagtattttaaatgaagtgattctaagatttggtttgggatcaataggaaagcatatgcagccaaccaagatgcaaatgttttgaaatgatatgaccaaaattttaagtaggaaagtcacccaaacacttctgctttcacttaagtgtctggcccgcaatactgtaggaacaagcatgatcttgttactgtgatattttaaatatccacagtactcactttttccaaatgatcctagtaattgcctagaaatatctttctcttacctgttatttatcaatttttcccagtatttttatacggaaaaaattgtattgaaaacacttagtatgcagttgataagaggaatttggtataattatggtgggtgattattttttatactgtatgtgccaaagctttactactgtggaaagacaactgttttaataaaagatttacattccacaacttgaagttcatctatttgatataagacaccttcgggggaaataattcctgtgaatattctttttcaattcagcaaacatttgaaaatctatgatgtgcaagtctaattgttgatttcagtacaagattttctaaatcagttgctacaaaaactgattggtttttgtcacttcatctcttcactaatggagatagctttacactttctgctttaatagatttaagtggaccccaatatttattaaaattgctagtttaccgttcagaagtataatagaaataatctttagttgctcttttctaaccattgtaattcttcccttcttccctccacctttccttcattgaataaacctctgttcaaagagattgcctgcaagggaaataaaaatgactaagatattaaaagtatttgaatagtataatatggaggagttttatcttagggaaaccccatggtatgataaccccc

SEQ ID NO: 98581 - DNA, 9772 bp, Homo sapiens
atctgccactgaggactgcttggttattaggcctaagtagattcatgtatataatctgcaggactctctttcaaatttatattccagtggtggtatatgatgctgatagattttcttaaattcaaaaaggcaaataagaccacgttaaaagaataccctggaaaggccaggcgcggtggctcacgcctgtaatcccagcactttgggaggccgaggcaggcagatcacaaggtcaggagatcgagaccatcctggctaacacggtgaaaccccatctctactaaaaatacaaaaacaaaattagccaggcgtggtgatgggtgcctgtagtcccagctactcgggtggctgaggcaggagaatggctgaacctgggaagcggagcttgcagtgagccgagatagcaccactgcactccagcctgggtgacagagccagactccatctcaaaaaaaaaaaaaaaaaaaaaaaaaagaataccctggaaaagttagccaaaaaatgtctattcaggcgtcagatatgatagtaagataattagtttgcgatgcggactttatatgcaggatatttgggtgtttatggaggaaaagtgaagtcgattttaccttcaagaggccaacagccagctggagaggaagtgcctgctcccagtagcgtctgctggtgagaccgacttccacttgactagctgagcccattgacataatgtgatggttctattctcccttcaggcctggaaccgggaaccgaatatacaatttatgtcattgccctgaagaataatcagaagagcgagcccctgattggaaggaaaaagacaggtaagagtatcttgcaggtaacaaggagaaagataggacaaaactaataacaaatgagcaatcttgcaatatgaaaaggttctccatgttttgatgcatttcttgtgattttttttatctaacagcatagtgtatatattgtattctttaataggagaaataatttaacatgcactgcagagtttggttttattttttttctttactacagccactcaatataaagccttgttattcaccttttaaaaattcaaacaagatgttaaaatgtaaaagaagagctatcattgctcttcttttataccttctgttgaattttaaaatgtttccttttttaaaggagggagagaaacctctcacatttatctttatttggtttctacaacttagagctaaataatgtcttacttttgcatccagtttcagttaatttcaagaaaatgtgtattcctgatataggaaaatttcaaaaatgaacatgtgtgttttatctatttttaccatttcaaaccatgaaaaactgttgagccaaacctctgtaattctcatacttatgacactgatatgattagtctggattctacttcctacaacttgcttctcaaatttaaaaaagaaagagagaaagagaaagactgcacatttcagttccattaggtctaatttgagcagaggcagcttctacggggctcagcggtttaaagctgtgtgtatgataaattcatactaacacttttttctttctaaactataaagaaacctttgagaaaaatcctaaagatttctttctggaaaaagtgttttgtgatctcagaactgctcattttctggtggcttttatcaaattgatgaacagtcattgttgcctgaatcgattattatcattgctgctacttcctggagcttaatgcgctttgcttttttggctctaacctctctcggctagacgagcttccccaactggtaacccttccacaccccaatcttcatggaccagagatcttggatgttccttccacagttcaaaagacccctttcgtcacccaccctgggtatgacactggaaatggtattcagcttcctggcacttctggtcagcaacccagtgttgggcaacaaatgatctttgaggaacatggttttaggcggaccacaccgcccacaacggccacccccataaggcataggccaagaccatacccgccgaatgtaggtgaggaaatccaaattggtcacatccccagggaagatgtagactatcacctgtacccacacggtccgggactcaatccaaatgcctctacaggacaagaagctctctctcagacaaccatctcatgggccccattccaggacacttctgagtacatcatttcatgtcatcctgttggcactgatgaagaacccttacaggtaattaattgttctcttcacttctcatggggcagcacagaaaggaataagttaggtaactgaagtgaccagccctcgaataaaaagtggcttcatggccgggtgtgatggctcacgcctgtaatcccagcactttgggaggccgaggcaggtggatcatttgaggttaggagttcaagaccagcctggccaacatggtgaaacctcgtctcttgaaaaaaaaaaaaaaaaaaaagtggctccacttttagaacctcttagaagatggcacatttaagccctgcttttttttttttttaaatcccaatatggctctactttggaggacataccagagagtcactagcttttatttcatagagaaaatgaaactatttctcttattctcacacatttgaggttcctttttgagtaagatagatgattctagaaaagaaagatattctacctgaatttccatttgtgtgcagaagtctaaaacactacctttacgatttgtccttgaagaaccccactatctacaacatatctaaagaaaaaaaaaaacaggcgaagctgtgcatagcagctgataagtgattgattctctaaaacgtatattatttaatttgtgttgacagtatccatttttttttttccccgagatggagtcttgctctatggccctggctggagtgcagtggcgtgatctcggctcactgcaacctctgcctcccaggttcaagcaattctcctgcctcagcctcccaaatagctgggattacaggcatgtgccaccgcacccagctaatttttgtatttttagtagagacggggtttcacgatgttggccaggatggtctcgatctcctgacctcgtgatccgcccgccttggcctcccaaagtgctgggactacaagcatgagccacccactacacccggcccactgacagtatcaatttttattgtgttgttacttttagaaagtggcagaatttaaaaactgacaacactgtaggaaatttatgagcttagaaacatgagtttgaggatttgcccaactgttttaaggactccacactggggtcagatgtcacctggaggagcatgaccgtgtctcccatatagcgcagtgtccaggttttatgtgaagcaaacatggccagggcttccagagggcttatgcagacctgcgactgaagcaagatcaatggcaggccgtctctagtattgtcgagggctcctgttaactacggagcacgtaggtagattgttggcaggaaaatctggcaggaacgatggcccctatccttgttccatttctctcctcagctggttaggaccactataccctccctcttttttttttttttgttttttgttttttgtcttcctttgctttgtttaaacagtgagggttattggtaagaggagagcccgtgtcattcctcactataatgctttctctctgctttggatgtaccgataattgcagttcagggttcctggaacttctaccagtgccactctgacaggcctcaccagaggtgccacctacaacgtcatagtggaggcactgaaagaccagcagaggcataaggttcgggaagaggttgttaccgtgggcaactctggtatgtaaacacgtactatttagacacaggctcccctctgctgtacaccagagatgggcttttctgttgactgtacctttgttgccattgtctttttatctttgggatttaatgcaacacatcaacatgaaataaatgagcaactttatattaaattaatctctcccccacctcctgccatatcctgttgtcttcacaaaatgcatacgtaattgacagactctcaaatggtgatatgattatagatctggaagggatttcaaatattatttagtacaacactctgagtccttacttctgagtatctgagttgatatagggcacaggtttcctgatgtcttttcccagaccctctccatctcaccatgctgctgtcctcttgagtgattaaatactgaaacgattacctataaagaaaataccccttctgcagacatggggacagttggcttttgctcctgatataaaatgctaccaacattgtgcatttctgtctgcagagaatgttattccaatgttatttccatttttttccaatgttatttccatttttttttctgactatacaggttaaaagcttctatagaggttaaaagatcattaactcttctttgtagcacctgggaaatccttttaaatcaatagcgtgccacctggctgctcaatttgcagcagctgaaaattcaccaaggcacatgagataggggataatcaaaaccgtgaatccccaatcttccaacaggagagttctctactccacaccaacagagagtgctaagtcctgtctatgccaagtgacagattttattcctaaggccagttgtttaattttagccccttccctcatctgatagaagactgtgctactttacatgtataaattcctgtgaattaagcagttgagcatttggctggagagaggttgggaggagattattttgtgtttgttgtattacatatccacagtaatgcttatctttgccttttgtggttttactagtagaatgccacgtgaacagaattttcaagagcaaaaaggtctttgtgcttttctaagtcattttttttttttttttttaaagattccatctctttaactttagttaggatggaatttgaactcctggctcttttgagtatagaaacccctagtaacaatttaagttccttccatttttcttttaaactccttattcccagcagcagtattctacattctaaccaggttctcccagctttgagacgtctcagacttaccagttctccaaaacgctattttctttaagggtgacaccttttaaaaattaggcacctcaaatatctactgcttttgagcttttgagttttgcactgtaaaaagaaaaatacacagtgggattttaagtcaaattagtttatctaatttttagggaataatttgaagcatgctttgtttgcatagatttttttaaaataagcttttccaaatcataaagagataagatcttaggtaacatgaagagactcccttacttattcctaaatcatctatattccaagggcattttcttatttggaacagttgacctcactgataaagctgtctcaccactataataacaatgtccaaaatctaggctttctgcactattatgcaaaaattacaataataaaagtgaaaattacattataatggtatattaaaatgctaagacttttgcattataagcaaaagacagcctttaataattattctttatttagtgaacattttctaagtcttggaaaagggtcaatgttttgaattcatggccttatataatcttcacaagattccccaggaggtatagatatttttattattacgctagtattgcagatgagggaagcaaggcagagtggtattaaatagctggcccaaggtcactcaggtaccaatggagaggcatcattagtctttgcatcccactaaagttctccactagcttcaattgcctcaagatctgttccatgttctatgaagtagtttcaacagaaatggcaattatcttagaagcaagggaaaaataaaagatgggcttcctgtcgggtgcctgtgacaggtgtcacatctaaccatggttttttagagcagttaatgccttgatagaacagatgaatgcctcttaatcctcctggaattcttgttttagattaagtcattgtatacagtcattcgattttcttcttatggtccaaatcgattaataagatgtctctttttgctttttcttccttttcttcatagtcaacgaaggcttgaaccaacctacggatgactcgtgctttgacccctacacagtttcccattatgccgttggagatgagtgggaacgaatgtctgaatcaggctttaaactgttgtgccagtgcttaggctttggaagtggtcatttcagatgtgattcatctagtgagtagttgctttgtccatccacttccgtgtttgtctcctcaagttccatgcatgcactcatgtgccaaggaagcatgtttggaagacacaggttcttccaaacatgaagcaaacaagagaatactgtttgactcgaagtaatattttgcatcatagaaaaatgatgggaaattttacttgttggacattgcttcatttcaagggttgtatgccaatacaactattaattacacataagattatggtgctaatttgatttttgaaattttctgtgaaaacaaatggataaagacttttggaaccaggtctatttaagagtattagagacacagaaaaacctcaaatctcttttaatcttcagtgttgaatgagatcagaggtgaacatttagactcaaaaacagcctccttcaacataaaccaaacatgcacatatcatagtacccatgcacacacttttgcgtcacacacatagcccaggtagcttgaacgttgctagaaatatgaaagaaaaaacagataatctgcttttagatcattaaaaatcaacttgaattgataaatgtttgattttcaaattctaatacgttttaattttcaaattttttaagttaaaatgtgcctaggaaatatctattatgctttgagattaggattagaatttataaacctttcatttattctttgtgtttaggagatgtgatgattattgacaattggttcatttttataggtgttgaccgttatgcctataaataagcctcctatagacatacagaaatcatatcctgtggaattagaatataagacttggtaaaagagattttcaaagtattttacttaacttgtatacttgaaatcatttaatccagactgaagttgtaaaagccagccagtgttttcaatatagacttccatgtttgaccatctgaaaatgaaaaacactaaaaacatcacatgctgtttaggagctggaaattttaatatttgacttcaagtagatggtttttaactcctgaaatcgaactacgtttaagtttgtatgtttattacctgtttgagcacttaggtgcaattgtgggagcggggatgtcaagttcatttatgtgactctttggctcaacttacataatctttgttttgatatcacagttgtctaattattttactttgtagcttaaggcaggctgaattgttgataaaatggaaaaagtagtatattgttatataagcttctgaggtgtgttttgttgtataagccctggaggttaaaaagtcatcccttatgtatagtagttaaaggcataaaactgtgacttttagatattccacagaaccagacttatttgatgtggataataaccaatgatttagcattttgtttgcttttgttttattttatccgggttcattttttactcttcccatgtacatgaaacaggtggtggcgtgtagagatcagctgatccttgttttatggttaattgaactactttgtatccagggtttctgcaaatccaaaagtgatttttcatctaggatctattcctaacagtctactccaatcccactttagttttccacaattttaaatcttaatagtgagaattcaaatgaaagtcatttcatttgactattctgatgacatgattgtggcagaataaattgggtcttaaaatgccctagaaaatggtaaatgataaaaaataatattttaaaattcaaccaaagaaatggcccattggccaggtgtggtggctcacacctgtaatcccagcacttttggaggctgaggcgggtggatcacctgagctcacgagtttgagaccagcctacccaacatggtaaaaccccatctctacaaaaaatacaaaaaaaaaaaaaaaaaaaaaaatagcactgtggggagtgcctgtaatcccagctactcaggaggctgaggcaggataactgcatgaacccaggagatggaggttacagtgagccgagattgcaccacttcactccagtctgggcgacagagaaagactttgtctcaaaaaaaaaaaaaaaaataaaaagtaaataaataaataaaataaatggcccattataggggtttttatctttaacttgctatttttccagatcatggttctgaagaccctgtgacacgtcccagttcacctactgtcttgtgagtcagaatatacaaataactttttggtcctgactttccccacccctacaggatggtgccatgacaatggtgtgaactacaagattggagagaagtgggaccgtcagggagaaaatggccagatgatgagctgcacatgtcttgggaacggaaaaggagaattcaagtgtgaccctcgtatgtcatcacagatcatttttagtgccttattaagcattctcactttcattatcaggctgtaactctcattcacagaaatgattggagactttaggtctccttgaggagtgaacagtgggtttcttaatcttttgatttgggaaagtggagacaagcttcaaaaatgagtcatgatttaatgttattacaggacactttagcacttgtccaacctgagtattttgaccattatctgcagtaaaatgctacaaagaagctttattggtctgtagattcaacttttaaaatatgatttccatcttcccgttggaccctttccagtgtattaggtctaatttttggaagtgccaccctaagatctgtatagcagtactgctcttagggatgattcacataaatatgtggtgtttgcgctgtgatgatacaaatttaggacagaaatagaacccacccctagatcaagtctgcagtattgttctcagcttatgcgtgcatctgtcttgtgtctatatgcagatgaggcaacgtgttatgatgatgggaagacataccacgtaggagaacagtggcagaaggaatatctcggtgccatttgctcctgcacatgctttggaggccagcgggtaagactggatgtgccaggctccctacaagttagataagataaagggtgggctcctgcaaggatgtgtcgtacacacaggaggggcagagacccttcggaagtattaaaataccacatttcctgttggcatacaactgctgacatagagctctagagcagctctatgtctaccttacatgccattcattctttctattactcttagtagaaagaatgaatgaatggcatgtagagtaccaaaaacacaagtcttgagtcattcttaatagcaacacctgtcatttatatgatgttagaatcattttcctaagctccctagcatgtcagagatactatttacactgaaaaatagtgaagcagagatactattcaaattaattagtggtaaatagaatgtgtttcatttcagccggttctccccatcctgggcagcctgagaccctcccctcccctactattctcaggctgcttctatttttcagcaaagtgttaagtgcagtgta

SEQ ID NO: 98582 - DNA, 2883 bp, Homo sapiens
tgacccagtctcttgagaactcactgtcataaagagggcaccaagccacaagggatctgcccccatgatccaaacacctctcaccaggccccacctccagcattggagattacaactcaacagagatttggacagggacaaatatccaaattatatcacagcacagtaaccattggaccaaatcaggcttagattctagtcttctgttatatcaataccttgatgtatgccttttcaaaagtcaggtaaagtgtcaaagttttatcatttataaaagagggatggcattgtacctgttgagagaaaatacaaaatacttgccgtaatattagacacacacacacacacacacacacacacactctctctctctctcacacacacatacacacacacacacacaaaattgttagctggccatgttattgtaactcctaccacacatatttttacattataatacattaataattttaatatttattgaagtatttgtagatactataaagccagccctgggaaccactggtagtatctataaagcttttcagctcttcaaaataaaatgtctgagaggtagatattttcctattttctaattacagttgacctttctctctgaatgccaaaggagataatctacacattactagttatatatttcttgaaatggatgaatttgatatataccaaggaaacgttttaaaataccaaaactttacatggatgagccaagcaggcactaatctctagctatgctcctgtgcagatgtcagcccaccaagaagggctcgtgtgacagatgctactgagaccaccatcaccattagctggagaaccaagactgagacgatcactggcttccaagttgatgccgttccagccaatggccagactccaatccagagaaccatcaagccagatgtcagaagctacaccatcacaggtcagggaactcattgcactaaccacatttgttaacaaatacccacaatgtaaacgggcttattaactgttctacgactgacactgataaaatttattttcagtgttatcatcataacccagttttagaacgttattttcatgctatgatcagaaatagttttgtcctttgaatgcctgattttgtgtaatatttgtcatggaaattgcgtaagtgtcaatcaacaagtttgatcttccatcattgtgccctttcttatttaaaaaattgtaacataaggtttaaaactaaaagaaataaaaaacagtgatgtatagatcttagcattaaaaagcatagttaatataaaagtaaacaataccacttaataaaggccaaaattgtaaccgaagaatattcaatatctgaggtcttttttagctttttaaaattgtgattccaaggctcaactattgaccatctgattacggtaaagagaaaacctcaataagtggctgacccccattctgcaagagggcctcttccaacatagcatttttgcattccagaatttactttaccagtgtccttgtctgtatcagtgattcactttcgagatatgtttcttgttaacagttaacatccatagcatgctctactttactgttcaaatgtggaccactttggtagtctatataaatatgggatgatagaagaacccagaaaaattgcaggctagcttgagaattctcctagtaaaaagcaagaactgttaaaaatcatctcttctcaaatcccaggtttacaaccaggcactgactacaagatctacctgtacaccttgaatgacaatgctcggagctcccctgtggtcatcgacgcctccactggtaactataccttctactgaggaaatgccattgacttgtatgcaatcagtttcatgaactcaaaaaacaaatgtgaggcgtatatttttgtattatagattccagagaatcttgtttccggtttacagtattctcagattcttttaagtgtgtttagaacggctcgggagaaaagtgtgggagtaattttcttggttatttgccttcttagagacttaattttgttttctttcagccattgatgcaccatccaacctgcgtttcctggccaccacacccaattccttgctggtatcatggcagccgccacgtgccaggattaccggctacatcatcaagtatgagaagcctgggtctcctcccagagaagtggtccctcggccccgccctggtgtcacagaggctactattactggtattgctgcttccatgctgtcattttccttcttactacctaggacacatgaagtccttagcaaactcccacagcgtctttgatactgtgtcatgagaatgcgaaactctgttcctgataacctcaaaaagcattctctgtgtaggagtggtagagcctaatacatcccaaaaggcatgagtgaaggaaaatgcaatttcaagactgtactaatggcatgactagactcatgttttcctttcgctgcaagtttgccagatacctgtcaattcagtcctggagaaagatatttttcaaagcatactagctgattgtgattctgtcattacactcagctctctatagatatggcaatcttgcaggacttgccagtgcaccacctgccattgaccttgttgaccactatcacaggataggtcttgaggcagagcagtcccaaccacccacattggaagaatgcctggaatggggaataagagttgtctaccttggtgggaaagactataagcctctagtattatttttgcccaagagatgaaatatttaaactatctgtattagtctgttttcatactgctataaagaggtttaattgactcacagttccgcatggctggggaggcctcagaaaatgtacaatcatggtggaagga

SEQ ID NO: 98583 - DNA, 5079 bp, Homo sapiens
cccttctggttttgtttatcattcacactaagaagagataaatggcctaactgactttttcagctctttttagctatgttgtctttgtttttaaatagaatacttgtgaaattaggatcttaaggcaatttattagagtcaagttaattttcattttttctgagagcagtatcactaattgttgggggcatcatattaagttttagatcttatccttgagtgtgacttcactcccatatggtaatttgtattagcaatgaacaggtttgtccaagaggaaatcaaagtctgactctccatatttttgttacaattctgcaaataaaaattctaggccaccatatgtttactaccaaactctagacgccacttgaggactttatagtggatgacgtggatgttgcatttgcttttcactccctttgcagatcaaacagaaatgactattgaaggcttgcagcccacagtggagtatgtggttagtgtctatgctcagaatccaagcggagagagtcagcctctggttcagactgcagtaaccagtacgtaaccactgcttggtttccattttcaaagtcaaattttgttcttgggtgtctgaatgcccacgacatgtcttttgcaattacacatagggaaagtgaacttgttggttagtttatgtcttgagctgagccctttacgaacatcttttttccttctcagtgccaagcgaggaatttacagagaaagaagttgtgaaaccaccatagttagttgctgtgctttgaatttcttttgctcaaatggcctcagcgaaatcttatttgcctatagcaaatctacaaaaaattttcctagaccgtcttttctacaactggatggtaaagttgattgaagtgtgcctcatgtagctttatgtttggggcatttgaagggctatggctggaccagagtgtaatataaatgcttaatagagaggggaaaagaagagtgtaagaaccattatagggctgggctcacgcctgtaatcccagcattttgggaggctgaggcaggcggatcacgaggtcaggagttcgagaccagcctgaccaacatggtgaaaccccatctctactaaaaatacaaaaattagccagtcgcggtggcacgtgcctgtaatcccagctactcaggaggctgaggcagaagaatcacttggacccaggaggcagaagttgcagtgagccaagatcatgcctctgcaccccagcctaggtgatagagtgagactccatctcaaaaaaaaacaaaacaaaacaattataacaatttgaatctgacattgcaaatcagctttaccacttccaaggtatagaaaatccaggtctatgagactaacatcacattgtaaaaatcaaatcgtggtagaatatctttaaattaatataaatacatccccattgtggggacattttgcagggtatctgcttatctcacatacacctatgttttaataagtgatgcaacattgcatattttctaaaccaagaaaaattaagcaagtgtttaagtgatttttccttttgatagtgggttaattggacttcatcaaagaaaatggtatctgcaaaactgctttgcatgttataaaaatgcttatttcacaacttgcttttcacataacctcttaccattaatttgcctaacagacattgatcgccctaaaggactggcattcactgatgtggatgtcgattccatcaaaattgcttgggaaagcccacaggggcaagtttccaggtacagggtgacctactcgagccctgaggatggaatccatgagctattccctgcacctgatggtgaagaagacactgcagagctgcaaggcctcagaccgggttctgagtacacagtcagtgtggttgccttgcacgatgatatggagagccagcccctgattggaacccagtccacaggtatatggttaattgcaccaccaggtgcccatgggagcagcggctttatgccctactgaatgaattatgcttcactgggctattgattcccgtgtaagggtgaaaaagaattattaggaaagatcctctttaaagaggaatggtaagaaacaataaaacttaggtgatatttaaggaaacaagtctgattaaaagaaattttggagtatcctggcttatacacaagaccataaagcaagacatttgaagaggatactaaagttgtggattatttcctaagctctgactccctgtgattaccctcactatgtataaagaaaagaagtttggcattacagagcttacttataaaaaggaacccaaactcgggcatttcatagcagcatgattctgagcacacgtgggtaagacctttcttctctggttagatatcatatgctggtgtataattagcttaaatgattgtgatttagacacctaggaaataatcaatagggcaattgctttccataatactttatcttcttgtgctttatttctgaagcagagtagaatgctaaagatgtatcctagtgacagcataaaccctagaggtgacagtctgtattattgcttttcgcttctcttttctgcttctgttgggagccagttttcttcttacgccgcattacagagagaacgtcaaatttagcagccatatctgccatagggtccaaataaagagacaataaaaacattattctctcttttttggatggaatactgcgtgaaatggttatccatacaaagatactttatgtagaatagaaaaaggaggccgggtgcagtggctcacacatgtaatcctagtgctttgggaggctaagccgggagcactgattgaggccaggagttcatgatcagcctgggcaatgaagtgagaccccgtctctacaaaaaaatatgaaaaaattagcgaggtgtggtgacacatgcctgtagtcccagctactcaagaggctgaggtagaggatcacttgagcctacgagttcaaggctgcagtgagctatgataactccactgcactgccgcctggatgacacagagagaccgtttctaaattaattaattaacaattttaagaaagaaaaagggccattgcttatttttccatacaaaagtaaaataaatcataatggccaataagccaatgtaacttttttttttaagggaaagcaaaacttgtaaaacctaaaatctcttagagttttggcatttacccaaatgttttcagtgattctgagaattggtggatataaaacacatttctcagcaaacactttcttcattttgcatcccttactgtacgtactttcttgtactgaatctttgcttgaccagggaacccacctagcccaacaagaacaatccattctacttcttggaactcactttattttccttttcccccatttcctataagataacctctaaccaatgacaatctcgacagctattcctgcaccaactgacctgaagttcactcaggtcacacccacaagcctgagcgcccagtggacaccacccaatgttcagctcactggatatcgagtgcgggtgacccccaaggagaagaccggaccaatgaaagaaatcaaccttgctcctgacagctcatccgtggttgtatcaggacttatggtaagacatgaccgttgttcattggaataaagatggagatcatctctaacacagtttctaaggtggtgaaaatataatatcataataaatctaactgttcttttcctctgcatcaaataatcttattgtaattttatatcaacggaattcctttatgttgacctaagttttccagatgactattgggacagaattttataaatagctttggattttgtgcagctcttttagatgtattgtgcttattttaaaaggttgtggggggcaatttacatatccattggttgaatgcataaatcgacttagttatgcattttctgagctctgttaccttggtaaagaatattttacagtttgtaccagtctaccttgagcctaccctcattaaaacattttaaaatccttccagacatacatgcagaaaactgctaggaacctaggggactgatgtacctcttaacataaggccaatttcaggggaaactacagaaagagggttcagagacaaaatggaacattctctttgcctctctatgataaggaaaaaattatgatttacacctgtcagatcataaaaaagaaaaatacgctaatacccacttttctcattttttttaccagcttagtttaagtatataatctatggcttacttaagcttaaccgctaagagcattttaaaattgataaatacatttatcacctgcactgtaggaatgaaattaatctaggaattttcaaggttgtgggttttgctggtttgtttattttttattttctaaccattgcatttacctaatgctgtagtgaaactccttgggtttcagttgaggacgttgctaaagctcaccatgcccttatttctctaggtggccaccaaatatgaagtgagtgtctatgctcttaaggacactttgacaagcagaccagctcagggagttgtcaccactctggagagtaagtaacaaaatgtcttcatatggacaaaccttctgtatagacaaaaattaaagaatggtaaatcagtggggttcagtggctcatgtctaaaatccaagcactttgggaagctgaggcgggagcgtcacttgaggccaggagtttgagacctacccgggcaaatagcaaggccctgtctcttaaaaaaaataaaataaataaaataaataattttttagatttatatgttaacagtggaatgagtcctaatttgaaaatcaatttgattgcctttttgacgcatgactgtcatcttttatactccttcagaaaggggtctactgacccataaaatggaatcacttcataagcttataatgttgatattatggactatgactgacatctagtttatgctctacttgttagaatttgttttcatagagctaagcttggggagaccccactggcttctgctatatcttaacaatgcatattaggccattcttgcattacta

SEQ ID NO: 98584 - DNA, 1435 bp, Homo sapiens
gaagatgtgatttacatgctgctataaatgtggtaattcaattaatcagtaatacccaagtagctctaaacccctcacactctgaactaaccctttttcatacaggaggaaatagccctgtccaggagttcactgtgcctgggagcaagtctacagctaccatcagcggccttaaacctggagttgattataccatcactgtgtatgctgtcactggccgtggagacagccccgcaagcagcaagccaatttccattaattaccgaacaggtacaaacttctactctggggtgacaccagcttttacttattcagatactgttttgcaatgttctcccaaggtatttttctaattgtagaatagattttcctttttaatgagcaacaacctgcagctagcacctgcagcgaacagagttttgagccagataaagaaggaagcaccccaagggcaggaagttcagtcagttttgtcgatatattccgcatgtctgcaatacgacaggcatagagagtgttcagtaagtatttgtgggaaaagaatggatgagttgataaagtaggaagagacacctgcttgtggaatgtagcttctttgtgaatgaagcaaccatctcaaaaataggaaatggtattgagatgcctgccccatccctctaaaagctctctctgtattctttcgagaagaaatacctttctcatgtaagcgatcattcgaatatgtaccagacctagagaggaggacttgtccaatcttgtctccaaggactggggcttcactggtttctccctgcttttatttgtagaaattgacaaaccatcccagatgcaagtgaccgatgttcaggacaacagcattagtgtcaagtggctgccttcaagttcccctgttactggttacagagtaaccaccactcccaaaaatggaccaggaccaacaaaaactaaaactgcaggtccaggtaagaatcatctgcatctcggccaggtgcggtggctcactcctataatcccagaactttgggaggctgatgcgggcagatcacttgaggttaggagttcgagaccagcctggccaatatggcgaaaccccgtctgtactaaaaaatacaaaaaaattagctgggcatggtggcttgtgcctgtaatcccagctactcaggaggctgaggcaggagaatggcttgaagtctggaggcagaggttgcagtgagccaagatagccccactgcactccagcctgggtgacagagtgagagactccatctcagggaaaaaaaaaaaaaaagagtaatctgcatctcatatacaacaggatagatggggtaggaccacctaatattcttttttatataaatggctaccttgttgtgagtactatgtatttttttgtcctatgtcatcattgtccccattcatgagttcagggctcaag

SEQ ID NO: 98585 - DNA, 1186 bp, Homo sapiens
tttttttttttcttcctgaaatggagtcttgctctgtcgcccaggctggagtgcaatggtgggatcttggctcactgcaacctctgcctcccaggctcgagcaattctcttgcctcagcctcccaagtagctgggactacaggtgcccgccaccacgcccggctaatttttgtatttttagtagagatgggattttaccatgttggccaggctggttttgaactcctgacctcaaatgatccacccgcctcggcctcccaaagtgctgggattacaggcgtgagccaccacgcccggccttgtatcacttttttttttttttttttttttaacttttctgtagttttgaaatttttccaaataaaatgttgagggaaaaaaactcttccccaaatttgaaataatcattttatcacaatttgaatgggctctgtaaccccttatcttgaattcgtcataatataaaattctgctaattacacgtagtatttacatgattgtatggaagaatcattaagacaattatctggaaaatgaacaaacagtaaatctgaatattgtttgaaaattacggatgtgaaaagtttcccttttttttctagtttctgatgttccgagggacctggaagttgttgctgcgacccccaccagcctactgatcagctgggatgctcctgctgtcacagtgagatattacaggatcacttacggagagacaggtacagcagtaaaatgctattttacactctgattaaatcagattctgttgtggataacctgaaagcccaacagtgaacaaagaattaaagaaactttggcaagtccattcaacggagcccttgttttttccaagaaaatacgtaagatatagatgatataatttgttctaaaacccaaataaaaagttgtttatatactacaactagagggggaacggcagagctgaggaaataaaaggattgtaaattcacaaacatattatcagtggtggaaataagtgatttttattttttcttctctttacttttctgtattttccaaattttatttaaaaggaatgtattctgttaaaagttttaaaaaggacacaatgcatgcaatcctgggttgagggcttaccttctcccacttctaatgctactctactactcagtgacattttaaagctgaaatgttaaaacagcgc

SEQ ID NO: 98586 - DNA, 1340 bp, Homo sapiens
gttttgtgtttggcatcattaccactctgttgacatataaatttcctcttgagcttaggaggcttctctgagagtcaaacatttactttgagagtgggcagatcttgctttacttggaaggatacacttacaggatagaaacacagaatacttgaacactgaagaatttgaaaatgtcaattctcagaagatcttgaacacttatctccaaatgtgacacagaaacttactgtaataacccctaaaatctgcttgaattacttagcacaagaaaaaaatgaatgcttgagctggctattttgaattgagtcaatttaagattttaaaattcatatgtagcttagaatcagtacatcttactctttggtttatggcaaatcatggtattgatgagacaggaacgaaatgttggatgtacgttaatttcccctacaccttcctcacttcctaaactggtggtgtcttttcttttttttttctcttcctcccccgggtgggaaaaacaggtcttgattccccaactggcattgacttttctgatattactgccaactcttttactgtgcactggattgctcctcgagccaccatcactggctacaggatccgccatcatcccgagcacttcagtgggagacctcgagaagatcgggtgccccactctcggaattccatcaccctcaccaacctcactccaggcacagagtatgtggtcagcatcgttgctcttaatggcagagaggaaagtcccttattgattggccaacaatcaacaggtaacttttcttgtctgcaaagaaactcagaagactttcctacccagttggtagattctgtaaagtagcttgctgttgtctgtcatcagctctcaaaaaaaaaaaaaaaaaaaaaaaaaatagatcattgtcatggtacatggagagggaagtgagaaaatgtggagaaacatcttccttagaatatggtaaagaagcccgggcgtggtggcagtaaagaagataatttttttcctctcaagaaatttctcacctgatttgggtatttatgcatttctaataacacaagttttgttgaaaatgtagaaaattggccggacggggtggctcacgtcagtaatctcagcactttgggaggccgaaatgggcagatcacttgaggtcagaagttcaagaccagcctggccaacatagtgaaaccccatctctactaaatatacaaaaattagcaaggtgtggtggcatgcacctgtaatcccagctactggggaggctgaggcaggagaatctttgaacctgggaggcgaaggttgcagtgagctgagatcaggccattgcactcca

SEQ ID NO: 98587 - DNA, 1226 bp, Homo sapiens
aaaatattctgctctcattttaatatggcagaaccgattgctttctaagtgtggcttttttccagtaaaggttaattattaagaccactagtcctggcctgggtcaatcccagtatgatcctgggcaagtaaattaaagaagataacttctctgtgcctcagtttttttttgttttgttttttgttttttcatttacaaaatggagataattgtagtaaatcaaatttttagaggtgataggtttgttcatttcttgaatgcggtgatggtctcccaagtcacacatatgtaaaaacccatcactttaaagatatgcagtacgttgtatgacaagaaattgcttttaaaaggagcaaactaccttccagggttgttgtgaggcataaatggcaatccacagcaccacagcaaggattatcatgtgccctccagagacatactctcaggtggatgcgagaaatatccagctgttgcagcaacttcatcccactcgaaatccagctgagtcacactcacaggtggaatggagggcttcgagaggccatggggcaaggtgacccttccttatcatctaattacagaccttctcaaggtctgttcactgaacacttcgctgtagtgttcacttaggtgtaagtaggctataggactggacatttggatatttcatcagttcaaatagtcctgggcgtgctttagtttctcatgcttttgagcagagttttaaaataagccccatttgcccctacagatctcctgcctggtacagaatatgtagtgagtgtctccagtgtctacgaacaacatgagagcacacctcttagaggaagacagaaaacaggtgagtggtgttggcagtatgactatccagtagcttttgcctatcaattctgtataacaaatgaaatgctacttctaaaaatacatctccattttttgttgtcatggtgtgtgtacctttgtcatcacagtatgattttatcgctggtctcaaaaactaaaagataccttactcaacaatcacctagactttcagtcactaacaaattaagaaatttgttgtctgtccttttaaaaaacattttctaagaagatctttgttatttagatttagcagacattccttttcattaggcagctctgtctaatggctgacccaacactcattgtcatctatttgtcttcctttactaagccagcaagtttacattttctttttacttaa

SEQ ID NO: 98588 - DNA, 4002 bp, Homo sapiens
gcaggtagaaaggaatattcctcagctgtcttcaaatgattcattaaggaaaagcagggtacagtgataggaccatgagatttggaaacaaagaaagctttggggaatcactcccctggttcaagatttcctttaaagtgaggatcttggcggaggttgaagtgagccaagatcacaccgctgcactccagcctgggtgatagagggagactgtctcaaaaaataaaaataaaaaaataaagtgaggatcttagtactgcctgaaaggattgttgcaagcattgaataacagtgacagtggagtcctcagtaaatgccaagtcctgcattccgccctgtgaatccatcattggagtctagttaaatatgctctggctcacagatcctctgtgcaataacttcccttttcttttttctccagacattactggttatagaattaccacaacccctacaaacggccagcagggaaattctttggaagaagtggtccatgctgatcagagctcctgcacttttgataacctgagtcccggcctggagtacaatgtcagtgtttacactgtcaaggatgacaaggaaagtgtccctatctctgataccatcatcccaggtaatagaaaaataagctgctatcctgagagtgacacttccaataagagtggggattagcatcttaatccccagatgcttaagggtgtcaactatatttgggatttaattccgatctcccagctgcactttccaaaaccaagaagtcaaagcagcgatttggacaaatgcttgctgttaacactgctttactgtctgtgcttcactgggatgctgtgtgttgcagcgagtatgtaatggagtggcagccatggctttaactctgtattgtctgctcacatggaagtatgactaaaacactgtcacgtgtctgtactcagtactgataggctcaaagtaatatggtaaatgcatcccatcagtacatttctgcccgattttacaatccatatcaatttccaacagctgcctataaaatagttttgtccctgtatgtgagcactgaaacagcatttggttgacacatctagtttttcatcttgcagtttcaaatccttctttttgaaaattggattttaaaaaaaagaagtaaaagtcacaccttcagggtgttctttcttgtggcttgaaagacaacattgcaaaggcctgtctaaggataggcttgtttgtccattgggttataacataatgaaagcattggacagatcgtgtccccctttggactcttcagtagaatgcttttactaacgctaattacatgttttgattatgaatgaactaaaatagtggcaatggccttaaccttaggcctgtctttcctcagcctgaatgtgcttttgaatggcacatttcacaccatacattcataatgcattagcgttatggccatgatgttgtcatgagttttgtatgggagaaaaaaaatcaatttatcacccatttattattttttaaccttcttcatgcaagcttattttctactaaaacagttttggaattattaaaagcattgctgatacttacttcagatattatgtctaggctctaagaatggttttgacatcctaaacagccatatgatttttaggaatctgaacagttcaaattgtaccctttaaggatgttttcaaaatgtaaaaaatatatatatatatatattccctaaaagaatattcctgtttattcttctagggaagcaaactgttcatgatgcttaggaagtcttttcagagaatttaaaacagattgcatattaccatcattgctttaacattccaccaattttactactagtaacctgatatacactgctttattttttcctctttttttccctctattttccttttgcctccccctccctttgctttgtaactcaatagaggtgccccaactcactgacctaagctttgttgatataaccgattcaagcatcggcctgaggtggaccccgctaaactcttccaccattattgggtaccgcatcacagtagttgcggcaggagaaggtatccctatttttgaagattttgtggactcctcagtaggatactacacagtcacagggctggagccgggcattgactatgatatcagcgttatcactctcattaatggcggcgagagtgcccctactacactgacacaacaaacgggtgaattttgaaaacttctgcgtttgagacatagatggtgttgcatgctgccaccagttactccggttaaatatggatgtttcatgggggaagtcagcaattggccaaagattcagatagggtggattggggggataaggaatcaaatgcatctgctaaactgattggagaaaaacacatgcaagtattcttcagtacactctcatttaaaccacaagtagatataaagctagagaaatacagatgtctgctctgttaaatataaaatagcaaatgttcattcaatttgaagacctagaatttttcgtcttaaataccaaacacgaataccaaattgcgtaagtaccaattaattataagaaatatatcaccaaaatgtaccatcatgatcttccttctaccctttgataaactctaccatgctccttctttgtagctaaaaacccatcaaaatttagggtagagtggatgggcattgttttgaggtaggagaaaagtaaacttgggagcattctaggttttgttgctgtcactaggtaaagaaacacctctttaaccacagtctggggacaagcatgcaacattttaaaggttctctgctgtgcatgggaaaagaaacatgctgagaaccaatttgcatgaacatgttcacttgtaagtagaattcactgaatggaactgtagctctagatatctcacatggggggaagtttaggaccctcttgtctttttgtctgtgtgcatgtatttctttgtaaagtactgctatgtttctctttgctgtgtggcaacttaagcctcttcggcctgggataaaataatctgcagtggtattaataatgtacataaagtcaacatatttgaaagtagattaaaattttttttaaatatatcaatgatggcaaaaaggttaaagggggcctaacagtactgtgtgtagtgttttatttttaacagtagtacactataacttaaaatagacttagattagactgtttgcatgattatgattctgtttcctttatgcatgaaatattgattttacctttccagctacttcgttagctttaattttaaaattacattaactgagtcttccttcttgttcgaaaccagctgttcctcctcccactgacctgcgattcaccaacattggtccagacaccatgcgtgtcacctgggctccacccccatccattgatttaaccaacttcctggtgcgttactcacctgtgaaaaatgaggaagatgttgcagagttgtcaatttctccttcagacaatgcagtggtcttaacaagtaagcagttgaatgtatctgttccataaatattaacctagagcatagcaaatgaattctaaattctcaagtaggaggagctaagagcaagagagctgcaaccaagctacaaactaaactctgaattcaatgcacagctccattaattttgaaagatgtaatgtttgttgctatcttaatatacttttgatatctacagctttaaaaaaatcatagtggaaaaacacctgcaggaaagttccatgacttcaaacaaattctgcttctaaataagcacgtaaaaataagtgaatatcaagagaaattatatgactaaatctaaatctttagagaaaaaaatgagaactgaaaatagtgtcaccatatgtgctttattctcatttttataaaaaaagtgtcagcagttgattgatttaggatttgaatacttagaaaagtgactgattgtttggtctagattagaatgttgttgtgaagagagtcagaagtttaa

SEQ ID NO: 98589 - DNA, 3627 bp, Homo sapiens
agttaagattaaggtttccctgtggatatctggattcatcttctttaaagtaatgatattagggaagcggtgaatacaaatgaatatgtttaaaagaattccattctttggcatttagtgtgaagagagaaatatttgttatcgctggaaatcatgactcaatccccttgatcgtttaaaaaaatacaccaaagataaagtttgtaaatggccatatttatgattatgctactcaaatatagaagaactttctgaagagtgccagtataccttttaattcccttaataatgtcatgctgactttcagaagccttatgatgtgtgaaggatctctctagagttgaacactattggataacagtgttacctaagtttttgaaatagaatcttaaaaggattttaaattatgggcatagttattctaattcttctcttgtaatgtatcatcctgcagttgaagctatgtacatatctcttcaaaaggtgtgtttttgcaatacagttgctacaggggctggtgcctttaaatggcaactaaaaggttaattgaatgtgaataactcgttaaagggagagctcagacattccttctagcacacacacagaaaaatagaaatgaactaccatgtgacccacagtccctgtatacgtctggtttgtaacaagagattctttatcaagcaaaacagtatgtaatgacatttctctggaaccttccattacaagccaccttaatgcagtttggaagatacctcccccacctgggggaatttccagctaaagtatataaaagagtccccaaatcatttcccaataaaagtacactgtgcagtttctgaagagtttacactatttaaagcataatcatagcctcacagcagtaacagtcctctggaaatatttgtccttggtgtttactttgcattccttcctctagctgggtgtacgaccaagccagggaggagaggcaccacgagaagtgacttcagactcaggaagcatcgttgtgtccggcttgactccaggagtagaatacgtctacaccatccaagtcctgagagatggacaggaaagagatgcgccaattgtaaacaaagtggtgacacgtaagaagaattttttcccttttctattagtttttaaaactgttctacttttcgaaaaaagctagtgtcaatatcactttttacttatgagaatggcacaggggagatatcttatccttacttatattattaatgctattcctgaatttggagtagcaggttcaattcatgctttatattttatggcatcagaaatgttctttccatgtcaagaatatttatgaactggcaagatgaaaataatttcaatagtattgcaaaatcattaatcataaagaagtctttgtcagagaattactgctgtccatcatattttcataatgtaacctatatttttatgggagggagggagggagggaagaagcatggaagagagggaggtagggaaggaggaaagattacacaggtcaagagctttgtgtcagctttgacttttaaaatgttctttctgcatagcattgtctccaccaacaaacttgcatctggaggcaaaccctgacactggagtgctcacagtctcctgggagaggagcaccaccccaggtaagtttgggatggatcagagggcaagtatacaccataccttcccaagacaaagattttagaaactgtgtttctttcagagaaagaagggattcaaattacaaatgcttagctctccataaaaactatagcagtacatgatgtacatcatggagcagcctgcaggatgctttaatgcacgttgacttcaatcacaggaagcagaacaaccttacactagtctagggggacaagacagatcctcacacagctgtagggctgaagaaaagcactgtggaaggtggcttttgctgagtgcattaaaaattgccaaacaaatggttgaagtcatattacgtaatttcccttttgtgagttgttacagagcctaagtttattattccctgaagttttatgaatgttttgtcatgggttgcaccacaaatatttaagggtgatgaaaggcagaaataccttcattttacagaataagaaaactgagacttagaaaaaattggcctactcatagtcacacattttaaatgttacaaaactgggattgtaacttaagtttgtagactccttctcacacccaatgtcacatatttggaatgtaatttttttttaattatattctatgcaaactgaaaattctgattaaggggtttcctgaccatttttagagctttaaatgaagcatttgtctaaattccttgttcacatatatttgaaaattatttataaaatgctaaaatgtataaagatagttgttaacaatattcaaacagcatgacgtactatagcaataacaggaaattttagatacccattacttttgccaaaaccacatggaagtctcaacaaacctatggagaaaaatcttaaacaaaaataaaagttccaattaatgttgattgcattcttacctcatatacttgttaatttaagggatatgtttaggttattatttagctatttctaattttactgtaaaattcttgtgaaatttttgtttaaaaaaaagtattatatagttcttatctttgccggggcacagagctaaggctatcatctctaaatctgattaatgtatgcaaacacacagaatgaaactagctcagaatatctcttttaatctccctctgaagtagagtgattttggtaaagttttcattatctgcggaaacattgtttaagccaaagctatacaatttccagctgagttgctctgaatttgaaactttaagttgacaatcttcgtgcttgttagcagcaggatcattaatatctcgtctcaatggcccagcccacacatatggatgaccactagcaagtgtaatgatctcaatatttatttctcattcagttgggtttccttgtatttgccacattagtgtttaccctgttcctaatggcaaaatattctgtcatctccttgccttttataaagtttaatatactttctcattttaatctgtccccacagatctctagtcatcactgtttttatttgaatgtctctcatccctctcaactcttttactgcccaatttctgtgattcctgaagacttcaacaatcaatactctctttttttgtttgttttgttttttttttttgagacagagtctcactctgtcacccaggcttggagtgcagtggcgccatctcaactcactgcaacctccgtctcctgggctcaagcgattctcgtgcctcagcctccccaagtagctgggactacagacatgcgccaccaagcccagctattttttagatttttagtagagacagggttttaccgtgttggccaggctggtctcgaactcccaacctcaggtgatctgcctgcctcaacctcccaatcaatactctttctagaataagtatcagcacttttgtttctcaccttttctcctttcttggttctcttcctataaatcccatagtttcagaccttttaaattaggagagctctctggggaatgtgcttaaggtgg

SEQ ID NO: 98590 - DNA, 1180 bp, Homo sapiens
tcctgacctcaagtgatccacccacctcggcttcccaaagtgctgggattacagtcatgagccaccgatccccgcccagcataaagctgtttttagatcaccttctataatttaccattgttcttaaattaatggttaagaaacaatatgataatcagtttgtggtggccagttttacattttataagggattttacactgacgatatagggaaatttattgtcatcaaagtcaaatcccaacaatcataaaaagacatgaattagattatataatttcaatgaaaggaccaccttagcaaacatctaaccccttgttactcaggtatcattcacgggccagcagaattggtattatctgtgtttgtcagaaatgcaaactccctagttttttgttggacctccagaaacagaatctgcattttagccagaccccagatgatgtgtgtggcacattaaagattgagaagcctgatcctctcccaattctcacccaatgaaaaaatatgttacatcctctatccactgcttggttaaactgaggttctccataaaaatacttgttatctatatgctatgcaatcatctgtgagtttgagttttgaatatgtgcattgattctctctcacagtgcagcctgggagctctattccaccttacaacaccgaggtgactgagaccaccattgtgatcacatggacgcctgctccaagaattggttttaaggtaaactgcagatgttcctaatctctgtgatacagccctgagctgtccttgtggttcccatgtagtggaaacagggtgctcaggagtcaggagacctgggttttgtcacctgcttctgtccatacatctttgactacattgtcagggcctaacagtccttccctgcctacctcactgaattgttggaagggtagatggaggctgcgaaagtgttttgcaaaggataaaacattagcacgaagctgctgcttattgttatcttattttctctatcctttcctgcagggaattacatttcaaaaaaacatgggaaaactttatttgatgtgttgttctaaatgagtgtgaacaagttcacaaaagccagtttagggagaccagttaaactcagagtcacttaaaaatcgcattttcatccaatcagtttcatctccaactgttcaaagcactgaggg

SEQ ID NO: 98591 - DNA, 3029 bp, Homo sapiens
cttatgtgattctgatagtgcaaactcaccagtatcctaccatgaatctgaggatacgttatcattactgtaattactgtctaatctgaaccatgtgaaaataacttttatttctctagcaaagggctattcacagaatattgcttttgacccatagagagcttcttcttgctgtcattttaggaggcatatccctttttccttaatctgtttggctcagagctaactgtgaacttcagaagtgtttgttttgcctttttaaaaataccattgctttaatgtaactataatttctgagactgatgcgaaagtcttgctggaaaattagacttcccaaaggatcacagtcaagcaaaatggttccacaatttctcatgactggcagagttttggcaaagttttgtgtagcactcaatctcttactggctcagtttttccagggttttgactttcacatagttacaaccttgaggagagaaaacttagacattcaatcaagtttcaggacttgagttatgatcattactgatctaaatatttcttggcatgtttcatcttttttcctagaactggatgctcccactaacctccagtttgtcaatgaaactgattctactgtcctggtgagatggactccacctcgggcccagataacaggataccgactgaccgtgggccttacccgaagaggacagcccaggcagtacaatgtgggtccctctgtctccaagtacccactgaggaatctgcagcctgcatctgagtacaccgtatccctcgtggccataaagggcaaccaagagagccccaaagccactggagtctttaccacacgtaagctgaaaattaagtgccttttcttaactatatttacattctctattcttcatgctttaaaacaaaacaaaacaaaacaaaaaaaacattaaaaaattagtacataatttaaatcagtgatactaaaaatgtgctccatagactggctgctggcccgttaattgtttgctgctagtctgcaacaagaaaaacggttgtgccagaacgtaaatcacaaagcacactgcttagtacagctgagaatttttctgaagccagattttcttgatgaaggaagcagtgtgttaatttgcacacattgccaagctcgctctttcctctagggccagcactttgagtaacatgggtttaaagcagtctgttattagaaaaattaaattcgattacattaaatgaatttaccaaacactagttaacgcaagaaaaaattagcacctatgtctacattctattactttgggcattgaatagtaactataaatgcagaataaaaatatctatggattgaatgggaaccaactaattgaacatgaagccaaggaaatgatttctttatgagtgttggctgcagaagattaaagtacttttgcagacggaatcgctcttttcttaaattactcttgaaattcctcagaggagaaaaatactaacaataatttttggtcatgtctatccttttgctcaacattttaaaggaagtggtcttaaatctcccacatatctacatcacaataacaacctctattcacaaaccgattcctattaaatacatttccatttacattacagagaattatgagactccttatttctagctgaacatcatttgttattttcaactcgacattttgaattatagaagcacctaacataagtactttttcagcatatattctaaccatggactagtttgcaattttctaagagctttcaacaaatgttactcttcgactaatttaaaagtatggatgttaaaaagcattcaaaaagtccatacaagcctagtttgtaaataactatggaattgatttcccaaagaaaatacaaacttttccccataagaattcatactttaagaaaaacttacttccatttaaatttactgtatgaagtttggctcatgaaggctttttcctaaataatagttaatcgtaagcaagtaaaattcacttttaatttgcaaataagcttacttgaaaatttggctaaaattttacacggttctaagatagtctaagatctactctcatgaaattaatgtctttatatttcttgtaaatattcatttcttataaatgtccttcagtgaattagaatggagatttcagtgaatgcgccctttcagtagatgtcgtcttttactaaaatgtagaattctatagttgtcttgttcattccttaacatgagacatattttatgtagtttcttttgttgaacacagtgcttataaaagaaaaagcatttttaatgatgctaacaataattaagggaaggtggtgggccaagatatttcaagtacttctgaagactgatatattggatatattattttatgctttgcataatacattcatataaaatataatgattttaactgaagtactgatagccaaaactaattttattagataaaggttaacatagtgtctggaacattgtatgctttcaaaaactatttggtgaatagataattgagaaaggaataataataaaaacagctaaatgaagcttatatttaaataaactaatgtaagcagggtattctacaactccatttgaactttaagcactccctaaggctgtaaacatccacaaggcttgcatgtttttgaaattactaaatttctgtagttttttactatcttactaagctgaattctgggagtaacttttctgagttttataacttgtgctaaattcttaagagcaaatgtgagaaaagttaggggaaaaagctgtttctggggaaaattcagcttagtcttatattgatagggcaaattttatttctttaacagctgggctgttcttccctaacaagacctgccagaacccatagctcacacttagaatcacatcctttgtttgacatcgtttgtgggtttgtggtttggtgattttcccataatggccttcccaggcagagagcatcatcttaaacttgggaagactctaggtggctggctcaagc

SEQ ID NO: 98592 - DNA, 3348 bp, Homo sapiens
agacaagaagtggtgttttcccatagtacattaataatcacagattaggtgggtgcggtggctaactcctataatctcagcacttcgggaagctgaggctggtggatcacttgaggccaggagttcgagatcagcctggccaacatggtgaacctccatctctaataaaaatgcaaaaaaaatagccgggtgtggtggtgtgcacctgtaatcccagctactcgggaggccgaggcagaagaattgcttgaaccggaaaggtagaggatgcagtgagctgaaattgtgccactgcactccagcctgggcaacacagcaagactctgtgtaaaaataataataataatcactgattagctattagcacattaccttctagtcgcttttccctatgaatatataattcttaaaatatccttcttataagctgtagagtcatttgagggactagtttgctctgattagttaccttttcttttcatttcaaagatcttccaagcacagccacttctgtgaacatccctgacctgcttcctggccgaaaatacattgtaaatgtctatcagatatctgaggatggggagcagagtttgatcctgtctacttcacaaacaacaggtacatgtgtgctacatagtgttaaaagaatctttttctgtaaaacacaggcctgtagtagcacttcctgactgtttgccccactttctttctttcttagcgcctgatgcccctcctgacacgactgtggaccaagttgatgacacctcaattgttgttcgctggagcagaccccaggctcccatcacaggtcagctaagcgtccccctctttggctgctatgttaatcttaatgacatcagcagggagggcgcagattctgactgcggacctgcatatcactttaaatctccaatataatttatgggagaggggtttgtgtgtgtgtgtgtgtgtgtgtgtggcgggggtgggggagttattttctatggcacatttccccttgaaaccatttcaccaactcccttatacacacacaccacaacatacacacaacctgtaaagccagctcattggcttattaaagcaagtgttcccagggttgaagaggtgtaatttcctgaaaacgttgctctaagatttatccttaaggagaaagctgagctgtcgtcttagctcattaggtgattcaactgcctcatcactgaagttccaaaaagacacacacagtgctagacaactctgcttaggctggttcattaattgcttccctcgtctggagctcaaagaggaaaaatcagcttaacatgaatattttcacctaatggcatctctaattgacatttattaaggatgtcaggtcttcaaggatgacatttattattaaaaaggttcgcatgactgttcttattttatcttcgtgctgaatagtcattattagaagaagtggcaatattcaaagagtcaaaaagtatcactggctcttcactaatcaagcaagatgctaagggatattagaaaagggaggatttatggtgtttctaagcctctgtctcaaagaaaacagtgcatcttacttttgctcatgaatctgcagggtacagaatagtctattcgccatcagtagaaggtagcagcacagaactcaaccttcctgaaactgcaaactccgtcaccctcagtgacttgcaacctggtgttcagtataacatcactatctatgctgtggaagaaaatcaagaaagtacacctgttgtcattcaacaagaaaccactggcaccccacgctcaggtaacttttttaagaagacacttcctatgttatcttatcaggattgttcctgaaggagggttgttttgtctctgtcaacagtcctctcattcaagaaatcttatatattagtttttccctaaacttctgatatttagctgaaatgtcataagtaacttatcaaagctggctactggcctttctgattaaaaactgacaccataacgtccatctacaaattttcccctagaagcttaagggtcatttcatttttgattcttaagtattataaaatgattcagtaaaacaaaaactgttacattattttctgcagttatttcaaaggctttttctaaaaaattttttagtatcttttcttataaccctctccccccaccaccatatgacacttcatatgctggtaactcacttattacctattttagataaaaggttcaaatgtcataatttaagcactatgactggaccatgaaaatgtgatctgattaagagacaaaacttagcaaaactctcgaatgagaggctcaatgaactgcctaacatatccaagaaactggcttcttaaaagtaatcttcagcagagaatgtgaatgaccagttgactcttgtctgtcagatacagtgccctctcccagggacctgcagtttgtggaagtgacagacgtgaaggtcaccatcatgtggacaccgcctgagagtgcagtgaccggctaccgtgtggatgtgatccccgtcaacctgcctggcgagcacgggcagaggctgcccatcagcaggaacacctttgcagaagtcaccgggctgtcccctggggtcacctattacttcaaagtctttgcagtgagccatgggagggagagcaagcctctgactgctcaacagacaaccagtatgtcttctcctatctctatctcccctccaaattctccaccctcacttgcagcctgtgagaaagtgcagtaaaccattcactcagaggtgtatggcttagagagagggaaatacccagccggcaagggaatgcatagtgaacacaaagcacattaaacttgaaaacaaaactcagacaagctccatggatgctaagtggtaacccatttctaaaatacatgtaccagctgaagggtactaagaggggagaactgaagagaatctaatttgagtgcatttttcgtgtaactaaatatatctagatcaaagttaaaatgcaggatcataacacttagagtagaattcatttaacaatagcaattgtcaagtgtctagtattactagccaccagcttatctgctcagtttttacaagcattattctcatatttactctttgttttgaccttaggaaggaaggtcttattattattattttatttatttatttttttgagatggagtctcgctctgtcgccagggctggagtacagtggcaccatctcagctcactggaacctctaccacctgggttcaagcaattctcctgcctcagcctcccgagtagctgggactacaggcgtgtgccaccatgccctgctaatttttgtgtttttagtagaaatgggt

SEQ ID NO: 98593 - DNA, 1504 bp, Homo sapiens
aacaagagcaaaactctgtctcaaaaaaaaaaaaaaaaagtgaaggtgcccagtgtctgcaactatgtcaccccgggcatatcacatatcactctgtttttccgtctgtaaaacgggagcaacaatgccattgccttatcatcagaaggatatggagactaaatgggagaatgtaggtaaacagcacagagtatgggtatcagtaagtaaactgcagcagtttgttgatgttaacaatagttagcattatatctaactatatctaacgatataaccattgggaatccagttttccatgattttcctctagaatggagctgcctaagtcctgcttaagtcatttttctttgaagattactgaacatcatcttcaaatgttcatccttgtaaacacgtgtgtgtgtgtgtgtgtgtgttaatttaaattttcagaaaaattctgtaggccgttggaaggaagctaccataccaggccacttaaactcctacaccatcaaaggcctgaagcctggtgtggtatacgagggccagctcatcagcatccagcagtacggccaccaagaagtgactcgctttgacttcaccaccaccagcaccagcacacctgtgaccagtatgtacacaaccaccctcatgcctcctacccccgaggttcctagagctaggctctcctgaggcaatgctttccttctcaattcatattcttccaggaggggcaccaacgttttttaaaatgatgttggcgacgaggacggtaaattttctagatgactgaaggctgactttcccctttctgtgactctctaggcaacaccgtgacaggagagacgactcccttttctcctcttgtggccacttctgaatctgtgaccgaaatcacagccagtagctttgtggtctcctgggtctcagcttccgacaccgtgtcgggattccgggtggaatatgagctgagtgaggagggagatgagccacagtacctgggtaagctcaatatgtcgctcaagacaggttcagggcagctgctggaaaactctccttgtgggggtgggtggcctctaggcaggtggtatctgtggtttggaactggttgacagctcagactgaacaaaccaccctctggcatgaggaagggaaggactgactctttctaagaagtggccgggtttttcccaagccactgtcacatgttcctggtccctgatgccagctgcatcatgcgcctacctgtgcacaagttcctacagcaaaagctgtgttcttggtggaagtaattaccaggactgcagctgacaatgtgagcacagtacggtcactcatacttttcaaattgttatggtgaggggcctttaaaaaacttcattggcgcactgaagtgtgtgccatcgtaagcactgagttcagtgaatttgaattcttataaagtgaacacaccacaagaccagcacccagatcaaggaaaagaatatctctctaccctcaccccatcatcttccgccaataa

SEQ ID NO: 98594 - DNA, 2823 bp, Homo sapiens
tttaaaaatgtgtttacatttgtaaggatcttcataaacagaaggggtaattcaaagataggcatggaattgacttatgccaattgattaaaacaaacatcctgtgtgttctgtgaaatacatacaactttaaaatgaaaaactcataattttatgcatgaattttggtgttcatgtggcttggaaatatgtgcattaaatggaattaagattcaaagtatttgctaatcttcaaccaactttgaattgttactggtgtggaagtgagcatattgttttagaatttctgaatctacatggatatccaagttatatattttttctgctacagaaagctttgttttccaagagaatttaatggcttagataataaagtttgaaaatcaatgtattttttttcctagaagctttcagaaaacttaaatctgttaataatctggtgaagtgctttattacacatacaaaattttgctctgtttgacagagtgtcagttagaaattcttgaaaaggttactataagacacaatttttatttctagtaatttaaacattgactgacatcataaagatagtgttttaagaaaagatagttttctgttctgcaagcataaattttctagctatttcattattatcttaaatggagttaacactacttagaaattgatgctacttcccttattttccttttattttaaacaaaagaaccaaaaccatactttaaattttgttgataacagtgatatacatcaaggtgtagaaatactgaatttagtatacacttcataaagtcatttctgttgacaactgattttggaaaaaaaataaatttaatcacttaataatttgatggatcaatggtgtgatttgggagtaaacttcttgaataaaaataaaacttgatgttttttccaaactgatagactgcttagactgatgagaaataaaactaggtctttaattattacctttgctatttgtctaagattctacccccatttagaaatgtgtttgttttacatcatctcatatggcctttggaatgttgtttccttcttaggtagtagattcattcttgatgaaaaccttccaaaattagaatttgctttaaaagaggctcaatacaataagtaaatgaagtctgtgttctgtattacattatttttgtaggatcgtttcacaattttctcacaattcttactttgatagtagagaaaataaaagcaagccaagagacttttttttaaaaatatattttatttgctataaacaactatgatttgcatttctcatgtgaagaataataattatcggctaaaaatggatttgctgcattgattttcaacgtaaatatttaaaagattaatgccagataattttattatactcacatttaacgacaagcaaagctgtttataatgatgactgtccatgtacacagttttaagttgaagtgagtgaatattcaagataattaaatgctacattttcattttcaggctcaagtggtcctgtcgaagtatttatcactgagactccgagtcagcccaactcccaccccatccagtggaatgcaccacagccatctcacatttccaagtacattctcaggtggagacctgtgagtatcccacccagaaaccttggatactgagtctcctaatcttatcaattctgatggtttctttttttcccagcttttgagccaacaactctgattaactattcctatagcatttactatatttgtttagtgaacaaacaatatgtggtcaattaaattgacttgtagactgaggggattttggttttggttttgggttttgtttttttgcggtgggggggctggtatttggaagaatttagctctttatgttacagaaatcttttttgcaaggacttagaaatgataatgcttaagattgttcttgcccaatgtgggaagagaatctaaggtttttatatgtcttgcaacctcatcaaaggaaaattactggcatcattttcataatttgaaaaaaaaagccaaattaatatatttcttttttgattcactttttaagtgatcatttttaaaactttacttttgacccactgaatttatttagatagaaggaaaagagatgatgggagggaagtttagataaaggatggaagttggttttatttaaacaatagccctgtgatttcctaatgagaagtgactagaaattgaagaaaccaaataaggaggatattggtcaatttagctttagtttctcttactctctcaagcctgccctgtttaactccaaagttcatggctcataatttgagaaacactgttttaaacacaggagaaaaaaatgtccattttaaatcatagctattgaattctacaattacaaagaaacaaacaaacaaaatttgaccaacccaggcggttaaatttaaactcttcaggaaaaatttaagctgttaaaattattctttttctaaatttctaaagtggagggacagaatttttcagatttaaaagggcctcctaggtgcccagaaaattagtggaaagaaccacgtctagacgcatctttgatgtgtcagagttccaaggataaaaagaaacttttaaagtcttctatactcagccaggttatcaatcaaatatgagggcaaaataatattttcagacagattttaggcagtttatcttccatatatccttttctttaagggtatttgtagatacactccagaaaaacaagagtgaaatatgaaggaagttgtggggtccagcaaacagtgcttccaaatcagacccctgatagaggtggaaaactttg

SEQ ID NO: 98595 - DNA, 1700 bp, Homo sapiens
acatcatgcctagctgtaggtgtaattagttcatttggggggaaaattgcatttaaatattcactgagtgattataataaaacatgttaataaaacatgaaaggctaattaaaaggcatcagttatttgagcaactgctgaggtgcaaagtctccaaagtcttcactaacgtttgactgaaaatatggcctacattcagaaacaaaagagtttcagggtgtcagaatctgcatgcgacagaaattaagattaactctgtgataaaagattcactgtgacagagaacaagctatgggaacaacttggccaaaggtagtgttagccaagcctcattcctccatttcctcatctgtaatatgggaagattgtagctgattacctttaatgttccatcctaaatactaaacacccagatgcaccttttctaggaacttggaagattctgcttttcccaaccctcagacactgtcagtgctggggaaggtgacttcacttttgaaggcttatagcacagattgaccaacctcctaaattgtatttcttggaggatttaggtgtaggaatcacttaattttttgtaacttaatatatatttaaatctgattgtggaagtactataagtatatgaatggtttgtttgtttatatgatgcaaatgatacttaaatggtagaaacttctaaaaaaatgctctgtggtttctatatttatgattgttattggtgttgcaatttgctgaaaatgatttccttctgaatgattgagagagatcttcgtctctctcaacataaggctgtccacatagctgcttgctggaagcatttaggtggacatgttggagataaaatctggaaaggaaggaatccttgagtattggagtattacatgttgaccttactcctactctttaaaaaggagaacagcaagatcccactgagcatagaggtgatttcggagggaagagattggaatttgacctcagatatgctctttggtgcttatctgtatgtctggtttgctccgtggcctagcacgtagggctttaagagtgtggtgagaataagggaacagcagattaccaacagattgtctctgagtcctgccttgtttgttcctcctacagagaacttggtagagttgttcaaactagcaaaagataagaggcatttggtttgtcaataagcaactagaaaagcacagatctcagcaaaataaatagagaaaaaaaggactgagtcaaaaaatcataaatgtttaacttctccaaggacactactattggaaattattcatttagactttatttgaaactaattttaaaagtgtagacattgtactatctcctttttttggtatcatctcaactattttattgttagtttattcatattgaataagagagggagtaaagatttcacaatggcgatagctagtatatgccaattaagttaatttaaaaagttataccaactaccagtagcgaaaaaggactgtcaaaagtttaaatctaaataatgtaaaagatgtcataatttttaacttttctgtctttaaaggatacatagtataagctagagtaattatacgtagtataagctagaatataggaatttaattgatctaagaaataactgacacaaagtctctttacttcctgaacaaaaacatgctaaattccatgctgttcagtccatttccttt

SEQ ID NO: 98596 - DNA, 6914 bp, Homo sapiens
ggagtttgaggtcaggagtttgccaacatggcaaaaccccgtctctactaaaaaatacaaaaaaaatcagctgggcatggtggtgcgtgcctgtaattgcagctacttgggaggttgaggcaggagaatagcttgaacccaggaggcagaggttgcagtgagccgagaccgcgccactgcactccagcctgggcaacagagtgagaccccatctcaaaaacaacccaaaaaaccaaaaaacaaacaaacaaaaagaaatataatcccagtagccccagctgagctggaggatggagaccacttggtagacacttgtggattatttcctaggctaaatgcaaaagctactgctgaataagggacatttttttccagtcccaggccagtagcgacatagatttcagagtgatctctgtgagatcctgaagatcctgactgcagaaagtagtgaattgtcttctctcacccagttttgtgacattcccttttcatgccattaggatctggccccttcaccgatgttcgtgcagctgtttaccaaccgcagcctcacccccagcctcctccctatggccactgtgtcacagacagtggtgtggtctactctgtggggatgcagtggctgaagacacaaggaaataagcaaatgctttgcacgtgcctgggcaacggagtcagctgccaagagacaggtatgcattatctttttgaagaataggactgatgactttattatttagtttttgaaggacaatacattttcaatgtgaaacaataaaacaaacaagaagcctgtaatcttaccaccctgtgataacaattagggttggcatttgaaatagtttcttccaatctttttaatttatgtattttctttctggtcatggatatcatgggtaaaaattttattgtatttatctgtctaaagtgttgttacaagagagctactttctgaataatcatcaatgttttatattctaaatctcaaatttcagcagctttgtgatgtaaacatcttccaataacctaatatatgtattctgcactacaaacatggtagtcactatggcaataacaattgctacacaattctcccccagaatagtctcatatattaattttatggcatagatatagtcataaatattatcccaacatccttaagcagcatccttaattgacctgtataaatatagctttacaaatagagaaactgaggcatggcagcagaagtggtcatgaaggacatcagcagaagaactcaggtgtcgttctatccacagtagacatggattcctgagtaatgcattttgactgaaattaacgagatgatcatctatactcatagcttcttcctttgagggcacaagctcagtatctcattgaagccataaataagcagctgctggtgggagataaagcatctctgtttactgacactcttttgattatgattgtagctgtaacccagacttacggtggcaactcaaatggagagccatgtgtcttaccattcacctacaatggcaggacgttctactcctgcaccacagaagggcgacaggacggacatctttggtgcagcacaacttcgaattatgagcaggaccagaaatactctttctgcacagaccacactggtgagtgtcccaagggggagccacagaagtgagaaaaactcactttcatgccctagttttatttgccagcattctagccatttattttgaacccgcccaagaagcatcgcttttgttcagtttggactcaagagatcgcagcgctcacgtaacagctgaggattcttccatcttccccagtactgttgggaaatgacaccaagggagtagccttccagttcatttgatttaacacattgggattatgatgtgattaaagatacttgtattttggaatcagtagatgatcccacagggctgaggaatacaaaggatgaatgttttagtgccttagcttattttccagttaaaacaatgttttattcaaagctatcatttaatcttttgtggggggggtgctggggaaatgacagtgaaagtgggatttaaacctgttttgaaggtgtgaaggtaaatatgctaagaagcttagaactatattatcagacattttttattctgagatagactgtctgtgaatgagctgcagaaacctggctctctcagaccagtaattctgtgtacattggaaagctcagcggtaatcttttccttctttgttgtgtattgttcctggcagttttggttcagactcgaggaggaaattccaatggtgccttgtgccacttccccttcctatacaacaaccacaattacactgattgcacttctgagggcagaagagacaacatgaagtggtgtgggaccacacagaactatgatgccgaccagaagtttgggttctgccccatggctggtaagatgaagcccttgtgggttgtcttgtttgacaacaatttagggagtagagactaaagactagtgtccagtttactcccatttcattcattaacacaattttgagacaacagaaaacttcatgtgaagtgtgtttgtgtgtgtgtgtgtgtgtgtgtgtgtgtgtgatgttacatcatatacataaggattgggaagaataattagataattatttatataatttttaaacctcattgacatgatttaatgtcaaaaatataattacttatttgtaagtctggaaatatgaatttgcacaggtttgtctttgtaaagagcacacaactgagtagcttacaacatttaatatatgtatgacggctttagtcacagagctacaatattgacacatggttgtggtttgatgggcataagctctatcacttattaataagtgccaaagtgactaaaactcaatgttttctaacaggtagggaatctcactctttttttaaaggtccccagtttgtatagatggcgaacaaatggaaacgaataccttttacttgttttcagatttcaagaaccccatagattccctttaattttccagttgtagaaacaagagcctgggcggtaggcactgtcaagtgtgactatgagacaaagaaattgcttatacttttatttctttcaacaaaagaagatgctgagtttagaagaaaaaacccacttttgcttgtaattctatatccaaacccatagtttttatttgatccagaataaactggaactgggaaaagttatgaagctgtagttaaatccaggcttctagaacagcaagaaccctttgtgtggatgtgtagatattatcttagtttaacatcccctaacccttcctgtaactattttctatgacacgtttggactacgttttctgcctccagggctcaaaaattctaccccttcacctgacagcacttagatgtctttgatgcacacaaagcttcttcccaagtgagaattcttaggatgaccaaactgaactgatccttttgcacacatacatgtttagacctggtgatcatttatcaagtgcatttcttatccatttccaaacagcccacgaggaaatctgcacaaccaatgaaggggtcatgtaccgcattggagatcagtgggataagcagcatgacatgggtcacatgatgaggtgcacgtgtgttgggaatggtcgtggggaatggacatgcattgcctactcgcagcttcgaggtatgctggctgattaacaaaaatatttgagatggcaaaaggtacagaaagggacacttttttttatgaaaacttgcactatgccaaaagcaggggaagaaatatggaatgccacgtcattcattagtctactgtgcatggtaagataagcctgaaaggcttagcaggcagcctgctaagacaagcggcatagcaatgctaatgttctgaaacactcctagcatgtaagtacttaggctgagccaaaaagatggcttcaaaagtaagaatgaaacatttgatccattcagctttaggctatgccactggattcatgtctagaaaagataggataatttctgtaaagaaatgaagaccttgctattctaaaatcagatccttacagatccagatttcaggaaacaaatacataggggactaactttccttgttcagattagtttttctcctttgcacccagctatataatatgaggaagtattgactttttaaaagtgttttagttttccatttctttgatatgaaaagtaatatttcgggagaaccctgagctattaataatctatgtggctagtgcgtagatattggtctgaatttgttctccttttgtggtgtccagtgggtaacaccatccgggagtaataattacatgtggtgttgcagaactgaaagagaccttaataacacatagagacctcactctatatagatcaaggagctgagacccaaaaaggaaaaagtaattttctcaggatctctcaaagagtgagcaacagagttggcctaatttattttagcgttgtgaatactgttgacattttatttcccaaatctaagtatctcctccccttccccctattccagagaccagaccaccacatcatgctgggtgttagataaatatgtttaatcttcttcttatttatcctaacaagcagatatttaaaggaaattatcaactaagcaagaaattttcagaaagtaagacatgtatttgttcaaatactggcttctcacaggaaagtgtattttaccacattctttacttgagcatactgtaacctctgcaaaagttacacattttgggaagaaaaaaatttttttggcaaaaattgtattactgaccaaactttgaaaaaaatgttattctatgcttgtagaaaagttattttagtggaaggtgttgataattaagtggaagtagttgtatgctttgagaagcataccttttttctttcatcaatggaactttaaaaagtttctcactcacccacctgtttcctaaacagatcagtgcattgttgatgacatcacttacaatgtgaacgacacattccacaagcgtcatgaagaggggcacatgctgaactgtacatgcttcggtcagggtcggggcaggtggaagtgtgatcccgtcggtgagtagccctatttccctagatgagtttgcacagggggaatggttagcaagtttcagataagaaaagctatgtgaaatcacatgactgaagttggctccagactttgatcagttgcttgcaaagaactttgcaaagtcttctctctaatactggaccaaaatatctcgatattggtagtcgtctggtttttgctgaatttggtgacaaatttaggcttattttaattgaatggaatttattcttgggtttagaatcataaagataatccatgctattaaaagtattctttccttttttttttgtttgtttttgtttttgtttttgtttttttgagagagagtttcgctcttgttgcccaggctggagtgtatggcacaatctcggctcactgcaacctctgcttcctgggttcaagcaattctgctgcctcagcctcctgagtagctgggattacaggcatgcgccaccaggcccagctaattttgtatctttagtagagatggggtttctccatgtgggtcaggctggtctcaaactcacttccttaccagctgtgtaacagcatgagcaaagggtgtaaatatcacccaccaaaacactctaggtttttttttggccgcccttcaaaatagaactaagcaaatagtgaaggctgagccttaaaagagctgtgttaccagcactacaaagtttaaggtgatccattactatttctttaccaaaagagacaggttgctcactgagaaaacaaactgataacatccgtttgtttgacgtgagattaccagaactgagagagaagcctgagaggttttcttagaagctgctcagcaggtatactcgtaaagtctagttcattcatttaaatgtcaaacagtttctttaaattttgaagaagtaaggaaaatgaaattattgcagatttttttcttgctatttaaatgttaagccagttatattaatatgggtaaaaataataactaatatttaaaattaatgtgtagattatcaatatacactgaaatctaaatctttacatttttatttagaaatattaccttttagaaaactaaatattcctcctaataggtactttggttttttttttactacaaactgtcctgtaaggtaaagaatgtgaacaaaatatttttttaactgcatatatttgtaagaacaattgcaaatttctatttaagctaaatgtatgctctagcaccctgaaattaaattcgtagttataagtcttcaaggctgtttatcttttccttccatgtattttagaccaatgccaggattcagagactgggacgttttatcaaattggagattcatgggagaagtatgtgcatggtgtcagataccagtgctactgctatggccgtggcattggggagtggcattgccaacctttacagacctatccaagtaagtagctctattactgcaagttgagaactgccaattgggttataacaacagggcagtgattattaatgctctcatgcctaagttgggggtctcccctctttcccacccttttctcttgttattatctaataatcaattgaatttttgattaaaataatttttctctcttcctctatcaagtaaaaggtagagaaggctatgaaaatgtgcctgtttataattttacttcttaactctgtaaaatattctgttaggttaagacactctggctaatttcatcttatatccatacatggaaataaaaaccaccaagtgagttatgctgggagtaaaggtttggggctttatattatgattcttaacagag

SEQ ID NO: 98597 - DNA, 1053 bp, Homo sapiens
cgtagtgtctcagccatccttcaattaaaaatattaattgttctaatttttcttcttttgatgagtttttgtcttgctttgagcacttatgaaggtgaacaagattagatttgataatatctttgagttattttattatcattaataaaattgctactggccaaaaaaaattataaacatcggccacgcgcggtggctcacgcctgtaatcccagcactttgggaggccgaggcaggcggatcacgaggtcaggagatcaagaccatcctggctaacacggtgaaaccccatctctactaaaaatacaaaaaattaaccaggcgttgtggcgggcgcctgtagtcccagctactcgggaggctgaggcaggagaatggcatgaacccgggaggtggagtttgcagtgacccgagatcgcaccactgcactccagcctgggtgatacagcgagaccccatctcaaaaaaataaaataaaataaaaaataaaaaaaattataaatgtcagtctaccaaaatagattaaaagtgtaggtgggaattaaatggggataaacactcaataaatgttagctatatatgaatattgccaatactgaaaagattccattgttcaaaaaagtttgagaagcaatgggttaaacaaaatggaacctgctctgcagaatctgtgtgttcctttacatcatactctccatggtagagtgtaggggatgggcgccatgtctccctagtacgtttgaccttgggattctttgtctgtgaacatctttgggttctagtgttcagcagcacttagggaggcactgaattcagtgtacctttggtctagcctcagccctgattctgttctgcggtgggccctggccttcaagagaacagatatctaaaagttgaaagaaaagatcggccgggcgcggtggctcacgcctgtaatcccagcactttgggaggccaaggcgggtggatcacaaggtcaggagatcgagaccatcctggctaacacggtgaaaccccgtctctactaaaaatacaaaaaattagccgggcgtg

SEQ ID NO: 98598 - DNA, 1458 bp, Homo sapiens
cattggtgaagaccctttgatacctgcttgcctccccattgttataagcttttttttgtttgcttgttttttttgttttgttttgttttgttttgtttttgagacagtctcaccctgtcgcccaggctggagtgcaatggtgtgatctcagctcattgcaacctccacctcccgggttcaagcgattctcttgcctcagcttcccgagtagcttggattacaggcgcccgccaccacagccggctaattttttttggtatttttagtagagacgggggtttcaccatgttgcccaggctggtcttgaactcctgactgcaggtgatccaccctcctaaagtactaggattacaggcgtgagccaccgcgcttagcctgtttttagttttctaaagcaaggtccctattgaaaggcaggccataaacagtgatgactaagaaaaatcctggaagagcctgagaaggaaaaagatgaaatataatgccagagaatgaagttagtcaaaggaacagtgtgaaaacaataaataaatagataaatgaaaatgttatttgacagagagatgaaactagactaaaccattcagctgcctttccactgtaacaaatgtaatttcatctttcagaagtgtaataccttgcagcaccagagctgaatatgaacatattaccaaaaatagattaccaggcatagatagcattccttttttaagtttgaattgaccacttgcgactctcgacctgatgtatgtatgtgcttcctttgtgacacagatagatgcaacgatcaggacacaaggacatcctatagaattggagacacctggagcaagaaggataatcgaggaaacctgctccagtgcatctgcacaggcaacggccgaggagagtggaagtgtgagaggcacacctctgtgcagaccacatcgagcggtgaggcacaggacgagcaggggcgggaaatggggaagcaggtcaagaaatatttccgcaaatccatctttcctttgacatgccatttgaggataatttgcagtgtttcagctaataacctaagataatttacacattattggttgttaaaactttttttaatgtcaagttttaaatttttcagaaaaaaagaaaaatgacatacaaataaaccttagggggaaaaaagccagatttatctccaaaagataaaactgagttttaaagaatgctagcatcataaaacttaccatggatagatcacgcacacacgcacacacacacgtattttgaatatccaaagttcatttgaaaggaaatgagagttataattaattatatgactacctggttcttctgctaggaaaggacaaaaaaagtgcatttggattttttgtttgtttgtttttgaatgaaatatacttccctgtcccgacattgaactctttttgtagtggaaaccatcctttatatgtggtttctatg

SEQ ID NO: 98599 - DNA, 1887 bp, Homo sapiens
accaaaaaaaattagccggctgtggtggcgggcgcctgtaatccaagctactcgggaagctgaggcaagagaatcgcttgaacccgggaggtggaggttgcaatgagctgagatcacaccattgcactccagcctgggcgacagggtgagactgtctcaaaaacaaaacaaaacaaaacaaaacaaaaaaaacaagcaaacaaaaaaaagcttataacaatggggaggcaagcaggtatcaaagggtcttcaccaatggctacaaagaagctataagaaggtggtagtatctctttcttcatttgttatgtaaaaaatgtagaggatgcacaatttctttgactaaaatattattttcccttcccctatacccaaacatctacagtatttaaaaatcactagcaaaatagccccaaattattcagtgttagccctccactggaagagtgggatcaacataaaatgataatttgtaactaaatgaccattagtctatgcgtgcatttatctggtaaatagattatttaaattataatccaaatttgctctgtgccacgatgtgagtatagaggatctgatgtctttgtgaattggatattgttgcaactcctgggttagagaaaaaaaattaatagttgatgtaggttcaaacaaatacacacccacatccatctaccacaagaatagaagtttgcatgaaggtataattactgattagagctttttcccaaatccccagcgaaaagtattatcatcccctgaacctccatagcactactttcagtatttctgttgaaatctttaatactgtgttttgcagatgataaatatgtataagactttctcatctccctgaccccctaagtactctttgaaggctgggctaatgttcatttcatatctgcacccctataataccttgaacaaagtaagtccttataaaattttctggaataaatgacttctctttgagaaacttttcccaacttgctatttaaagagttctaaataacagataaggtttgaatcagacatctaatttgtcttaagctaaaatattgccacaaagatcttggaagtctgatgatcacagtaacattttaaatgcaaaatatctaataaaccagcaagtttctgggaaagctttggtcaaaatggttaccacttttcatgagagacctatttttgttagcaaagaatttgaatttggatgatggctatgttaaaggtagttaaatgggttcagctagataaataaaacaggttcaaattatttggatttgattttaaacttatttacaacaccagtagttaatggctgttttacttcaacaaactctctagctgttattagtttacaatatcaaaaaaggagccttcaaacccaaaggcaacaattaagaccccaagacaatcttagaaggagcagtaaagacaccagaggccagcttctttacagcactaatcaaatgcgttaggtcagagacactatccctaactccagagtagataaatcattttaatttatgggataaattctttttaattttatcaatttagcctgtgaatgtgccctatttaaatttcaaacatagaaggaaacctaaaccttttgttcaactctatgtcagtggcagtgagctgagattgaaccttatcaaagtgatatgtttttctatttatgtagtcttctctgaagatgcggaataagttggttatgaaagttttcttgacttccagaagttaccaaagcatgctgatatactggatgtgttctgagtaacatagtattacccttctctctaggaatccagaaaacaatacctggcttaatctttaacataaagatgtaaaacatacttctagaagtgcaagtgatgcgtccgc

SEQ ID NO: 98600 - DNA, 3777 bp, Homo sapiens
cccagctaattttcatatttttagtagagacggggtttcaccgtattggtcagggtggtctcgaattcctgacctcaggtgatccacccgcctcagcctcccaaagtgctgggattacaggcgtgagccactgtgcccggccaatcgtttgctttttatgtgaaccttgctttgactttctgagtcagagattggaatgtgaaacccttcacaaatctagctctgtcataagttagtactttatatggccttttcctaagagcctgagatttttctacaatatgaataatttacagaaaatttgacaatatgtcaaggtcaaaaaccatggccttattagagcttaggataaaaatctgtatctctcacttcattttattctttgaggtgtaccatgttacttgtggaatagagaagtgggttttcctttagaggggattagtgaactagaaaagcttgtacctaagtgaggctcacatggactttccttttcccctcagctgaagagacttgctttgacaagtacactgggaacacttaccgagtgggtgacacttatgagcgtcctaaagactccatgatctgggactgtacctgcatcggggctgggcgagggagaataagctgtaccatcgcaagtaaggaagagattgtgtaaaatgatgccaaaatatcaaatatgaatttctctgttaccatcactgtcattttctgttatccatgactggatattccgaactttgaggtttgcccctggtgaccaggtactcttaagtggtcacccaactggttcctgtgtttcttaaagacgggtatgagcacagatggaatcagtgtttgatgtgtgtgcgtttatgagtgtgtgtgcatttatgagtgtgtgtgtttctgtacatagtagaaccaagagacctcttgggttccatttcagtaagacatgcttaggggagttgcccattttaaatcacctggatatcttcaagctagacaaatcatgagacttttctgcagtgactgggaaggtgttcatgaagagtgaaccagccatgtgttgtctggtcttcatgtttgcaatgcagagacctcttgcacctcacagaaacagtctggtttcttggtgaccagtaggttatacccaggaagcagatgtcactattcctagggataatacaaaattattaacccaatagagtttgctaaggaactttgggaaccgggctgattctcaactctagtttagctaaggcactctttccagtatgattcactgggttaccaatagattctattaagatagtatttaagttttttaatccattctttaaatataagtcgtcttaaagacttctattcaaaagaacaagtcccgtgtgaataggcccaatcaactttccccatatttcatgttagggtttatccaagttcacaggcaaatcgcaagaggcaagggtccatagtgtttacaatctagttcagcatttgaatgtgccattgggcttaacaacttagaaaactaccaggatttccacactttatatgcatatgtctgtttgctttccaccaaaatgacatttctatcctagggtaaaatacaggctctccatgctcccaaaagctggagtgctgtgcctgatgtggccttttcactgaattagtctcagtcttagcctgctgtgtatgagtgaagaccaagcctcccagcctttcttttctgcttaggacccaatttcctgtgatctctctgggaaagcaggattcatgacctcttccttgccatccagatttctctgtggttttccattgtgttctaagcaagacacttaactgaattgactccaagtgaccagacctgttaacgtttcccctgtctctgatgggaaagctgttgtctgtgtctctactttagccaacctaagtacctaccatgggtggaatatgagaccaaaaaaaaaaatctgttctgccctctcctaacattttcgttgtatcttcaacagaccgctgccatgaagggggtcagtcctacaagattggtgacacctggaggagaccacatgagactggtggttacatgttagagtgtgtgtgtcttggtaatggaaaaggagaatggacctgcaagcccataggtgtgtgagtcttagggctgagcaagagctgggatgcttagttctaatgtggggttggaccagaatcacatctacataggtcatagacctgaattccagtgaaaaccaataaagaaatgggaattttgtttgaaataatgaattattatataatccatagtcttcttacaggagttagatcaaaaagtactgactacacatagaagtcttaactttgcttcaaaagcataaggtagaattgaaagatttagaatggagtcatttcttttacctaatagctgatctcagattcctccttcgtcaagatataatttatttaaaagaaaaaaaaatgacactttggacacatttctatatggaatgtcctggaccgaaacatgaaatagtgtgtgcttgtcacactctgctcatttcttttcaaattaaaagttgttgagcttctttggatctcaatcctcagttgaattttgtaagtacaagcctgaaagtttctggctataaattttactctgtttacttgtcttctaatttagaggtttttgtcttgttttgtattgttttgctttccaatatttaaaaatagctttctttgtcattgtatttaggccactcaaaattcataattggtcatttataattaagattggaattttgcatatgtagtctcccacagactagatacatacatagatccttgctactggaaatgctgctgggaagtttggggctcgctgaaaatatgtagtccatgtacttattaggagaatggaatttctgcctgccaactcagcttgagctttcttttgccttggctacttactgtgtgcttagatgctgggtgtgtcattctttctgaacagagtgccacttaaaaaaaatgtggctgaatttttgcttacacactacactttaaattacagggagcttgcacaattcaaaataacctttttttcctgtttttcttccaaatttccctacagctgagaagtgttttgatcatgctgctgggacttcctatgtggtcggagaaacgtgggagaagccctaccaaggctggatgatggtagattgtacttgcctgggagaaggcagcggacgcatcacttgcacttctagaagtatgttttacatctttatgttaaagattaagccaggtattgttttctggattcctagagagaagggtaatactatgttactcagaacacatccagtatatcagcatgctttggtaacttctggaagtcaagaaaactttcataaccaacttattccgcatcttcagagaagactacataaatagaaaaacatatcactttgataaggttcaatctcagctcactgccactgacatagagttgaacaaaaggtttaggtttccttctatgtttgaaatttaaatagggcacattcacaggctaaattgataaaattaaaaagaatttatcccataaattaaaatgatttatctactctggagttagggatagtgtctctgacctaacgcatttgattagtgctgtaaagaagctggcctctggtgtctttactgctccttctaagattgtcttggggtcttaattgttgcctttgggtttgaaggctccttttttgatattgtaaactaataacagctagagagtttgtt

SEQ ID NO: 98601 - DNA, 2341 bp, Homo sapiens
cactcctataagcagagattccccccctccaccccgaagagaggtgacgcaatgtcctcaaacactaccaccacccccaataaaaaagaaaagggaagggggagcgtcttgcaaccccttcgcttcacacaagtccagccactccctttcctcccagccgcttcccatcccttcccccatcccctaaaaagtttgatgaccgcaaaggaaaccgaaaaaaagttgtcttgccccagtcctggcgggccatcagcatctcttttgttcgctgcgaacccacagtcccccgtgacgtcacccggagcccgggccaatcggcgcgcggtcggctgcggcggccggcgggcgggcgggcgggtggggtggggcggggcggggacagcccggcgggtctctcctcccccgcgccccgggcctccagaggggcgggaggggaccgtcccatataagccccggctcccggcgctcggacgcccgcgccggctgtgctgcacagggggaggagagggaaccccaggcgcgagcgggaagaggggacctgcagccacaacttctctggtcctctgcatcccttctgtccctccacccgtccccttccccaccctctggcccccaccttcttggaggcgacaacccccgggaggcattagaagggatttttcccgcaggttgcgaagggaagcaaacttggtggcaacttgcctcccggtgcgggcgtctctcccccaccgtctcaacatgcttaggggtccggggcccgggctgctgctgctggccgtccagtgcctggggacagcggtgccctccacgggagcctcgaagagcaagaggcaggctcagcaaatggttcagccccagtccccggtggctgtcagtcaaagcaagcgtgagtactgaccgcgggctgaaacaggctgcctcagggatgggaccctaaagccgaccaaagttggggctgaagttttgtgcgcgcgcgtgtgtgcgagtgtgtgcgcgctttactgagagaaaccagctgtgcacacaaaaggaccgagttttgagcacgctggttctgagggcctgggatgataagaccgtgcattggaggacgaggactctgcgactttcccgtgttctaataaattctgcacgttcagattgtccttctaggaattaaccaaaacttgcctttaaagagaaaaatgatgcatgtctataaattttccgtctgggattagtgtggtccttactgctacttatttccttctgttaaataattggtcaaatattttcaacatgggggtggaaagggggtattgaaatagctgtcttgtttctaactaacttggaagagatgtaattggttcagacctctttagggccgctcaggatacttcaccaagaacagaggttggaattctttccgtttttcaaagacacaccctccttttgctttgagaaagctgcttaaagttgtcctttttgactattactccaaaagaatatttaagttccttgcatgttttaaaaatgtgacttcaattgtctgccttccaaaatgtttccaacttttttatgtagacccctggccagatggaaatgacatcattgtatataacttttagcaaagttaaaaggaaaaaaatatgtacgtcaatattcacatgaagaaaattccataattttgggaaaaggagaaatgcaaatgtaacgttttccttcaattatttgcagccggttgttatgacaatggaaaacactatcagataaatcaacagtgggagcggacctacctaggcaatgcgttggtttgtacttgttatggaggaagccgaggttttaactgcgagagtaaacctgaaggtaagtgacaacaagccccatagttagtatcttttaatacatgaagtggtaattgttaaactttgcattagtaagtaaaaatacatacaccatttttctaatagaattacctgtcatttcctcttaagtttaaaaactgcttatatttgcttttcacatgcttttacctttaaaacaaagaaacgaatctttcccaaattagttcctagagtcttctttttgctttactctcccaaagtttttgatgagaaaaatgaaagattttgtgtgtcctccgacaaaaaaaattgcttataaaattttaatttattagaaagcagtctcaaatcttaaactgttagtttatgagccagaaaacactttggggacttacatcgtaaaatgatttgtcagcggcagttaacacaaaaccattagccacttcaaagttctcattcctttaggaccaatgatatttttctcataaattatagcaactctgtcagagaagcactga

SEQ ID NO: 98602 - DNA, 1044 bp, Homo sapiens
aatttagaatcctgtctgggttagaggatttttttggaatttctcatcacttgacaaaacagttttctcttttcaaatataaaagagctccttgtaaaatgcttggtaaatttctgggaagccgagtgtttcttccagagggaaggatacctggaaatccggatgtaagcaagataaacctgtagctaaagctttcttaaaattcattgattctgggggaaggaaataagtgattagaaaagtatttggtcaaccaaaaccatgatagtttgatatatttactgcactgaaaatacactagaatcatatgcatagtggagcttgaagtggaaagcccaccttacattttggaagaaacttttatatttcaatcccatagatatctaatttatttaaggaaacaggatatctctgtctcataagaaaaaaaataacatctgactgatttttataggaatgcttgggagtttactcttttacttgaaaggttttttttttttttgcctttttttttaaactttagaaacagaggcgtttcttagttaagataacagggcttactacagtattctttaattatcaaggtcccttgtaactctaagtctgttatctctaattggagagataattaaatcttaaagaccactctgactctaattcaaccaacgtgtgtggtgtccaggatcgttggacttccttaagaattctattttatccaggtgggttcttcctcagtaaattgtattctcctattggtaggaaatactcttggatttctttctttctttctttttctttctttctttctttctttctttctttctttctttctttctttttccttctttccttctttctttctaaaactgtattcagagagagaaatgtgacaaaaaaagggaaatcaatagagacagaaagtagattcatgggtacccaagtttatgggctgggaacaggaattaactgtaaaagggcacagggaatcttattgaggtgatggaaatctgtgttctaaaactacattgcagtgatgactgtaca

SEQ ID NO: 98603 - DNA, 1032 bp, Homo sapiens
caagtttaacgtatgctctatagtttcccttgctggtatttaagggtagaaataatttatagattcttggccaatggagatatttccgttttagaggttttgtcattctgacatttcagtttcacgctttgtagttcttttatgcattgaggtgtatggcaataatgtaagtgtgaatttttctatttctccttatgtattaaatattcaccttttattttattatattgcttaatgaggacattctgtgtactagtttgatgtttatggaagaaaaacaaaagcttccctagctctaaaaacttgccttttaagttcctcatctctataagtagcaaaacataacacataaattattcaggcaatacaaaatgaaaataaatacatttcaattggctatctaagagattatttctctgtgcattgagtcttcttttatgtagtcactgcaaaaccatgaaagattgaaatattttctgaatgagaaatctttcaacatgaagcagcacacacagcactgtgagcagaaactaaaataaaccctgtctggcctcaaggttcatgttgcatatttagagttggaaatactcatttcagggtacatttttctttaacccagtcatcccagagtggaacaacaacatagagaatagataagattgtctgtctggctagctgaacacactgtccttcacactgctgagaaatttgcagagtatggtagaggtttttagatcttgaaactgtacaaggcactcttctgcttttaatttatgctttgaagatttatacaaaatagaaagaccaaataactcactttccatttaaagtgctcacgttttccatctggtacattgttatgaataacatgtctgcatgacataacagaaaatttttcataccagtgcgggtctgccatcaatttataatcagaaatgtcacatgacgtattgaaaagaaatcagaattacacacggttgctgcatttgccttcttatatttcttaccagaagcccttttccttcttttcag

SEQ ID NO: 98604 - DNA, 1080 bp, Homo sapiens
ttacttttaaggtgccaagtgtcagaacttgttgctgtttgttgaattccaagaggcaatggagaaaatgtaggaataaactacattttcttctacatttaagatgtaaagggaacattttcttagtagaaaatccttacttttcagaaaataacttcttaggtaaagcacatcattttaaccctttttgcagaaaaaaaaaatacaatgcttctggttcaaggtggcaatttgagcacatatgtttgaatcctcctctttcccaaataaccatgaaaatgcaggagacactttttagcattgctgaaaccacaacagggtgacatccacatgttcaaactgagtggaattcatggaggatatatgcagatagaagaagttgagtgatgggcaagacgaccaatggttttctgcacaagaagaagccagtcagagaagtaggtggaagcaccttctaccccagagagggagctggaggaaagggtgggctttgggggggtctttgaggtgcaaatttctgtgacactggtcatagctcacatagagagcgattgctgccacggctcttaaattatttgaactcacacattacgtagctggtcattcctaggcaaaaagccagggcttcctttgctgaatcctaacgaggcagttatgccaggtaggaaagggaagtgctgccccagctagctagatgccgcaacagaggaggcaaggaattcctccaaagagagaggcacacttgggtgtgatggcctttggtttgaagctggagttccttcttactccccaagttcatgggccaccagcctgagaaagcagtgaaaatgctttcctttgtctgttttcttgtttttgtttttatcaaagatttgaacaggtacacttgcaatttctgatgaaagcattttaaccaacatagatacacctctatctgtttttgcaagggtaggtaaatagaggtgaatggcaggacagataagtgagaacccccagctgtcaaaaggagaggaccattatgagaaaaggtgttcttgtgagacagtgattataaaagaggactaaaatgtctaaaagctc

SEQ ID NO: 98605 - DNA, 1054 bp, Homo sapiens
ttcttatggttgctgtttgcatgacatatatatatttatatctttttacttttaacatatttgaaaattttaatctaaagtatgtctcctgtagacaacatatagttggatcttttttaaaaatccagtttgacaatctctgcctatttgatttgatcatttaatcagttcatattgaatctaatgttattatggctgtaattggatttatgtctgccattttacttttgactttctctttccctaagctctccattaagctgtctgccttatttggtatcacactaagctgttagacttcaccaatttctagcagattgctctattgttttgacagttcctggggcataattcgttccacagcctgacccgattaaattcaagcaggaataatttttgaggccagtctttgaggtttgttctgttgccaagagtactcttcttagctgtttctttccctgattttctctcttaaattagctagcctatgatttagcttgttactcttacagagctaccagcctccttttaattatttaccatcaaaatgtccattgtttttgagagtgtccttaggcttgaacttccccacactctatttataataaagtattttttttttcactctgtcacccaggctggagggcagtggcgcgatctccgctcaccgcaagctccgcctcccgggttcaagcgattctcctgcctcagcctcctgagtagctgggactacaggtgtgtgctaccacgcccagctaaatttttgtatttttggtagagacggggtttcaccatgttagccaggatggtctcaatctcctgacctcgtgatccacctgcctcggcctcccaaagtgctgggattgcaggtatgagccactgtacctaccctaaagtaatttctttttgggagagcttcagagccctcttttttatgatttgcttcttcctctgaataaaaaccaagctttgggtgcttggcatggggtagtagcctctggtcttcttattttgcttcttctgtgtggagcctcagtcctgtgagtgagctgga

SEQ ID NO: 98606 - DNA, 2390 bp, Homo sapiens
tttcaagtgattcccctgcctcagcctctggagtagctggaactacaggcgcgtgccaccacacctggctaattttttgtatttttagtagagacggggtttcaccatgttagccacgatggtctcgatctcctgacctcgtcatccgcctgccccagcctcccaaagtgctgggattacaggcgtgagtcaccgcgcccggccaagcccttggcattttatctggaatagcatctgtaaactgaagtgtttgacctctgttttcttctctcctctttcatctgtttctgattcgttggctggcagctgcacctgtggggggacctctcatgcagacttgcacatatgcagggagtattgcactgaagatctttgctggaccttcttctcttcagaagataattttcaaaagggagcaatgctgtgaatgcagcttgcttctctctacagattgagaagtccagcttcaaaagttacttgccacttaagcaaggaacttgtcaagagatcatggttcatgttactgaaaagactttaaggatttgtaaggttaatccatagattgctgagaaaaatggaaatatttttatttttacagattttgcacttctgaattcaggttaaaaactaacttgtatttagtctgcttagaggactgtgacttgaaaatttttatataccaatgagctttttggtagcgtccacaatgtttaaaatatttcataggcgagatccgtgttctccatttattaatgcattgtagaccaatttaactgctgtgtttcaggaaaattcttcctagtttaataagcaagctaaaagttttattttttatatttagtgcttaatctttgcctcatgttatgtaaaattagcctgcagatattttctctcaattctgtagactctcgcaagataaacattcaaacagtgaaacaaacaataaaataaataaacctaaggatgtcgtattgttttactctcggtctcagaatttgtattttgcctttctgccttttttatgtcaaaatagatgagattgtgtgcatctataaattgttaccacagtatttttgataatgaataaggataggactatctctgtgattattaaaatacatggaattatccaggaaattttccttacaaggaattaaaagactcctgtatttacttttcagctggatgtgtgttatatttctgacataagaagggatagatattctttccataatccctttaaattaaagggcagagaggctgaaacactcatgggtttaaggacctcccatcatcctaaagccagtcaaggattagatgtgtgttaagtccagtggacatggcagtgcatgagaggggcgcaggggtgcctcaggtggccactgtagatgtcacagtgtgctcggcaggaccagtagccacagaagtgtgggaggccagagagtttcccactttttgtctccctgtcgactactttagtactcctttttcatttttttttatattcttactttagtacttcttaaaggctcatctgtgtatgcaggttgatttggggtggtagatggatggaagtttttatattaatatttattttaaaatgcaccaggagaaaaccctctaaccagtagatcaaacacctggttttacagttcatggatgtgttgcacagaatattatttatgctttcttaaaggcaaagggacacccaagaaggcacagaggacacatgtactaaagggataaggaatgcattggtgagagggcaccagcatccctgagaagctcagtggcagttctgaaggccagatgctgttacagaagtgagctcactgacagcaatggacatggaagaacagaggcccaatggcagtgagtcactatcagaagacaaatggatacaattatcacaatgagtggccaggttgaaggattcctgcagagagctttggagacagttaatggaacatgccatctttaggagcaaaataagtctaaaatgagtattgctcaaacgataccttcaaaagacctcaaggatgggtgatcaggagataggacacagccaccttaataaaaggttataatcttttgccaaattttcagacctttgttattttccaaatgcagaaactgctgattgaaggaaagtctaggtctccaagaaggtctttgtaaaaccactgcaagtgtgtatggcaatgatgtccctatggttatttacttggataactgtacactggggaaggggagtacatgaataatctgagggcgctgagacacaaggtccaagctgacagtgatacttcaggaccagagtatcactacagtccaccttttggagtgaggggcatatgggattcaggtaataaatggagttcttttccagg

SEQ ID NO: 98607 - DNA, 2161 bp, Homo sapiens
aagaaaatccaggtttggagaaggacagcctggagggaaccactttgcaggctgggaggcaggtaggaattctggggacaggggagaagctaaagagtagggaggacaggaaagagggcttcaaaccagaaacaaggtggcaagcaaccagtggatgagtatctgaggctctgagggaaaagttaacaaagagaaaaaaaataccgaaagaattgtaattaaatatcctgccaatcacatggatctgggaggcagcacatggaatagtacctttggcttcagttttctgatgctttatgcttgtacagaatccacatgggtctgttcgtaatctcctgcagggaccgtattgcggaacacttgttaacttgggactactttacatgagtggtccatttttctaccttaggttttcaaaaggaagctgactctttgttgtcagtgactaaactcagcaccatcagtgattctaaaaacacaaggaaagctcgagagatgttgttaaaactggctgaagaaaccaatattttcccaacaagttgggagctctcagagagatatctctttgttgtggtaagtggatgctttttttcatttgccctaattttgctttaattgcttggctttttaaaactattcactatcctccgtattccaacaccaccatcactatcacatatgaggtggcagatgctggcattatatgctgtggtccccagtggcccgcagcatcagaatcacctaaagagttttaaaagttcagatttctgtatcacacgtagacctactgaggcttgggttccagctcaagagtttgtatttttcagtgaattctactgtgtagtctattttctgaaccatttgtaggtcaaagagatgtgagaagtattgtttatttaacctataagactaagaaataatctgaaaggagaaaggacgctaaggagtggggaaatgtttcttggataatgtaactaaaggattaaggcgtgtctctacatttgttaggaaaaaattaataaacgtcttacttgctcattgtcatttccagggtgggttttgttgttgttagattgctttttcccatcgacatgtcttggttcctatcttgccagcagttttttggtttgttgtttgtttttgcaggaccgtctcattgcacttgatgctgcagaagagttctttaagcttgctcgtcgaacttaccccaagaagcctggggttccatgcctggcagatggccagaaagaactgcactaccttccgtttccaagtccctaaaggagaggctcaggggcagaatgggaattcttccatgaggactcagcagtcaaccaaagttggacaattacatgtagaagagagtgagcaaatagagtttgcttagtgaaaaatgatactgaattctacataaatgtaaagtctttaatctgaggaccctgccccatgaattgtgcaggctgcattgaaacgccttggtgatctcatatttaggaagaaagttaaagagttggtcagatggatagttcataatgggtggttccattctgagagcccattgccccagctttggttttagttgtgtcataatctctgatcattaatcctactgactgagtggactatttcagttaataaaacaatatgattaatagagagagctgtcattgagtcccaaaatggattgccagttttaaaataattattataaaatgtatgctaaccccaaaataatactaggcatgaggtgacctctctgatttggtcaccttgtagaaccttggagggtgtcagggcatctctttgagtatcagttatgattattcagaagtatagatgtatcaaatgatagaaatgacaaggaatggctgggcgtggtggctcatgcctgtaatcccagcactttgggaggccaaggtgggtggatcatgaggtcaggagttcaagaccagcctgaccaacatggtgaaaccctgtctctactaaaaatacaaaaattagccaggtgtgatggcacgcgcttgtaatcccagctacccaggaggctgaggtaggagaatcgcttgagcccgggcagtggaggttacagtgagccgagattgcaccattgcactccagcctgggcgacagagcgagactccgtctcaaaaaaaaaaaaaaa

SEQ ID NO: 98608 - DNA, 1050 bp, Homo sapiens
acattggattagccaaggaagctctttgggcctcagttactgtatctataaaatggctttaataatatatagattttattagatgctcactgtgtgcagatattgtactttctgtatgccatcaatctttataacattcttaaatggaatatttatcattgttaactccactttacaggtgagatcactaaattgagagaatatgtaatatgaagagtttcagtaagataatttatgcaaggtgccatatcacctggtgcagagcagattctccagcagtggtagctgatagtattcctatcaactttatctcatccatctccttctcttcttttaggcttgctttgaagattaataaaagagaagagccaggtgtttaggcaacatgaagtttgggaatgagatagaggtttaagccaaggggtataaataaaactaaacttttattttcctgcaggagtggcagaagctcaactatgatatccataccctgcggcaggttcgaagggaagtaagaaacagatggaagtgcatcttagaagatttaggtaagtctaaaagagattgtgaaatggtaaaaataactcgttgtgatcattattcttcaatttctccaccatggtttttataaaaggaatgtcaataattgcctaattaagactactgtgtactaattattctcccaatcttgctcttatatcctcaagcataaatgcctgatgtttctgttgtcaccagtccatgtcttcaggacacactctgccatgtgttactccatctgtccctagtatagggtacgcatgccagtgcagtcatgtgggcactaacatttacttttttggcattgtacattaatttaattagatggggtgttggccaattagtcatagctttgtaagatgaagcaggttgggagaaatattgtttgcaagacagacagcaaaactcagtgtagaatttcggaagaaatatggaagaaaagcttcgaggttgggaaaaacacttgtggcattagggtagatacctgccctcatcactaatggttaatga

SEQ ID NO: 98609 - DNA, 1050 bp, Homo sapiens
gtgactaggctggtctcaaactcctgacctcaagtgatccacccgcctcagcctcccaaagtgctgggattataggcatgagccagcatgcctggccctcttttttttttttttaagacaaagtctcactctcacccaggccgaagtgcagtggtgcgatctctgcgcactgcaacctctgcctcctgagttgaagtgattctcctgcctcagcctcctgagtagctgggattacaggtgtgtgccaccacctccagctaatttttgtattattattattattattagtagtagtagtagtagtagtagtagtagtagtagtagtagtagtagtagtagagacagggttttgccatgctggccaggctggtatcgaactcctgacctcaagtgatctgctcacctctgtgttccaaaatgctgggattagaggtgtgagccagcgtccttgacctaggattgtttcttaattgtgctacactgatttggaggagcatgtggaccaacctccattttaaggacttgtattaactcatttgatcctcacaataagccaatgaggtaggtaggtagttttattatccccatattgcagatgaggcaattgaggaacagtgaggttaagaacttccctgaagtcaggctgttagtaaataacagagctgggattcaaacccagacactcaggctcagcacccacagtattttccaatatgctatactgagtggccaagtaagtataataaggcccttccaatgaagacagcagtacttgagttttttcccttacaacttatatagtctgtgagggattagataggtatgccttaacatgatgctaaagatgtggctagggttgcatatttcttatatgacttagttaactttgccctcttccaaggtcacagattttgtccctgaccccaatcaccatgcacatgtgcacatgcacgttcaacatgcctttggtaaaataaaagaggaccaggagaaattgttcaaacttgccacttcctgacttctagaaaatagctgaaagcccatgccctg

SEQ ID NO: 98610 - DNA, 1554 bp, Homo sapiens
tctgcctttcatcttgttgcctcaaccttcttatctagcagccctaatctgatttggccaacaactgacgaggaaaaaaaccccaagaattcagctataaacatcttcagttattgatttcagttttgacttgttctcaggtatcttatgaaattagctcagtatgttttcttttgctacacctttgctaattgacccattgttaaagttcagggccacggcatcacattgaccacaatatattatttcagaaattaaggaaaaacaaataaaatattactttagaaaataagactttaacttttgatgtctggtagaattgcattgaagtcacttgggaagaatatgtaattgacttttaactgttgttttcaaattatttgtttcaagcttaaaagataaatcattacaatttaaaaattggagagggacatcggaagacttgctctaacgccagggagtagcggagttagtttctttagttatggagagatgtaattggataacattttttacatcactatttttcatttgctgcatttcgatctgtattagcttgttctcacactgctataaagaaccacctgaggctgggtaatttatgaagaaaagaggtttaattgactcacagttccacaggctgtacaggaagcatggctgggaggcctcaggaaacttacactcatggcaaaagggcgaaggggaagaaagcaccttcttcacacggtggcaggagagagagagagagaaagagacagagagagagagagagaagggggaagcgctacatgctttcaaacaaccagatcttgtgaaaactctatcacgagacagcaccaggtggatggtgctaaaccattagaaaccacctctatgatccagtcacctcccaccaggcccctccttcaacacatggggattacaattcgacatgagatttgggtggggacacagagccaaaccatatcaagatccaattctttggagtcacatgtttaagaggaatccagattctcctcttaccaattatgtaatcaagtgtctattcttagttaaaaccctgtcaatgcttctactggttttagagctttaaattttgcataaaatttccagatactttcatgtataattattcatgactattctgtcaaaagaagacagtaataatatggaagtatgacatccatagtttcattgaactaattttaacaaccacctgtcatgtgcaagctgtccccaaaccatggtaggggaaggtgggatccaaagatgcatcaactatggatccatccttagcagatctttaatctcatattgattattagttatgtgttgcttccccattaaatgttttatcagagtaacagacactgaaactgaatgaattcgtataacattcattgtagatatttaggaatagcaaaatgactaatcgatggacagcaggaagggaaggatgttttaaaagtccaaagcctggatgatccaatgatgaatgagtctctgaaaaacagagatttggctgcatttagaacaaggcctaagacatcagcc

SEQ ID NO: 98611 - DNA, 1018 bp, Homo sapiens
ctggtgataaaggagacattatagatacctattgtataagagtatcttggctgggcacggtggcttacgcctgtaatcccagcactttgggaggccaaggcgggcggatcgtgaggtcaggagttcgagatcatcctggctaacatggtgaaaccacatctctactaaaaatacaaaaaattagctgggcatggtggcatgcacctgtagtcccaactactcgggaggctgaggcaggagaacagcatgaacccaggaagcagagcttgcagtgagccgagatcacgccactgcactccagcctgtgcgacagagcgagactccgtctcaaaaaaaaaaaaggagtatctatacagtcagtaactctacaacaattttcgtaaaggaactgaggaagttcaaaggaagcagcagtttactttcaattggtaagaacagcagacttctcagaggtggtggcatttgagctgagccttgaagggtgagtaggatttagatcacagaggaaggaggccatgaatgaacatggtcgaggcatgcaggttcattcaaggtgtgccggaggatagagtggtgttcccaagtgtcagaggcagactctgtgtggagggctgtcattgggaacaagaccagaaaggtcagatcatgggtaaccttcttgggattgaaactgtattcagtaagcggtatggaacaactgaagttttcagggagggaagtgacccaatctcatctttggaagacagcaggttgggagaagattggagaatttagcttgtggaagcagaggaacaagtttctgcaggcattcaggccaattaaggcagaaaagagtaagaatcttgtgcagagggaaaatcaacaagctgaggtggctggcttagatttggaagatgggattaagggagtgagcagcagttgacaaagttgggaacataaggtggaagggtgacttaggatgatggagtctgattgggctcatccacatgtcagcagcccgtccacttggacacatcca

SEQ ID NO: 98612 - DNA, 1023 bp, Homo sapiens
cactgcactccagcctgggcgacagagcaagacactgtctcaaaaaaaacaaaaaaggcggggggcctgcatgtgaatctgatacctagaagctagttctcatctcactgaatgggtaggtctaatgaggcatggagagagatacctacatccgagtttgacctgcccagccaaaaaggctcattttcatcagctctgtttaccaacagacaaacctttcttaaagggagtgctccagagtggtgagacatccaagctaaagcataaagccaaccattgttgggagttattgacggcccctctaagtcttgaaggtgccagaccgctgggcacaggcctctcctggcctccaccccctgccaaccgctactccaaggttagtccagtcttttgcctatcctctcagtcactatgtttctttgctgtgtcatttgatccttttccatttgggctgaggttagggcagacagttaatgagtgcaccagctgtctaggaacagtgaaatacagtcttctctttttcgcttgcataccatgcctggtagatgcagagagtcagcttttgtagtgccggaagagggtgccctccttgacaccgtccaggcccaggtgcttttttaattttattttattattattttttatttttttgtgatggagtctcgccctgtcgcccaggctggagtgcagtggcccgatctcaactcactgcaagctctgccttccaggttcacgccattctcctgcctcagcctcccaagtaggtgggactacaggtgcccgccaccatgcctggctaatttttgtatttttagtagagacggggtttcaccatgttagccagaatggtctcgatctcctgaccttgtgatccgcccgcctcagcctcccaaagtgctgggattacaggcatgagccaccgtgcccagcccaaatatcttaattatataaacctgccttgttcagaattcacatggattatagcccaagtggctttttccagtaaaatttagtgcagctttc

SEQ ID NO: 98613 - DNA, 1035 bp, Homo sapiens
ggctgatgtgctgtgaagaggtgatgtagcttttaacccccaaaacattaaatattggattcttatgtgtttgcatcttaagctgctagacctcattcatgccagacctcattcatgccctttgaggaagatgcatgcactgggcctgaagtggaagttgtgggcatttttgagagtaaaatgggtggatttgattcctcctgctacatttcccttcacacttaggactcactatgacacatgggccaaatccagtttgctgcctatttataaataaagttttattggaacacagtcgtgcccatgaggttacatactgactatggctgcttttttgctactaatgatgtctcacacagaaccccaacataaaatacacataaaaagtttgctggcctctacttaaggccacttggtgctcagtaggcttggcgcaaatgactgtgtggatttaatttttcatacaaaaaggacacatgagcagcctctttaaggaagacttcttataccccctgatttatgatactttggaagaagagattctctttagagattgagagaatcttctagctttttcatttatgggtataaaacatttttcatttactggtgatttctttcttttgaaaaatggctaaacagtgctctattatgtgagattagtctaagtgaaaaaatgcactataattttcaaatatattaaaatgcaccctgtcttggactagtgccactctgctattttcctttcatattctggggttttaaattcacaggaaatgttttaatggctttatctgaagcctatcatgttgacaaagaggcaggcagatgactgacaaggtaaaggtctcagaaactgggaatggctgcagaattcatgatccaaaaggcagcttcgtgactggcttggtgaggagtcattcatatgtctataataacgaggaaagactggggtaattataaacaaatatgttaaccagtttttccagacaatcccaggactgcttcagtttaagtgattattttgcctgaggc

SEQ ID NO: 98614 - DNA, 1075 bp, Homo sapiens
tccactctacagttcgtaaaactgaggtcacagaggctgaatgacttgctagtcaggggtgaagctcagactcagacccagagctcatgctgtttccctgctgcccttgtgcatgtatggctgtgcagatgagtaagagactcttgttagagaggcttgagtcacagtcctttgatgcagaagtctcaaagtagaaaaactcatatttcatggatggctctgtttatttgattcatcttgtgaattcaaaatggaaaatacattcatttggtgggtgtattggtttgctggggctgctgttccaaagtaccataaactgggtggcttaaacaacagaaatttgttctctcacagttctgggggcaagaagtctgagatgaagggttggttcctgctgagggctctgagggaaggatgttctccaggcccccatccttggcttggaggtggctgtcttctccctgtatctttgttgtcttcctgtgcatgtgtctctatctaaatttccccttcttattgggaaagcagttgtactggattagggcccaccagaataacctcattttaactcgattacttctgtaaagagattgtgtctaaataaggtcacattctgaggtactggggcttaggattcaacataccaattttgcggggagtcaatttaacccataatgataggcatgcaattgataaaataaaaaatgtaggccatggtgagaatttttaactctatcctaagagggatggtgaatgctttctaactaaatgagtagaaaacacttctttgtccctttgcaaggttttttctttccctctgaacccgctaactcccagcctgggaagcttacaaagggagtcctaagtaggcctagctttaactgccccccacccctccatgacctccatattgggagacagttctccctgggtctgctggtctctgcacatgttgtaagtagagtcatcgtctgccctttgttctggactgtcttttcaaggatgcttatataatgcgtggccttgggaggtggacatactgtctccctctggcacaaagggcaggcaggattat

SEQ ID NO: 98615 - DNA, 1312 bp, Homo sapiens
gtctttcccacgttggagttggagcagcctcatcatctgagaaatactgccagaggcttgggatccaggattcctaggaaggagacagggtcctgaaggtagaggacacggcactggaccatccaggtggtttcctgtccaaaacgatcttgtggagcccaaggactgaatggtctagagggggtgatccctggcatgagctggcaatcagcacctggcatatcttggagttgcaccatcgggcaactaactgcgggtgccgggaatgtctttcccatctgatgggttaggtaaggcagtgcgtttgagaaatgatctcccttctcgctggcagatccttggttgatgttgaaacacagactgtccttcatatactcactctacctgttcctctgccctagttttgaaaggtcttttcttgctcttttgtctctgctgctttggactcttctcccagctacagtaagttgagagcagggccctgtaacacacacaggaaaggaagcaggcaggacctctgctcctttgatccatgtttttctacattcagcttgtccaggatattctaccttattctgcctgtacctttctttatgcgaacttctcatctgacacagggcaagatccagtcatctggaggaactggctcaggaccagatagatctaggcttttgattgctaggtgtccaaaaacatagaatttcattgacttcttaatattttgatccatgacatagtatttaccgcttacctgttttgaagtgatggttggggaataaaaagcaccttagggtacatggaaactagagagagggcaaatgctgacatgtgtcagaatgatgattttctattgaactcctacctccaagcgtggatagcagttgtcactattttattcttattttttaaattttgctttaagttctgggatgcatgtgcagaatgtgcaggtttgttacatagacatacatgtgccatggtggtttgctgcccgtatcaacccgtcatctaggttttaagccctgcatgcattaggtatttgtcctaatgctctccctctccttgcgccccatcccctgacaggccccagtgtgtgatgtcctccccacccccatgttcgtgtattctcattgttcaactcccacttatgagtcagaacatgtggtgtttggttttctgttcctgtgttagtttgctgagaattatggcttccagcttcatccatgtccctactaaggacatggatgaactcattcttttttatggctgcatagtattccatagtgtatatgtgccacattttctttatcca

SEQ ID NO: 98616 - DNA, 1139 bp, Homo sapiens
ctaaacaaagttatggttatgaaaggcaaaagtatagaaataaaactacccaatgaaagtactggttaagtacatcttaagtagcttcactaatgaatgctatataccttgaaaaataatgagataggatttatagatagtgacttagaaagacggttatgatctattgctaaatgggtatgtataatgttatcccatttgtgtaaaagcatgtatatgctaatgtacaatgataagatttgtggactgttacctgcagtagaagtaggtggagggaaggaggcttttactttcctttaactttatagttttctgtacagtttgaatacaattcagaggtattatttcatatatatatatatatataattcatataaaataaaattctctccctgttatttcctaacacattttgtggtggctgtttccctggatctttctaaactgttttgctttgatttactgtgggtgtgctggagaaagtgggaggtggagagagggagagagagagagagagagagagtgtgtgtgtgtgtgtgtgtgtgtgtgtctgtgtgtgtgtctgtgtctgtgtttaggaactggagcaggctttgaggaatttcaccagagtagataaagcagaaaggcgatgaagccattggtcagcatttatctttccaagggtctaagattcttcctttacatcagtacctttctttgcagctgtcttcccctcccctgcctgtaaagtcacatgctaattaatagatctttgtgtgttgcctttttcaccactgtgccctcaccaccactcctagccctgcctcttcccttggttggtctggctcctcttacagtaaaaatggctcttaattgcatggagcccaggagagtcccagatacagacgcagtggaacctcctgacatgcttgggctcaggtggggcatcgaggagggttctgaggagccctccataagaacactgggcttgctttctggctttaattgaatatgtggggaaatgggagcacctgcccagttctgatgtgggctgagacctgctgcttctcagacttaaatccagtgttctggaaagagaccgtatttttcttgacctgaaacagtcctttcctttgggtgccaggtccccggatact

SEQ ID NO: 98617 - DNA, 1123 bp, Homo sapiens
ctctgcttctcttcccttttcttctttctttaagccagagccttgctttgttgcccaggctggagggcagtggcgtgatctctgctcactgcaacttccacctcctgggttcaagtgattctcctgcctcagcctcccgagtaccttggcctccccaagtgctgggattacaggcatgagccactgcgcccagcctctatcacttttcttaacctccaaattgctcaataaaaaaatagctgacagcttcgtactgatcagttttcacacctgcataaagtagatgcactgaaactgtgggccagtcacaaccactcaatatcatcctgagggatgtaaacctggaagaggctgatgcctggtggagcctccctcgaagctgcttggccgtggaaggtaaaggaaagaacaggagactggggagctttttgtaactgaattctactctgttttctgggcatttatattctaggttgtgatgaccaggcctccttgttttactcttctttagagtttgtcctcattgacctcactgccctggagccccagaaagatatatgaaggccaagggtaacgtaccttgtgagtcctgacagttcagtgaaataggaaggatggacaacaagttggggccctccaggagaaagcagtgcctggaggaaaagggcagatgctggccaactttctccatatccagaaccttgctgtcacagcaacgcattgctgcacctctgcatttcctgcgtattgtgcttgtgatggtcaaaatttctggaaggccacatattaattggcaggcatgtgcaggataatttactgacagaaatgggctctttccattagttttttttgttttttttttttgtttgtttgtttttttcacatcttgcataaaacagggcctgaaaggaaactgaaaccataaagctgcctcaaagcttttatctttaaaaaatcacagtcgatgacatatacattttgaaacaccaggggttaataccaagtcaagcctccagtgacctactcagtattgactttggtttttcttagagtgtctgagatcatcagagatacctccctgtcgtacagtcaaggcacctcctataagcacttgctggcttct

SEQ ID NO: 98618 - DNA, 2368 bp, Homo sapiens
ggttaaggagatgtatgctaactgatatggtttggctgtgtccccactcaaatctcaccttgaattcccacatgttgtgggatggacatggggggaggtaattcaatcatgggggcaagtctttcccatgctgttctcttgatagtgaataagtgtcatgagatctgatggtttttaaaaagaggagttttcctgcacaagttctctctctttgcctgctgccatccatgtaagatgtgacttgctcctccttgccttctgccatgattgtgaggcttccccagccacgtggaactgtaagtccaattaaacctctttcttttgtaaatttctcagtctggggtatgtctttatcagcagcatgaaaatagactaatacactaactatcagatcattctcataaactctttcaagtactgttttggttcaaaaactggtgatgtttatttggcataatgagtgacagaaattctacgcttatcctttaaggctattaagtaattgtatgctgacaaatgcatatacctctcatgacatgtgtctgcctgcctgtcactcatcagcaggaaccacatggtcaccagatgcttgtgtggctggagtgatctctgaaaaccacacttggccaaaccccctgggagcagctaaattttatttttttaaaactacagaggcaatacttcataaatacatacaattactacatgtcaactaaaaataaaagcaaaaaattaaaactacagaggcagacacataaatgatcctcatttataatttatttgcccccagtacgtgaagactacctgctagggtattgccagacattgtaaacacttccttaaaaatgtttaagataggaacagaccttcccccaggggctgtctccaatgtctgggtcatacacttagcctatcatatccctaatacaaaaagggacaacaaaacagagttgattggaatattgggtgggagaaacagggaaaggggggttgaactgatcgtggaccagccacataatgcttaagcactcagaaactgagatactccagtctggctctgcattactgtgtctcaatatgtccccaagaattggacaaagcccactctttcggggccatctgatttttccagaagtgggtgaacattggctacatttggagataggactgcaagttttaccccaaccacggaggagcaaaataactggaaaagggaagcgattttctagataattttgggatcctccgaaggcttctttctttgaggtccagattatctggattcttgaatgcatttattctttcttttactttgctagtgactatttgggtttagaggatttggggcagggtggagggagagaataaacaagcttactaggatctgagaatcaagggttcttgcactctattttctaggtaataatatttatagaatattaccctgtatgctaagcaacatgcttcatgttctccagacaaatactgaatcctcacggtaaccctatgaaagaggcattttgactcagatgattagagactttgtcactggtacaaagtgttggaggaagtgactgggagcattgggatcccagctcaggtcggtgtgacccagaaacctgcatgactagaaacattactccaggctctccagtgagtttagaaagagcgtcagtggaacctctttggtcaaagacaaagttcccaagcagttattggcttcctgcctcgagtagacactccggtctatgtttgctgatcattactcaccctgtgtcaactgagtcatggagtgactggttttggtgttggttttgtatccacctgcttttggccctgatgctattgcaccattcgattactaaaacccatggattataccagaagatgttctgttcatcggtctgtgatgtttctattctttgctcatccccgttctcctttttaaaaaatatataagcatttcttttgattagcattaagagaatcaatgtttcttttttcttttctttttttttttttgacggagttttgctgtgacagaattttgctcctgtcacccaggctggagtgcaatggcgtgatcttggctcactgcaacctctgcttcccaggttcaagtgattctcctgtctcagcctcccaactagctggaattacaggcatgcaccaccacatccggctaatttttgtattttcagtagagacagggtttcgcagtgttggtcaggctggtcttgaactcctgacctcaggtgatccacccacctcagcctcccaaagtgttgggattacaggtgtgagccaccgtgcccggccagtgtttcttactaagtaggtagcacctcagtgctccatgtaagtcagc

SEQ ID NO: 98619 - DNA, 1426 bp, Homo sapiens
aagctgaaaatccagattttcatataaaatgtccagattttcaaataactcaattaaaaaatatgccagctaaataaatatgttttctttccagtaggagatagcttaaaataaaataaaatatgcctatgagctattgatatgtaaagacgtttatagcaaggactactactagttatgattattgttgttttgtccaagataattgaaaaatgaactcaccattgatttagaaggtgaaagagggaagctagacggggattgttttaactttgaatgagttccatatttactactattgcttattttcttttccacacaggataaaattggtacagattttaattaaaaaaaaagtattctggttttggaagaaaaccaaatttcacttactaaggaacaaggaaccctagatattttttgtatgatacaatttagaagctcaagaaaggtattaagaaaaatggaacataatgtttttccttgagtagaaatagcacaaaagacctaggaatgtccatatttggaattctctgaatgataacaaataaattcaagacagtgtatgtacaatctgcattctccttggaatctgaagctggtagaggaaggaccacaaataattaaggctaaatttacagtgttccaaactgaaaaaaagtcaggaaaaaaatatatatagaagagcaaataatgaaacaaaggcattagcttaaagtcatttggtgtcaaaaaaatacaaaacaacattatttaaatctcatagacagaatccaccttcatttacataaggcttctggagctgatggaaaacagaccttcagcagaagaaatgatgcatttgcaaacctctaagtagtggaaaaattattgctcttgtctttgaatgatgccataaagtacattatgtttgcctaagaagtagtaaacagcctcaatgttcctaaatcattatccttatgttcattttcattaaagtagttgtgctttacataacgtgctctgctctagggagcttaataattgttaatgaaatatggatacaacttattatttaataattgtaatactgagtgaacttattctctaagatattaataataatgaaaatagtgccaggcactgttctaaccactttgcatatgttaactgtgtcctctttaacaacaactcactgaagcaggcaccattattatttccattttaagcaacttatccaagggcacacagctgttgagtttggatgcaggatttgaatctggctttatggctccagagatatataatgagtatcaggattgaaatggagagaaaggaacagatattgtttgtgattcaatatagatttcaaaatgtataagcaaagtctgctcataagcctgtctctgtgtcttgttggtgccaatgagtacgaaagggattttca

SEQ ID NO: 98620 - DNA, 1245 bp, Homo sapiens
ttcaccatgttggtctgtctggtctcgagctcctgacctcaggtgatccacctgcctaggcctcctaaagtgctggaattacagatgtgagccactgcgcccttccactttcttcttttaaaagtataaaagtaatgtagtttttaaaagttgcttatgttgccgggtatggtggctaacgcctgtaatcccagcactttgggaggctgaggtgggtggctcacgagatccagagtttgagactagcctgaccaacatggtgaaacccggtctttactaaaaatgcaaaaattagccgggcgtgatggcacttacctgtaattccagctactcaggaggctgaggcaggagaatcgctttgaacctgggaggcagagtttgcagtgagccaagatcacgccactgcactctggcctgggtgacagagcaagacttcatctaaaaaaaaaaaaagttgcttatgttttcttctaaaatgttgaaattcattttccctacagattggatcgcatattatgtactgttctgtactttgcttttttcccacttaatatattttggacatatttccattttaatatgcttagatttacttttttgcttcagggaactctctagtattctcttgcacggattcaccatcacttattcaaccagttcctattgatatttacgttgatttattttttttcctgttggaagcaatattgtagtggacatccatatatatttgtatgacctttcgtagttttttcagtagaattgttggatcaaagtatgtgcatttgaaatgttggaattgtgacagtgcttcatgtattagtctgttctcatgctgctaataaagacatacccaagactgggtaatttataaagcaaagaggtttaattgattcacagttcctcatggctggggaggcctcacaatcatggcagaaggcaaaggaggagcaaagtcatgtcttacatggtggcaggcaagagaacttgtgcaggggaactcgtatgtatgaaaccatcagatcttgtgagacttcgagaacagaatgggggaaactgctcccatgattcagttatctccacctgaccctgcccttaacatgtagggataattaaaattcaaagtgagatttgtggggacacagccaaactatatcacttcattcttgggaaactaggaaaaacacttcaaggtggagaacagaggttgcaatctcagatctctccaggaactaggcaataaca

SEQ ID NO: 98621 - DNA, 1553 bp, Homo sapiens
gaattatccgggcgtggtggcaggcgcctgtaatcccaggtactcggtaggctgaggcaggagaatcacttgaacctgagaggtggaggctgtagtgagctgaggtcgtgccactgcactccagcctgggtgatgctgggtgatgaagcgagactctgtctcaaaaaaaaaaagaattgaatttcctttgttgtcttagcttctggggtactcagtgctgaatttcatatttaactgtagtaattacctctgctcaggtacgtctgttctctgttctttttaaagtgatttatttatatttttggtttgtttttactgctctgttgtgttatgcttaattattaaagacaattcagacctttttgacaatatatttatatattacatagtataagttttaattgatattgtatgttgcatgcatatgacatataacattttatgtatattataaaaccccaatctttcctttttttatacaacagtgataacaatccatattcctcatttggagcaactctggtgagggatgatgagaagaatttatggagtatgccccatgatgtgtcccacacagaggcagacgacgacagaaccctgtacaatttgatagtcattcgtaatcagcaggccaaagactcagaggtgagcaccttttgatgtcttgctgtgcgcggatgatgctatatagtaaaaaatagtaattcctgagaagatccccttgaaataacaaaaagaatgaaggatgaaatgtttgaaatgaagggcaggtattttagcagcatatattatcactggttgctaattatagctagtcttgattgacctgcttgatatagagataaggctcatttctaattcctaccttaatggcacaaattacacgcaaggcaatgctgttgaagagtgtgaagatagtttgtcatcttaaatggcttaaaccgtccatctctaatctttccagttgtttagtaagccacacttacttgattcagactgaagtttgaagggtactttgcattatcactaattttgaattagtgaagcctgaattagtttttttttttcctgtttaaaggtccttaaattatgcatactgatcagacagcagtggatccactatttatttgagatacttcttgtgataagccttgaaccctcacaataactctaaatccaaagtgattgatttaagaacactagaatattaaaaaggagagaactctgtaagttaagaaaacaacagcaaagacaatcatactttttttctcctttctttggaaagtcatgtttgagttaggttttctgacttctgtgttcatcagctacctctgaggagaaacctgtattaaatatacactgcatgcttctttgtgtagaggaattgagcagggtagggaaacttatagttgggtttagtgtgtatattggtggcggggggtggggtgggtggaggtgctgtggagcttgtcttttccttaacgaggtttctttatttttggtaattggtaacttttcttttcccaaaaaaacatattttagcaggaggtgat

SEQ ID NO: 98622 - DNA, 1445 bp, Homo sapiens
acatctccctgaacatcctgcaggctcatcatgtcagccgtggcttctgccccatgtgttacagttgaaggcgtcaccttcgctggtacctctgtgcctcccaccatgggctgctgtcacccgctctctgatgctgctggaatcggtcctcatttccactctcactgctatttccctcgctctcaacctcgcttacttttatctcaatcataatttcagaatgttcaaaattatgtatttgtttagcagtagaaccccatttttcctgtacctcaaacaatcttccttctagctctaacaaagactatttgaatggagaagctgctctggttgtggttggttcatgggcttctttctatctcttccagagaagccctgcccatctctttctctacttctgccccactgtggtcccaaggccccctgacaccaggacctcaaagagcatggcttgaaaattacacctactcccgtgtgacagttgattgtgacaccctcctaagccatcttcttgttcttccttcacccagagttatttctctaaaatccagacctgacagggctcaaaatcctgttgataatgttgcagttcacagaatgaagcttggacaccagcactacttttagtctgaccccacgttaccttttcttcttcatgtctctccattttccttgctccgcacaccacgtgctgcagtcatgcaggaatacttcgattccccaaccccgtgggctcctgaagcctccatatactgctttggcttgagctgatccttctacaaggaataactctgcccttgtttctcttcctggtggaagcctgttcagtcctcaggtctggttagttcttgaacttccttctcatcatacataacgtatcacttcttcctgtttgttcctacaacaatctgtgtagactttttttaaaaaaatgtactgatctcattgcattatagttatgttaagggcagagacaatgtcctatttatcttcatgtccccatggcacccagcccggtactcagtatacagcaggcatttattccacatttgttgaataaacaaacaatggaatgaatgaaatgaatgaatttgacatgctcataaaagttcacatgggcagggcccaaaggcatcattttcctcctctttcactggttcatcattcttaggaagagtcaggctgtggggctgcctgtgttctagcttttgtggtattaatcagtaaaaacagcgtggttctgagcatagtgtgcctgagctgtgtctgatttcccatcatctgcacctttccccatagggccaggtactttgttcagtcccagaccctaaacttctgacctgcagccacaaggatttcaggagcactgttcaatattcagtctctaaaccccatgctgattcaggtagctggtctcctgctagccttggttccaagattctgtc

SEQ ID NO: 98623 - DNA, 1052 bp, Homo sapiens
ggagagacagaaagagagaaaagagagagagaaggaaagagagaatgagagagaaggaaaaaggagagaggaggagagggagagaaagagagaagagagacagaaagagaaggacagggagagagaaaaacaaagaaaggggaggaagagagagggggaagaaagaaaaaagaaagaaaagaggagagggagaaaggagggactgaaggaaagacaaagaaggagaatggggagggaagcaaggcgaggatggagagggagaagatcttaggttcacctgctccatcccagggaggtctcaatagagggaagaagggaaaggtcttgaagccaggggggtagcaggccagcgacttcctagcaggaaatcaaaccaaaagtctgtgagtgtcaagggtgtggacctggcagcctgtttttctggaccgttggttgctgttgactggagattttctttctttgctgttttcagagtttcagtcttaagctagtggccactgccacatggcctgtggggagagcagtaaagtcactggaactgccggtgtcagaggccagcctgtgtgcactgtatttcgtggagccttccaaggtcttttacatgcagcccttgttagtagtgaggaatcctgaggaactctcggtaaatagcttcaatgctgactagcactttgcagccatatccccaggcagaagttagtacttacaaacatttgtctcttttttatatcatgttgaaagaaaagactctggattgattgggtcttgagcccctgggtgggattaagggtgaaatcttaccctaccttttgagagtaaaagcagcttagtgtgtaatatcagagccacctctcaaatgcctgatgttaataaaatatttatcatcagcaggtggtggccaggggaaacacaaccactctcactttctttagagccttttagaactcatgatatgggggagggagagaaagggaaccttctgacttatggtctgtttcccgccatctgtcctcccaggggttttcaggcccagacccccaggcctttgcact

SEQ ID NO: 98624 - DNA, 2364 bp, Homo sapiens
cagcagtatgagaccagcctggccaacgtggtgaaaccccatctctactaaaaatacaaaaattagctgggcgtggtggcacatgcctgtaatcccagctactctggaggctgagacaggagaatcactcgaatctgggaggcggaggttgcagtgagccaagattgagatactgcactccagcctgggtgacagagcgagactccatctcaaaataaataaataaataaataaataaataaataaataaataaaatgttgctaagtgatcacaaaaaggacgcttgtttccaatctgagagctgaaccaagaagcctgagtgttgccttttgacctcggctggggctgtgcgtctcaggcaactctaaattttttgtcactctaggcatgttcatgaatgtccttggaaacatcactagtattgattttggggttacaggtaaattttgacgagtgggcgaatttgcaaatgcagaatctccaaataatgaagattggctgtaattatgtccaccatccccagttggccattgaggagactgagacacagagaacttcagtaacttgcttagaggcacacgtggtcgaactgggattcatatgctagtagatttcaatgccatagaaagagcagagcccttctggtgtgcagagaggtatggaactagctgcttacgtggtgtgtgttagaagttgtgtttggagtttgaatctttccctgaattgttatagcccagggtccagaaacactgggtcttttcctgcattgaagctagggaaaccaggtgccagtgggaaagaagggtgggggtaagggagggctcacaacatgtaaaagggaatcaccaccaactctagaagtataataatcttttacatttgtagggtttttcattttacggtgtggactcacatgaccttggagctgaccaaatcatcttctccccattggaagggcttttagaaagttgacgagtacgtttatgtcagtgagatttctcagaccggggcccagatggcctgacttttttcccagcacatactattgggttttccggagccaggtctctgagcagattgggcagattggcacacctcatctgtggcttcctgcagaaacctgcagtttgcaaagccggtagctccggggccggacaatgattcacaggaagtgcctgcaggggcacaaagggtttttactgaaggaaagtgccctggctggaagattcccattgcaaggctggtgcttttgccttcttgaaagacaggggagtgataggggagggccagaggtgcatgagtgctgtcccagggactgggctttaggcccaacgcgtaggagggaagctctttataagaagtcagctgtccaaaattcacaaggatgacttttaaaggttttcttccccggcaagccacagcgtccctcttctctttttgtgacttgcattagtcatagtgccattggaagttcccgagaagatgaaatttctttctcctacacatcatgtgagagtttcttgcaactttttattctctagactcttgaagtgattttatcactacaccacctatgtttaaaaagtataaactctgcttaaatgctgggtaaaatagtttattctgttagcacctgaagtcattttagtctggttaataaatctttgttttgtgacagttatataccatgcactctattcttttgtgcccttttaggaaataattttggtgacatagtgtgcaacaaaagaacccctgaactgtttgacactgtcctgaattggctcttacttagctttttttttttttttttttacaaaaatcttttaaaaacttgtgttccaatgtgtgatattacagacaaaaaacatacacaaatatgttcagtataaagaataactataggctgggcatggttggctcacacctgtaatcccaacactttgggaggccgaggcaggtgcatcacttgaggtcaggggtttgagaccagcctggccaacatggtgaaaccctgtgtctactcaaactacaaaaaaattagcttggtgtggtggcggcacttataatcccagctactctggaggctgaggaagaagaatcacttgaagctgggaagcagaggctgcagtgagccaagactgtgccactgcactccagcctgggtgacagagctagaacctgtctcaaaaaaaaaaaaaaaaaaaaaaaaagaataactagaaagtgaatactcgtgtaaccacctccatggcaagagatagctattgccagccccttatctcctccttgatcatgtctagacttctagctttcccacctatgtgtgcaccttaaagatgtacttttgttttgcctgcctt

SEQ ID NO: 98625 - DNA, 2816 bp, Homo sapiens
cccgccctcccccagcccggctgccagcctccggtgccctgggattttgaggactggctggagtccctgcttcacccttagagggcggtagcggggcgtctcgtggacgcatgcgccccaaattgcgctcggggaattaaaagaggggaaaaaaagcccgaagaaaactcacgccccaaacaaaacgcaaggagaggagggcgcgcggcctgcagccctcgcccgcgtccccggccgcggcgtgatgcgcgcggaccagcccgcgacgcccgggctgccgctgtccccgcacctggacgctggcgcggtggccgcgccccagcctcgatcgctcgccgcggcgactcggccccaggcttccggcgccggtgggggccctcgctctccatggggctgagggactggctgagaaccgtgtgctgctgctgcgggtgcgagtgcttggaggagcgcgccctgcctgagaaggagcccctcgtcaggtgggtgcgccgcccgggccgggatctgggcttacctgggccgtagccgggcgccgagagtgtggacacctgtgtgcttgtgtgagttggggaggtgggcttgctggaagggcacgcggaggcgccatctcagccccttggttccttatgggatgttttgggtttgttccttgagtaagatttttgccgaaaagcacaaatcttcggagacacctgagacccagctggatgtctgtgcaaagtgccaagaattcgggtgtcctacctgggcagggaagtaagggagagaagttgatcagaagtttccataggggtctgataaaatacaactgtgactgggtatttgatcggtatattacagtgaaacgggcgactgtggatttctgtgccactcagcaaaaaagttgtctatttctcattcaattttattacccaacgaagacgattccagtgactgagtataaggaaatatttttcacatgaaaaaaatgcatgtttcatcaaggggcagcctattcactaggatgttgattcattacaggttaagctatgaagtgtgaggaaatgtaatgctcattagcaataagctaagaggctttgtgaagagaccataccagcccagttttgttcagggctgtgattttaagcaatcattttctatcttgagtttgctgaaatcgaggctggactaggtcatgcctcaggggtagacatgacagaaacagaatatttaaaatggaattaggaaacagtatttcaggtggaattccagggttgagtaagcaaatactaaagccagggtttctttcttttgaagtatgaaactcacgtaatacagcttgcacaactttttctaaggaatgatttaccttttcttactctatcaagtccaaacacccccttgactttggagatcttacataaccccttcctgcctgtccactctgattttccagtacattaaacagtgtacactccttgcggccgtgggaataatccactcattggctccaaccctccctcaagtggtgacctttatccttgctcctccttcccaaaagctattttcaaggccttctcaagcaatcttctttgattactttgcccttatccatcttcctcttctaggatgtagtacttagaaattaccatctactcctcgctgtttggtaagcacacatgtatataaacatgtaactcatgtatattatatatataaagtcatacacacaatatacagtgattttgattgctcttgtcaatgacactcccacttagatttttagattattgtgtgtagggagaaatggaataatctatctctaatctaataggtagtgggtaactgcaatctagaattttatgcttaggttatacactgaacttgtcagggctcttagtaacatgaaatacagacttgagcttagtttcaacctcagaggcttgagtatttccagttttctgtccaggattgctgtttcagttaatagttctggttgttttaaaatcttagatgctctcctgtcttagcttctatccagtgaatacaagtcagtgaattttgcatgtgattttaagaagccccagggtcaattggagcggagtagcatagggcttgtgaatcaggttgcctggaatgagtctgctcacccaactaggtaacctggcacaagttattaaaattatttgtgcctcaatttcatcatctgtaaaatggggatgataatagtacatacttcaaaggtttgccacgagagatgaaaggagataatacatataaagtgcttagtatagagtgtgacacatagttaacactcaataaattgtagttattaattatcattgttattctgagcatgtgggtatgagtggactggtctcatgtggtttggtgtcattctggcaccatttccatataacaatatttgggaagaacagcttattaatggatacgtggaacagtggcgtgtgtgtatatgggtacctgcaggttctttcctatacaaggcatctgaagattggttctgaaaacttttttttagttgatttaaaaattttttaaagtatgcaattcagtagtttttagtacattcacaaagttaagcaacaatcaccactattttttttttttttttttgagacggagtcttgctctgttgcccaggctggagtgcagtggcatgatctcggctcactgcaagctccgcctcccaggctgacaccattctcctgcctcagcctcccgagtagctgggactacaggtgccggccactgcgcccggctaattttttgtatttttagtagagacggggtttcaccgtgttatccaggat

SEQ ID NO: 98626 - DNA, 1115 bp, Homo sapiens
gtctggtttcagggccctggagaacccctgtgttgctagaaatctatgaccattggtgtcccagatcagtaacagaaattacaatgaattttaaagtgatttttttttttcaacataaaagagtggtagttgtctctgaagggtcactagagggagatgtggttccagggattaatgaatttattcaatacagataaacaagatacgagtttgagcaactgatccctagttccctcaactcctcattgagaaatgttgattaaaacgatcatgaacttttaataatgccactcacctccttttttcgtcctctttcagctgctgaaaactttgtagctctagtggaggagctgtttgttgcagatgaactggaagtaaaattctaacagcctgtattgcttcggtatagaaatgaagagttgctatgctacccggtttctctttctcagttttcttactgctgccagataggaactcagaaatatagaccattctgcttccagacaataagttccatatttgaaaccctttgatggcacttactggatacctaattcatgacaaaagtgctttagtcctctagagttttctggtttaaaagtagcttttgtgggtgtgtatcaaataagtgcagcagcatattttgtgactcttaagtttttttaggttatcatgccccaggcattgaaactgggatgtgcattttactgttctcaaaggaattttgtggtttattagcacgttttttttttcaaataatctaattttacttcagaaatctcttagtgcattgtgttgtttgtaaactagtgaaaaataatcttttcttttcatgtgttgcctgagatataaccacatttagaaatcatctataacttccctgataggaattcattcaggtttttaaaacatttctagggtcaagagatcacttaaaaaagagtagtttctttattgatcacttctaaatgttattttttatccctcgtatggagtcgcatcagtctccctgtaacttccatctgttgatcccgttgtctttcttggcagaccaatccttttatacaacagttgtcaaatatctggggggaggccagacacggtggcctatacct

SEQ ID NO: 98627 - DNA, 1037 bp, Homo sapiens
tttcacacctttcctaaatactgatacaggttcatgaatacaataagcaagggacattcttacagtcttttcttacgacttattttctcaaacactctttggaactttgtttccaggcagctgttgtgctgtgtatggacgtgggctttaccatgagtaactccattcctggtatagaatccccatttgaacaagcaaagaaggtgataaccatgtttgtacagcgacaggtaagtttcagattgacactgagcttgtaacccatgtttgaactgcttgttgcctctacctactaatgcaagataccagcctccttatagtgtccagcccctctgtttggggggattctggggagtttccttacatgtactcacatacaacttcacctaccactagagtctgatattttttcttccctcgttttggccccttcactagatattacagtttttatcggaaacaagaggcagtaaaaagtaatgtttaaaagcacaatctctagagacagatggcttgggtttgtatccttgctctgccatgtcatttactaaccttctgatgttgaacaagtccctcaacttgtttgtgactagttcagttatcttttgctgtgtaataaactaccccaaaatgtagtgtctcaagtaacattttaaaaattcatcattcatggttctgtgggatgactgggttgctcagttgggtgattctctattgaggcctcttacgcagttgcaatcagatggcagctggggctggagtcacccaaaggctcaactggaccagatgtccaaaatggctcactcacatggctggaagacgatgctttctagtggctgtgagctcagttggggctgtccgttagaatctctacatgtggtttctgtatagtttcaattttcacatgaagcagctggttctaaggagtatcccaagaatgggttttctatgagaccctgcctatgtggcttcttaagacctatttttagaagccccagaaagtcatttctgttttctgttagtcaagcaagacacta

SEQ ID NO: 98628 - DNA, 1001 bp, Homo sapiens
aggattagaagaaccctttgaggatattcaatttgtctccttcctgcatagaaggctttacccaaacaattagcagattgatggatttttttttttcttaaacagctctagagaactgtgtcctatacagagtgcatgttttagggtagacaggaatgccaacttgggaatcattctaaatacataacatgtttatgtttaactcttttcagatccaaaagttgtggacacatatataaaatttaatttgcttctgttaattcagagatggagtataaaacttcaggggaaaaatatgtatttcacaatttattagggagagaattcctcctcaaaaagtaacttgaatattccctccgggatttactttctctgtgttatatccctaacaaaaatttcttttcactacactaacccttcttgctgcatttgaaacatattttttcttgtcctatttttggtgaaagttgagtgatggtatagaatgttgaattattaatcttctgggaatactcgtttttcaaattgagagctatgccaagaagcctctaggttagagtggtaagcctttggcttcataaaatgcctgcctgggggtattaagaacttgttttgcatgtgtgagtagtcttctcttaagactacagagcgacatctcctttctgtacgactgtggaaaaagagttcagaataacccatcaaaccaatacttgttaagatggtacttcagagaaattaagtgcttttaagtgacacttcttactgagttgaggtttttctcagtacttcagaagcccagcacagcttctggtcctttttcataatctcaggatgcctttacatgttagaagcagactgcatttcagtgaatgtcattcgaaagagctactctttttttccatgagcaatacagaaaagtgcagaagaggaagcatagcctttgcttctatttgctttttatttggttgtatttttttcttggtaatatgctttcttcctgt

SEQ ID NO: 98629 - DNA, 1046 bp, Homo sapiens
ttccatttatgagttccccaccctcaggacttcattacctcctaaagggcctctgtcttaatagtatcatattggtgattaggtttcaaaataatgattttgggggacacgtgtagaccattacagtgtggaagaggccagtcggagagagtgaagccagcataaaggcaaatgaaggtaaaatagagacagagagagtaatccttgccacagttgagaccctgggtctggacttcctaaggccttgtgccaccctgccctttcagttacttggttatgtagtagccagtgattttccccttttacaaaccaaagaggtttcagtcacttgaaactgggagaatattggctaaggtaggtaagagtcgtttgacagatgagaaatttgaaacttgaaaaggttgactgatgtgctcattttctcatagctgatgagttacagttacaggattagaacactaactactgttgatctttcttaatagcttgcctttctcacttggcaaggaagatggaagtggggacagaggagatggcccctttcgcttaggtggccatgggccttcctttccactaaaaggaattaccgaacagcaaaaagaaggtcttgagatagtgaaaatggtgatgatatctttagaaggtgaagatgggttggatgaaatttattcattcaggtaagaattgaaaacattgatgggaatttttaattgtacccacgtaaatttctcttttgattagaggtctcccaaatgtttcctttttctgggccactctctaattagtcattgcttaatattctgagttttattaaagaaatagtacacccacccttaatcaccctttttaaagtttgtgttcttggcacatgtttctcatttatttccaggacctgtgtcagtgaagttcaggaatatatagataccatgagaaattaacaagtcaaattgcaaaagatgaaatagtagatttcttcattatgccaagcttgggatacattttttgggcccttttttttttacacatctacaaaaaacattattaat

SEQ ID NO: 98630 - DNA, 1471 bp, Homo sapiens
tatatacatataaaaatgtgtatctttaatattcagaattggaattaatgaattatagagttgtaaacagtgatgataattataggatggtgccctccctttgatactctagaacagaggttcttttttttttccttttttcttttttttttttgagacaaagtttcattcttgttggccaggctggagtgcaatggcgcgatctcagctcaccgcaacctccgcctcccaggttcaagtgattctcctacctcagcctccctagtagctgggattacagccatgcgccaccacacctggctaattttgtatttttactagagatggggtttctccatgttggtcaggctgatcttgagctcccgacctcaggtgatccgcctgccttggcctcccaaagtgctaggattacaggtgtaagtcactatgccggccctgagcagaagttcttatcctcaggtccgtggttttcagggagttggtagtgaatcctttatattgtgtgcagactcattcatgaatgtgcttttatcacatcctcaaaggtgtgctggtcctgaaaaaatgttaagaacctctggcagagttgaaataaagtattgaataagaggaaaatagagctgttcattttcacctgttagtaaagtaattcagctcctcttcccttctaagccaactcactcttgccctggctatatctcccaacttgtggttgttgttttccggccatctcctgctgtttctctctttataattaacattagctcacttctcattgtagaaaatcaaatgcatcatccagcacaagttaacatttaaaaattgttgctttcattttatatttttctttattaagtgagagtctgagaaaactgtgcgtcttcaagaaaattgagaggcattccattcactggccctgccgactgaccattggctccaatttgtctataaggattgcagcctataaatcggtaagtggcaggtacacatttttaacagaaatgttaccaggcagataaatatgtgtatataaggaacagacaattcatgtgtgtgttactcggaaccataattactgcttttctagttgttctccctgctcatttaatctctgtttagctttttgtgtaaaaggcaggctaggagaggaagtttaaagaattgtctataatagagtttgatttcctcctcttttactttctctccattggtaattgattgttaatcataagttctaggcctgtctcttttttttaaaagaaagaaaatgaaatgcattaagctgtgttattgtagtatcatagcagaaatgtagataatgcaccaaagttaagttcagttttggagctcagtgacacctaattcaattatgaatgatctgatagtaacaacatctgtgaaatgtaaaaaaatgttttgttactgtaaaattgcattttataatatatgtacatttatatacaatagcaca

SEQ ID NO: 98631 - DNA, 1085 bp, Homo sapiens
taggccaggagttcgaaaccagcctggtcaacctgtctctactaaaaacacaaaaatagccaggcatggtgatgtgcgtctgtagtcccagctacttgggtgtctgaggcatgagtatcacttaatcccgggaggcggaggttgcagtgagccaggattgcaccactgcactccaacctgagcgatagagcaagactctgtctcaaaaaataaaaataaataaataaaaatattagacagtctgaggttttgtatagaaagtgtgaatgtaaatatttgtggattacttttgggagaaaatgaaatgtagagaaggttatccagtatattttgttatgaaataaactaaaattttcataataggcatgagcaaacaaaataatggagctagagtaattgttctggatttttgtctgtgccagagagtgtattaggttttcatcttctatcaattggaatcctaactttccttgttttccctttgtgttttggaatgtaagattctacaggagagagttaaaaagacttggacagttgtggatgcaaaaaccctaaaaaaagaagatatacaaaaagaaacagtttattgcttaaatgatgatgatgaaactgaagttttaaaagaggatattattcaaggtatgtcagtaagagttttcactgttgcctaaaagacattttcttcaacatgatgtgatgcaggctggggtttgtattattctttgtttaaagttatttctttgagttatagaaatataacagtttgaaaggataatgagaccctaggtcctttagctcatttgttgggtcttaggcaggttgcttctcaggagtacacttgggtgttccatctctgtgagttttaaatgtcttaagtgatagtactcaatacttggctttattttaaagtttgaaactcactagctaggagcatgtttaatatggttgaactaaggtttttttgtttgttttatttttgactttcatggtgattattcttctaagggccaacttcaggttttatgtcctaccagatatgcttccttaatttaggggctgaaaattatttgtatttattatattgc

SEQ ID NO: 98632 - DNA, 1772 bp, Homo sapiens
aacaaataaacactagatcacagaatctgtccctggatatgaaagttttattgtgtcttggggtaaagatgcatgtgcttttcctttgcatttgtccaaggccagaatccttggattttgatgctccttcttcccacaaaacatagaagatactgtgtattgaaagggtgtgatttttcatagaatataggctacagaacagggctggactttttttttttttttttaagaagccgagagcctatgtttatataaatatcctatgtaattaaaaagaaaaatacagttaaatcccagaaataaaagaaatttaaatatagaaaaatatataacttatcaattgaatgtttccaaacagaagagttttagcttctgtcaggcattgcatatctccagcatacgtttttgagaacattttgttctgaaaatttcctgttggcatttttctctgtgggtctctaggtttctgaataatgtgttcttatgtttacaaatcatgctgtactttagtcaaccatggtttatctttggaggataactagtacgttaacatttgccagattttttcttttaggctgggtaatcattgagctaactagattgcaaaatatgctactttaaaaaatgtaattagattttaatcatctctatattgtatgtgtggtttgtgtatctgctgctgctttttcaccattgatcacaaggggcagtcatctgattccagggaatagaagatggaggcttgctctggcgtgtgcgtgtgttgttaatgtatgcatggaactaatttcagcttgtagaaaatgaggccccatatgcttaacagatgctcttctctttttctccagggttccgctatggaagtgatatagttcctttctctaaagtggatgaggaacaaatgaaatataaatcggaggggaagtgcttctctgttttgggattttgtaaatcttctcaggtatgattgtgaacaaactaaatgagctttttcctagctgttatttgaaatggtatgcttttgattggtcattttatttataaggtatatttatttcacttttaatttttctaaaatgtagtctgggggttaatgttgccatggtatgtattttatacattgggaaactgaggttcagagccgttaagtaaatctatatgagcatagcaaactaaaaatacaggatggtttttgaatggggaatggaagcggagatgaggggtatttgaattatgtgggcctaaccctcatccctttgaggttcagtcttcttgagctggtattatggtgaaagtgctcataatgtctcaactctagaggtgggagggcataaaaatgcatgagaaacattgcccaatacagcacattgcatgttcttgaaaataaaccgcaggctccagatttcatagatcagacaaagttgatcttggtagataagtgcaggtggttatgattttcagaactcttcaatactcattttctaatctggtattagtagagctgtcttgacccctcttgatactgtgctagataagttaattgaatttaagggggtggggggagagacatgcagtacttatttttgatttaatttctctttctttcaacccttcccctctaagtcttcactcaagcctctactgttcatcagtgcctcagtgttactcttaggaggaaatgcaaaccacttagctttgtttttaggagacttcatcatctgatctttgttaatctctgtaatctaatttttcacctttcctctcacacagtg

SEQ ID NO: 98633 - DNA, 1095 bp, Homo sapiens
atttatctattgaagctcctcaagggcaagattatgttttgttcactgttgtgtttacagtgctcagataatcttgaacgcatgctgggtgctcagatatttgttgtgttgtattgaattaaacttcaggtaataaggtgtttttagtatctgaatgtttttcagtaagaggattttgaatggaatttcttggcaatgtgtgtcatggttatacatgttacttattttggatcaaaagcaattcttttcctctcttgtaggttcagagaagattcttcatgggaaatcaagttctaaaggtctttgcagcaagagatgatgaggtgagttggcagcaggtctttgaggtagtgctacagaattgaattgtaagtctatgaaagcaagttgtttggggcttttatagtttaaaatgacatgaattcttgcaataggagtggggaaatccactgatgtttaactgaaaatggagatgtggtaaatggatttgtgttagcatgagcacaagacccgaggacatggagaccaaggaagtattaaaaacattttgaaccactgcatttaggaatgggaatttcacagtcaaatgttaaggagggttggggtcaggttgacattttgtgttgtcataagcatcctggatgtgcacttcagtgactcactagactgcttttgtcattgaggaaatgtgtcttttctctattcctctctcttggtactcttcctgcctccccaagatactctgttttcaggctggtttttctctagctaacagcctatgactgctgcattctatactcacatctgccctttctgtaaatatttactgtttgatctccaagttagaactaactttgttggagatactgattttaactggaagattgcaatctactatctgtttaaggcagctcaagcaggtttccaagttcctgaagtatttgcatttgtaattaataaactggatgtagaaggcttgtttggggtgggggtagggtggtggtataactagtatagttctctttttctcctcacttctggaaggtagctggttgctgatatagtggatgggtatgccattattatctcagaaca

SEQ ID NO: 98634 - DNA, 1806 bp, Homo sapiens
aatttcattaaggaagtgggggcagtagctggactagactgaagaataataatgcactaagcagtggaaacagcatgcctattattttaagaaattcagaggtaaagacaggaaagatactgatagcaatttgtggagagggaaggacaaacaaaagatttgtttaggagggctgacatgagtttatttttagggtaaagataaaaatttagagaaggaaggttgaagcagtaagacggatttagttaatgaggttaagtcccagaagagctacagtaaatgtaatcaaaagcaaatgtgtgcacttcgtccttcaagtcagggggcaccctaaaaaatgtaaaatagaaagaaagtgataacagtcttaaagtattgagttctgttgtgaaaactctcacatgttgaatatgtgttaatacatccatctttcttaccaggcagctgcagttgcactttcctccctgattcatgctttggatgacttagacatggtggccatagttcgatatgcttatgacaaaagagctaatcctcaagtcggcgtggcttttcctcatatcaagcataactatgaggtaaaacccaaagtcttaatgttattttttttcttcagttcctttattctaagcagtgtttctcagctgttaatgttcatgacaattacttggggatcttgttaaaatgcagatcctcattgtgtagttctggggcagggcccagattctctgtttctctcgagaaatgctgatactggtctgtgaaccacactttcggttggaggaaaaagtatacgttataaaaataatataagaatcttttaattataaagtatcataagaatctttttattaagtattatgaaaatcgttttagattaaaagaataatcaataaaggttcaccatggccttttcttggttctcatccttcttgacttattggaaccaaatagagaaattacctccatttttacaaatgagaactatgaataaaggctgaggatatgattttgttgtgatctttgtgaaacggtttatttagggctctcttgtgtaaaatacagttctaaattccttatcatttcctctgtctcagagaacttactgtggccgaactggaaagagaaggcacatatcttgacttccaggtcaaccttctggtcaccctagtcttctcatttgttgtattggtcatgcatttgatagcagtcctttagtattcttttatacatttctcttatgcttaatattctttatactgtttgcagttgtgaacagccagtagcagaagtcaaaacacttcacttttcatatgccagagttgggctgtccgatttttgaaatatttctgttatgctactttcacagaatttgggatcagttttatattttttcattaatttcatcgtttctgcttttaccccctttctttctcattagtgtttagtgtatgtgcagctgcctttcatggaagacttgcggcaatacatgttttcatccttgaaaaacagtaagaaatatgctcccaccggtgagtttgttttcatttagatcactcattgactacacacactgttcttgggaaatcacctgtctgctagttgttggttggggctaggtatttatagggtgcaattagttggatttccaatcatacacttagacacagtaatgatgaaggtggtttacttggtgtttttccagtagtagggataggtttgccttaaactcacccaacactgtctagtttttgccttggagcatgtacctaggggaaagcttgatggtaatggatgtccatctct

SEQ ID NO: 98635 - DNA, 1202 bp, Homo sapiens
tcttgcctcggcctcctaagtagttgggactacaggtacgcgccaccgtggctggctcatttttaaaattgtttgtagagatggaatctcactatgttgttgtggctggtcttaaactcctgggttcaaacaatcctcacatctcagcctcccaaactgttggaattatgggtgtaagccatcacgtccagcccagaatatttttaaaaacccagtttattgataatttattttgtcgacataaatcactcaggatctgaaacattaaatatcttctgttatctattttctgtgagttaacatttgtttacattttctccattggaaaaatggaacattaaagttatttcatgtatttcccagtagatgtctatgtaggaatgcaatgccaggatgatctggcctcctgctaccttgtagtagtaggtgaaaatcactgaatgttcacatgtacaagtactgccccctacctgttgctgggagggccttgaattagcaagttcaagatggtgttggctgtgccattgcctgaaacctccatggtttcaccatgaaaagtccataaatgggtaaaaaagaaatatctgatgataaatatctgtatgctcttttattttgttgtagctgtacaaaagggatatttgaaaaggtgcagaatagaagtataatgtactttttaggaactacttactcttttccaccttttgcctggtgactgtgaatgttccagaaatagtgcctcaggttcaacagctgaactgctgtatgaatcagtaaaatgaaagttacacacagtagtttaggcagaagtatttttgggagaattgcctttcgtccatattgctttgggctgtaccatttttattgactgagtagatttttattgaggagcacttgttttttattagtattaggagagacctaaggaaagaggatgtcgtatttctgctctcatggaacttgagagtttgaatggagtagggcaagacatgtacgcaggtgtgagtagtgtcatggaggcattaagagaggagagagcttattcagcctcagtagattgtgaaggaatcagctcaccctgatccaatggtgtcttcctgttaaggtgctgtactctgataaaagttatattaaagtcattaaaatgcttatgcttcattaccagagaggttttttctttttaatgtttttcttctttagct

SEQ ID NO: 98636 - DNA, 2121 bp, Homo sapiens
ggaaggaaaacatcaataaactgatagtttcatttctttctttgttttttaatgacatctaatcttactgctttctatactccttttagagcatttccttttctgggcaggccaaggcctggcccagtagacttgaggcaggataggtggttgaatgaggtggcatgctgtgtagaacttcactcacatgggcagtggagaatttgccctggccttgatcttggcgcccctcccccttggtgttgcttcttgacaccgctgtcaacaactagagccctggaaaagagcactttattccttcagctgttatcggccaggtgcttattatgtgccaggtagtatttttggtgcttagaattcattcagcagtaaagaagagaagagccctacttgtaaggaggagggttagataataaacaagtaaactaaaaaattgataattttagataatgatggagcctataaaaaatataaaataagggaagtgacagaaaatgactggggtggtagaatggggtggaggggctacttcatatagagtgtcagggaaggcctctctgcggagatagtatttcagcaaagactaaaatgatttttaaaaaaagggcaagggtggagctgactcttgaggtttagggaaagacagaggaggcagaggtagtgttaagcccaggccccaaagttaggatgagcttggtgtatgagcgaagcaggagcccagcctattggggttgtgagtgaggagaacaagtggctggtgatgcgatcgaggaggcaagcagggctgcatcataggaccctagggtatggtgagcagttcattctcggaccacttccagtcagacagtggaaagagaagctgggaaaccagttagaaggtgactggtaggccagggatgaggtgatagggcttgggcaagaatggtagcagtggggagagagaaaggtggatggacttgtgctgaaaagtgcaaactcagcactcagggacaactcagtattctcatctcttttgcagacctctctctgggactcactgagcatgggcagcttccctgtagccacctgtttcatccaccacatggcattctctgagattaagtgagggagaaagcacagcatgattaagagagataaaaggattataacaagaaagttataatcccagattatcaggtcttagaatcaggtattttagggaatcttgtatattccccaagtagtaaaaacaacagctttgatttataaggtgaggctcctttccaggaggtccagagcagaagatactgttgctaggcttggatctatttttacaattggttttaggtattgaccaatatcctgccaacaaaggtggttctaggtgaatcctcttgattgttttttacatgtggtatgaatcacttagccctcccacactaaagatggaggatccctgatcagaaaatataaagaagccatatatgtctccatctgtgttttaaaatccttactttttccaacagtgtctgctgcacagagctttacatccccgggagcctctacccccaattcagcagcatatttggaatatgctgaatcctcccgctgaggtgacaacaaaaagtcagattcctctctctaaaataaagaccctttttcctctgattgaagccaagaaaaaggatcaagtgactgctcaggaaattttccaagacaagtaagtacttggtatagttgcatttaacattggggtacataagagttgtggtcattttagagtggctctggaagtgtcacataggggtctatggaatttaaaaggtgagaggaagaagccttttgctatttggcccttatattgaaatattgatttcttatatctgtctgctgtgatcatattttatccttgctgttcactttggatttagagctaccttctgggctgatgactttttgatcagcatcagattcttggtgaattatatataatgtataattcagataagtttctgaatatctaaggctaaatgtcaccctttttaaagtaaagtactgagaatgagtgtgttgaagatcataggttttttgggttgggaggagattagatgttggggatgtcaatgagatttttggaggaaa

SEQ ID NO: 98637 - DNA, 1964 bp, Homo sapiens
ctaggaaagggaggcagcttgtttgtagaaggactacatgtagctattgtttttcttttctttttcttcttcattatttttcttttcttcttcttcttttttcttttttttttttggtgcttggaaaataagtttcacaatagcaatctggttttgtattgtttgttctaagagaaattttttttttcttttctagccatgaagatggacctacagctaaaaaattaaagactgagcaagggggagcccacttcagcgtctccagtctggctgaaggcagtgtcacctctgtaagctaagcttttcaagtgcgcttccccctttgcaggaaggttggggcttgagggagagtgcatcaatttttgttagtccgttcttaccactttcaagttaagatcatgatcactttctctggtccttgctctatagaagccaaaaagacccattccatacttctttaagtaattattatcatgaattgcctacagaattatctatatgatataaggtatatagagctctttatagaacgtggaacatctcagtgttgagattttgctgttggcattattttgcagcttttcaactagtcaaaatgataggataagtgggggttagtgatacgagccttaatcttcaagtacacacaatttaagttagtataactttcctattttctaacatgcaactttagaacaggattcacaagtttaggatttccccaagaatgtatcctttgatacatgagatttttattgaatgagaaattttttggaacttgaaaatactaccttaattaattaattaattaattaattaatttttatatcttggtcagccaggaggaagaatattttatttaattttagagataggttgtcactgtcacccacgccggagtacagtagtgtgattttagctcactgcagccttgaaatcctgagctcaagtggtcctcctgcctcagcctcctgtgtagctaggactaagggtacatgccaccatacccggctatttttcatagaggtggggtctcagtatgttactcctgggctcaagcaatcctcccgcttcagcctcccgaagcactgggattatagtcatgagtcactgcacccagccaaatagtgccttgttctaagcagcattagtgtgaatcaacaaatcttaaaaattggccgataactttttaacacaatgtactaggaaggatagtcagggaataaagggcatgcctttattctcacctcaaacagaaactcagaaaaattgaatgtgtgaaaaatgatttagatttcatttagatgttttatatataatagtaaaggaaaaagtcatgatcttgttctgagagcttttctgcttcctatatccaagcaaactggaagctttagtatattttggaaccccattgttttctttcttatgagctgagtggttcttaggccctgtgagggttggggccagcagattaaaaacataggtataatcagaaagttccatataatatggcagtttcgtctttcaaacttcctcacccagcactgcagtacatctttgtacataatctgcttttactttctgaggacatgttcaacctgggtatgctttgtatattctaccaaaacttcagtgccaaagggtcagcagcagtcccactaatgggcacttcggtgaatcaggcattaagctgtatttctcatgttatcttagtggggcaaatctattcgaaaccgaccccacactgcagaatcctcggctttctaattggttgggtgacaggatatacaggcagtctgtgctacacaaagccttccagctgggctggctggtggcttgagttgtaatacttttttgacccttctggaaagaaatcagctttcataaagcaaggtgagtgaaagcacagagggcagctcttggaccactgaaatctgccggcctttcacagagccctagaaatg

SEQ ID NO: 98638 - DNA, 2468 bp, Homo sapiens
tgtttttggttttgagatggaagaagagctttttgtcctgctaaaagttgccatataggagaaaaactttgagttttaacacaaaacaaaacctcatgtaaatagaaggagatctgaagttctaagtgacagttttctaggattggtgaaaacagtacttcagaatttctctctttaatgtattggagtgatcaagacactttcacagtattatacctgttgtctgttcagctgtatattgttacagggtgctcggaaagtggcggagatgctgctgtgacaagtcaatgaactcttgtctatcaagactattgtgtttttgaaggaaaattgagactttcctagctttcaattgtatgtcgtcaattacctcagccagtcaaagtccaaggtcccccgtttggaagtgattggactctgtggttggtgtaggcatggtcttttcagggactgaatctagctgtcatcaccattatatggtagccactagcggtttcatatttactatgttcaaggcattgtgctagcacttttatgttattttaattaccctgcattagcagttctgcaaaatcttgtgaagaaatgaagaaaatgttagagctttaacagcttttgccagaattttctgagaggattgctttacttgggaaaataactttgataagtgcttagggtagagaatgagtctccatccccagacttggttggctagtccagaggcttcggaggaaaggaagctcctcagcatcatagaagtagaaaaactggagctggtttaggagaggaggggcttagaagaagaggggagaggcagggagacaaagtgggtgaatttacgcacagtcacggccttctacaatacgtttcaaactcatgaccacaaattactcagtgtcagtacaactctggaaatgccaggtttaagtgctgtatttggggaaactggcagtttggtatctggcattatttcatgcagagcagagaaagcacctgagcacacaggaggccagagtctgaaaagaccaggagagagtcagttactgagaatctactcacatcttaggaaaatatgtcttacccctggccatgggattggggattcagagcagtcttgtgaaaatagcaagggcaagcggaccctagatagcatgtaagttaacaattagtattattatctccattttactgatggataaactgtaaaattggaggagatgcattttcccaaagatcacataggaattcaaacacatgtctctttcaaatactggattttttacgtagccatattgtttcttttgattcctaatgacttcctttcctacgctttttaaaacaacattttaaggtcgtgtatctgaaaccttgtacctactgataggacttttgatgaatagattgttcttttatattgaatttgactttgagacccagcatgttgctagtatttcgacaaaagatgtccctctgacctccgtctaagacttggtgaatcagagccctctagtgatgtcacaaaaccagactctccacagagctgtcggaaaatggattgcttattagcaactagttctcgtgattttaacttggcttccgttttatcccttctgccgttcttggtgccagctccagaattgatgtcctgttctttgttttgggcatcttgtttgtttgtttttccgctagggcatctttttactaacgccctttataagccaagactcacttctcttgcaggcccaaagagttctccctccctagtagtggtcttcttttagagagatttctgtccagagtcgggagacaggaatcccttccccttttctccagtaaatttattttttaaaattcagttgtcaaaagggcgatcagcgatagatagttggtaagattgtttgacccttaggtagaactcggctgttttacctatcattataaattaaaatatgggtgtagttactttttctcaggcctgatagtagcataatcaaactgagagtcttgtgattctgtccccgacatcagcagtctatatatagtaggcagctacacattttcttaacttctggttttcagtgtgagggatgtatcttgttctaagcttactggcagagaggagataaccaatgccctgaaccccaggaagcatgttctttctggctgcccttttcccagtccctttcctccattctccctacccatcaccattctatcaccacagagttagaatagaaaacaattttttttctcttttccttttttgtgaaggggtctcagtctgtcgcccagactggagtgcagtagcatgatcacagctcactgcagcctctacctcctgggctcaagtgattctaccacctccaccccgccaagtacctggagctacaggcacacactaccacaccaggctaatttttgtagtttttgtagagatgaggtttcgccatgttatccaggctggtcct

SEQ ID NO: 98639 - DNA, 2174 bp, Homo sapiens
gctcagaaaaaattttgaccacagctgtatatataataatcatctatcagttatgaaagtagggttgtttccctacatacactattcataagcacatcattgccatcatctgggatttgttacctgtcgttgtgggtttcagagtctccagaggctctttacattgagtttatccacttgtttggatatcttccacccagctaatcaacagagttgctaaggaggaatgccatgattttcagctccttgcgctttcccaacttaggaagaatgctaaaataaaataaaataataaaatgtcaaaagatagacagcaggttcaagaaggaaaagccacattacttctttcctccggacaattcctgcgcgattatgtctgaatttataaattcccactgagtatgggagataatgtaaaatagcttgaatgttcttggtgtgtcaaaaacaggttttgtgaggatcttaagagccagaaaggatggatatatggggacagataaaaggatggaatgtaacttaactttataatgagacgattctctttcagggaccttgtttttgccactgagattgtagtttctgtattaggcttgtgtgtagtgacagggtggcagagctccatgttaccaaattgaattcacttgagcctgactggtttaaaaaaagtctgtcaagagaagacctaagtagaaataatacagaccccaaacagccttaacatttgactcatgtacaagagagcagtaatatgtacttgtccatttgattagaaggtgatcacttcatttttttcccctttcactttgtttggattacgtctcatcctagagtctttttgcctttgttcttcaaccttctttaatctcacttactagaaacatcctttcatttttaaaagatatttcctaaaattcactttttccaagcaatttcagcactagatagaatatggtacaattagtaataatatgatattcatcaaagccaaatagttttcagtgttggttttgtatggtatagcactatcccatttgcatagctgtttacttacatacattatgtgattttctgccaggagtcaagccctaaacagtgaaccttcgagaattgtgatctagcagaaatctctctcgtgtgtgtgtgtgggtttgtgtgtgtgtgtgtgtgtgtgtgtgtgtgtgtgtgtgtgtgtgattttttttaattgatcctgattcatgtaatcttgggtatgaattatataatgaattatactctgcccagatagataagaagataaaaatatggcgtttttctacacagcgctggtaaatttaagaaaaataagctctttcaaataccttgagcatcttaaagatgctaaatacaaacagtcactaaaattttaaacatctttagccctataaaagtttttttcttaaagaatttgacatacttttttagtcctttctccaaatagcattgatacatctaatcatgagaaaattcatgattaaggattccagaggtttagtctgtactttgtatttttattaaatatctcacttgtttttcactggttttctttttgactcattttaaattattaaacctcagaacctgacaatccaggcttattttatgcctcatttatcaggacaagtggtctcattgtaacacaaaaatcagtgtgtttggaattgtagagaatacttgctgaaagggtgtgttatctgacatcgtaattatgcaccattggcctttaaggtgttgttcatctttcatgtgggcggactgaggcccagagtagttaggatgacttttcacagataattgcaaatatgtgaaagactctggatcaaattccagagagccaattcttggcctctgtggcttaaacctttttactggttgtgtatatttcattggatggcacagcaccaccctgaagtttacatcttaatataatgaaactcagcagccaaataatttagatgaaatcattgaaatagagatgaaaagaaaaaataaaaagcacatgacgtagaaactaaagaccattatgcacacataatcattttaagtattttcatttttcagcgactcttcctaaaaggctttcatctattcttacccagcctttaaaatccttttaagttcctgtcaatctgtatcagaatatccctaattac

SEQ ID NO: 98640 - DNA, 1748 bp, Homo sapiens
agtgagcacctgaatttcttcctgagagctttttaaaaagtccttatgaaatatatgacagtgttcctgttttctcccagtgttttgttttctcatgctacataggaaagttgcttcccttaaatgtgctgagtaatttttctctttttatattaaaaatggaaagaataatttcccatctggctgaaaatggaattcatgaaggctttctcagcatcataactagatgagcccagagtccattcaagcctttacttaatatactaaatcactcctgataccagtcttctatgaaggagagagagagagagagagacacttttaaaccatgagatatcaaaagaactcactgtcacaagaacagcaaaggggaagtcctctgccgtgattcattcacctcctaccaggctcctcctctaatttgatatgagatttgggcgggacacaaatccaaaccatatcatttcagcttgcatcaatgacttgggccatcagtgcaacaaggcaggtgctcacaattggttccgatggaaatgcagaactcttgggtgcttaggagaaagggcctgcagcttgctcttagaattcacccttgcagtaagtgctaatgagtatgatttgtgagacagagagcagttcaaggatttactcatggcaatttggttctttctttccacctcctgttaaattctgcagttcttccttccatggtaggtcattgtcatgtcatgtagggtattgtacttggttctccttgaattgggctgtcttcaagattgctccttaagcccagctggttgaaaaaggaaaccggtttcagattgtgctgatgtgcaaactgctttaatcaatgacttgaagtgactgctggtggcaaacaacagacgctcttaaccaattaagatatttaggaaaggatgttaggcttttgttaaaatagtcactaatgaactgaaatgtgttaagaggagccaagaaacagctaggagttccacttaaatgcaataaaagtgtttgggtcctcccctttcaaattgcatgcccaaggcaaaaaatatgctgacacagaaagaagtggcaagtgtaatttggtacagttagcctgtcagatccatgcgtgtctacataaaacctagaaaaatgtcgtgcttgcttctttggccagaaaagggaagggagtttaattcctttatagaacagtttcagcagggctggagaatattaccagcttagatgtctttggaaatgggagaaaatttaacttgtttttagaggttccttatgttttagaggttggagaaaaatcttcagttaatagtcataattaaaggcccgtttttattttcctctgtcagattaaactactgaaatctgtagttatctgttcatgtctctcagtggtaatgaggctcagccataacactcaggataatatggtatttcattggtagccatttgaagtcaggagccattgctcatataagaactacttttttacaattcccttgctcttggaatccaataatgttttcttggggcattgagagtaagatacactgtctaagttttcatacttattctgtgatagaaacatctagtttctctcttctgtctgtggtaaatctctacaagtctcttagataaattgcacttattaattctactttttaaaatagctttattgaagtaaaatcttctactataaaatatactggtaagtataatttgatgatcttttgtaaattata

SEQ ID NO: 98641 - DNA, 1599 bp, Homo sapiens
cccatgaaaattgtcttcctgttgagagctcactagaaatagaaacaattgttttttatctccttgtatgacaatctcttaactgtttcgagatgatttacttgcttcttaggcttccattaaaaataagcacatgcttatatgggggaaaatgcaaatagtaatataatagcatataaagttaaaaagtggacatctccttctttattgtctccctccctttgaaactctgcccatacccacattctgtgtcttcataggaataaccctgttcatccctactgatgccctgtattgtgatcaagatggttaattgttttagggtataataaattggggatatagtcagagacagtacattttgggagaaccctccattcccagtggcatcaagcagcttgatcaaagaaaagaaaaaggtgtacaccaagatgagatgaggcatacttagtaagcaataataaaacgtcaagatgtcttcatgcatataatcatgacaatgttggatgtgatatctcatccctgtacatctgcatatatatcttatatagcatgttattctttctgcatttcccccttcaatagagctttattgtaaccatttccatctctgtaaaattaagggagggaggggataaaagagagttctagactgtctactcccctaagtggcagccagtgctaaatacacagcttatgggtttaaactgaacgaacaacaaaaagacatgttcattccttaggcttttagaggaataaaccagtgaggcctacaccatttattcatccattcaacaattatttgttgaatgcctactgtgtgccagtcataccaagatacagacagtaaacaaataagaaaatatatgtcaaatggtgataagcatttgtgttagtgtcctagtgctgcagtaatggagttccacaaactgagtgccttaaagcagtggaagtttatccttgcagttctggagactaaagtccaaaatcacaggactgcttccttctgagaggtatgggggagaatctgttcaatgctctcttgtagcctttggtgacagctggcaattcttgcatcccttgacttatagatccattactgtaatctctccttctctcttaacaggggagttcttgtatgtctgtatccaagtttgcctcttcttataaggatgtcagtcctattggattagggcctttcctagtgacctcatcttaatttgatcacacatctgcaaggactctctttccaagtaaggtcacgttgtgaggttttggtaaggacaggaatgtgggggcggggtggggatactattcagcccatgacagcactatagagaaaagttaaagcaggatagtgggatagggaatgctgggttgagatgggcttataattttatgtagaggatcagggaagtcctcactgttgaactgagaattgaggatagtgagagagagaacctagtggatatctgggaggagagctttgcagacagagggagcagcatgttcttgagaagctcaagatgactatgcttggctagaagcatcagggaggtccgtgtgactggagcaaagaaagtaggagctgagaagtca

SEQ ID NO: 98642 - DNA, 1730 bp, Homo sapiens
gcaacctctacttcccaggttcaaacaattctcctgtctcagccttcctgagtagctgggattacaggcatgcaccaccacacccagctaattttgtatttttagtagagacggggtttctctgtattggtcaggctggtctcgaactcccgacctcagatcatccacccgcctcggcctcccaaagtgctgggaatacaggcacgaaccactgcgcccggccttgagtttcttcattggcatttctgacaactttgtatccatttctcttctgctttctaatcatcttctaatttacttctcaggtctgtcttttcctttccatcttatcactatccgaattcaggctttcattattttatcattggacagttccagcatccttcattaataaccttcaaagttctccttcattcctgcccatatgtttgtacagatttaagttcttatagcacagattttattctgggtcagcccttattaattactcccattcagtcccccattcaaggcttgccacaatctggtcccattctgccactcccgacccattcttatacagattccctctgtgaaccttgtattcaaaccatgttcctgctaatgcccttgcagcatcggctttctaaagctgattaactcttttaaaaaaatggccattcttatctttacccccaaatcctactctaaagagatgcttgtgatttgagaaccggtatatctttggatcccaatgccgcccgtagttttattgtagtatgactcattagatactgctgctgctttaccatcagtgagacaaaatgacctccatctggcttttttggttttcattgcgactttaataaaacagtgcttgggagtaataagaatttgaatttttgaattgtagcagatttacttctctggttctttggatcaattcctaagtcttagccccatcaaagaagaagtgcagaatctaacgtgtctgtattttgacctctagaatactgtaaaactttcttcataaaattagaaaggatagaggggggaaaatgaaaagaaaaagaagaatctgagaggtccctaaggaaaaataccgtataaaccaaggcattatttatcagtttttagaaggagttatcacatagaatgtggtctttctaaaatttctggtacctaatatttcctttcaaaaaagactcaaattcttgaggcatcctagaagacttgtgtgctgcctcccccttgtccaccctccccaaaagcacattcaacaatggctgcctgtttctctccttggtgaggagtctgactcatcattcactctgtcttttcaactgatacctgcgtttcagttccattcaattaccaacttttaattggatcccattgccagattgattttgtgttcctgttccctcttggctgcactgttactatgactacttggtatcttctacttacttcctatattagtttgatgacatctagtcaggtatgaagctagatagatactataaaattgctacagtaccaatcactattatcttacatttttcctttcccctactgctcatttggaatggaatcaagcatggtgataaggttcttaattcttctctatcaattttagtaagcattggcaagttttagaattctaggaccttggaaaattgtggagaccctcttcctctgccctccctagtcttcaccccccaccacaacacattctttcaggcatatgg

SEQ ID NO: 98643 - DNA, 1027 bp, Homo sapiens
gatttttctgttctgaaagggaagcagggaacttcttttttgttagattgaggaagtttggggcaaagagctagcagaacagtttctagaaggtggaagaactgtaggctaaggcaaagagcagagctatgtctgcttctcagtccagctgcttaaaaaagatgacaaatttcaatgtcattttcaggttactcaagcttatgcttttttcctagttctctgtttcttttgttgccatccagtgatttatttttcctcaataagaatatttcattaaagaccatgcaactagaaaacaagaataccaagagcaaagagcactcttcagtccgaactcttttagaagtggaagcagaaagaagggtgtttaagaaataagtcagcactgtgtgtgtgtgtgtgtgtgtgtgtgtgtgtgtgtgtgtgtgatttagagaaaaaatatttaagataccttctttttgtacttaaaatttcataagtacgtttgacttctgagaggaccagaatgccatgggaagtgctcagttgcatccagtacctgttgtttattgtcatggtccacacggttgcatgtcacaaccgtgttagaactgaaggaaaggaaatgtatgtaactctaaagacgtttcaagtagaagtgaaaacaatatttttttacataatttgttttttatagaaatacagcttttatcaaatgtctgggagaagctttaaatatgcttttgaacttcttcagtaacttttaattgaatttcattgtatcctacctcactagaaagaaagaaacctgcaaattttagcttcccttataatttaaatgatgccttgctaatttctgtgtttttgagatggagtctcaccctgtcacccaggctggagtgcagtggtgagatcttggcccactgcaacttctgcctcccaggctcagatgattctcctgcctccgcctcagcctcctgagtagctgggattacaggcatatgctaccacacccagctaacttttgtatttttagtagacgggg

SEQ ID NO: 98644 - DNA, 1011 bp, Homo sapiens
ccttgtgagttcataacacactgtgcccttagatcccctcctcaccctcccttcttctgtatgccctgcatctgagggaggtgtgggcagagctggctcttgtaggttgcatttcccaggctcctgtgtctaaagacttcctactgggttcggcatgagagatactggtgggaagtagggagggagaaaccggtgtatctcttcttccctttctatgttgggtagcatctttggtcctcagtgtcttcagctcccataggacagatccctgaactctatttatacccttttctttttcctgagtaccaagggatgctaagggtttcttgctgttaccaatcccggggttacagcaccattctcagttggctttaacacacttcgtaacctgcaaaacaatttcctgtcttaagtctcctgtgttaaatatttggagtggtttatattccttgtgttggtccctgactgatacacacaccgcctctacccacaatggccaatttatatccgatagtaaagaggcataaagaaagcccgcttttgatacgtttcttaaattgcctctgttaaaacagactttcttatcaggcaaatatcttttataagtttctggcttaaacaatgattataatttacaggtggatttaatttatggtagactggactgcttgcctagacttttatttgctgatgggcattactcctttttattctcttaataatgaattacctgaccttatacttattttgatttaagtgcttgatttttattgtcacttttaattttgtgttataaagatgcaattgtcattggctacataaatttgtttttttcttttctttttcttttttttttttgagatggaatctcactctgttgcccaggttggagtgcagtggcatgatctcggctcactgcaccctccacctcctgggttcaagtggtttctggctaatttttgtatttttagtagagacagggtttcacaatgttggccaggctggtctcga

SEQ ID NO: 98645 - DNA, 1938 bp, Homo sapiens
cagccaaatcatttgaggtgtcttcacagtcttttatatataatgtgtgacagatgagggaacctactgctttttgggctctgtcagatggaggagaaaatcccacaataaatgacttcctttcactttgttggaaacatctttgcaaagaacagaggtagtgagtaaatgtaaagtcagaggcagacatgcacatggccctgggtgttttgaccttggtgactgtgcaatgagaggggaggtgtagtccattttataggactttgggtggtgttgaatgtattcagtagagaagcagaatgtgtatttcagattaaacaagaaaacttcgccattttcctcttctgtaacatttctaaatctggataacattttgaatatgatactgaagtattgtattgagattaattttgggtgtcaacatctgtactcatttaagatactgggttagtatatgatgcccatatctaaaggttttgcattttctaaaacctcaaaatccaaaacagacatttgaagtaatcctggaaataaatgacagccatttgcctgacttagtatcctaagatggatggcccttccaatggccattttttattttagctactaatgagtattattgagtcactaactaatttcgaaaagcattttggtgaattataattggggctgtgatttactgagtttgaagactgataagccattcctcagccctgtaattaatgtagaagcagagaaaagcaccctgatgatcagcatttcctttatgtggggcaggggagtcaaaagcatattccagccaaatattatagaatattattttttcagccatttctgcattttacttttattaaaaatggcagggaaatgtgaagtgccacaaaactttggaaaggaagtctcttgtttacatcccttttgatactcagtatattcaagcgtcatccatcacagctattccctggtgttaaatggttcgttatagtcagtgaaccacaaaagtagtctgggtagagggacagaatttagaatcatggaccagatttacaagccacgtaactgagtattcctagaaggccaaaatctggttgtttgtattctttgggtttattggaagtttggatatgtttatccatctgtgtttctgaaccctctggaggaaagagcacaacagtctaacatgtaaataagaaaaactaaatccacataggcccacagatacattaggacttcatttttttttttacaaagaaactgggtattgagactcctgctacttccttttacaaagaatttatggtagactggactgccttctttcctgtatcgttgcaaatggattgttggcttgggtatttatttttgtttcttttgaatatttttctctgtaagatagcaactgtgtgtgtgtgtgtgtgtgtgtgtgtgtgtgtgtgtgtgtgtgtgtgtgtgtgttctatcatatttcaggataaaatgagtcaggaagctggttgttttggttttttgttttgctttgttttttcgcaaagcaatttagtacctgtgtagttgtttcatgggctcccagctcttaggattccctacgtttctatccttaattgcctatgctctttttactcttttccgtgtagtctttatgcagtagtttggacacagcagacaactctttcctttaaataatctcttctcttagtatctgtgatgccatgaactcctgacacacacacacacacacacacacacacacacacactctctctctctctctctctctctctctctctctctctctccccgtctccctgtctctccctctctctctctctgactaatccttcttagcctccttcttcagctccctttccactatccaaccgctaaaatttcttctttcttctacactttctaaggagccacgctgtacccctacctcag

SEQ ID NO: 98646 - DNA, 1049 bp, Homo sapiens
gccgtggaaattatcattctcaatatgaatagcagtgtatgccagtggagctaaaaatgacttaaattcatgttactatcactgtcatttctgagatgggataaagatgagtaggtagggtgttttatccctgaaagttggctttttattgtactgaagacctggcctttgctttctgttcctatttagggaaccaaggaaatttccattataacctctggtggcccactcactattgtaaaggatgggctattttagggaaatggatgggaaatatatattggtataattattgagaaagattttatgaagacaggagtagggatctaaatgtcagaaaaaaaagaacactgacaataagttcctcccatgccttttgtgtgggttttgtctgtttgattgttttattaggaattcttagaaaatatttctaaaacttttccaaattatgtataggcttttatatctctaggtaagaagtgagcaagtttaaattagaaagcatattttttaagtgggcacagttgtagtatatgttcttgtgtgggtgcttattaaatacttggcgaacgtatgaatgaattaatgcttaaataatttaggtgcttacaaagagtgacaagaaaatggaaaaatcattaaaattagattcaataacagattcagaagtagataacctgaatactcttagataaaagacaaattttagaaaagtagagtcaggacaagactgcagatgattcagttggatggagaaagatttggttcaatggaaagagatagtaaaagtgtattgcttttttaaagcactacccaggctaggtggagtgtcttataacacctctgtgcatggttgccacccagtgtccttaaaaatactaggtcacattatatctcttaaaaaaaataaaagagagacaagagaagcagaagagacttcagtgacatatcattcagtcttaatggagagattattattttttcttttccttttttttttttcttgagacggactttcactcttgtcgcccaggctggagtgcagtggc

SEQ ID NO: 98647 - DNA, 1961 bp, Homo sapiens
ctgcgatatgctaggcactgtgctggatgataagacagcacccctgccctctagaagctcgggcagttaaaatggagcagagggaagcaacggagactcagaaaataactatacacactaagggagagcttggtctggggctggtgaataggaatctgttagggaagtgacagatgcaaagctggaaatgttaatcagatggctaaattcaggccaaaatttaaatatcttcaattttcaactcaagaaaggcatttggcagaaaccatgtttggaaaagaaattaaaatttacaagaatttttattaagcactttgcctagcaaaagatttttgttaaaaaaaaaaaaaaaacttgtcatccctactttcagggagtagaatcctggaatttttgaagcatactgtaagatggtgattatatctcagaaggggttccgtggtgtctgtaccctctctgccacaggcaatactgagcaccataggcttgagtatgccatttaactgtttggttttgtttctgtttgtcactttatacaatgtttgataatatctcctcattgaactgggctatttcagtcaaggttctccagagaaacagaaccaagagaacgtacatgtgtgcgtgtgtctgtgtgtgtgtatgcacatacacacacacatatatatagagagagagatttattggctgaatttcagaaattggcttgtgtgattgtagggcttggcaagtctgaaatttgtaggacaggctagcaggctggaaactcaggcaggatttctgtgttacagtcctgaagcagaaacctcagcttttgctcttaaggtcttcacttgattggatgagatctacgaatattactaagattaatctttacttaaaatcaggtaattttagatgttaatcacatctacaaaataccctcacagcaacatctagagtagtgtttgatggaacaactggggaccatagcccagccaagttgacacataatattcattgtcacatggtgtgaagacctatcaatcaatttttgttaaacaagtaaatcaggaaaaatattttttgtcattattacattaagaaaatttattatccaggtgacagtacatactagagtttttggaagaagtgaggagccatgacctaaaaaagcttgtgtttcctgccagcagcacatcttaaccaaagatgttccagctaagttaacccagaatattagacaggaaagaaatctgaaaacagatgatgcacttgcaaattgtgcaaggcttgttctgtaatgcaaataggatgtcttctttgaaatgtaaaggcactgagcctaagcatgaggaattttaatgtctaatgatgaagctatagagagaaatttcagttaatgaccaggtaggtataagatggtgtccttagataattctgatatcagaactgatgttagttgtagtttaagacaactctcctgagacaggagaaccgcttgaacccgggaggcagaggttggggtgagccgagatcgcgccattgcactccagcctggacaacgaaagcgaaactctgtcccaggaaaaaaaaaaaaaaaaaaaagacaactctcaaaacttcaccatctttgaatagagagaacatcataaaaaacaagtggagagaatctcttctacttcagccacgggttgcctggctctgactggcatcttcttccttttagagcatagtgtttccatagtcaaggcacagagagtgtgcttccagtactaccagcaaaactgaacttcactgtcatggcagataagaagttaggaaattcaacataaaatgtattgagtaccaccagctctatgccaggcactttgatatatattatctcatagcctccaaaaaaagtacattgcacattcacctagcagactctttcacatctagaaaatgccatttcctttttttccccacatttatcagtg

SEQ ID NO: 98648 - DNA, 1118 bp, Homo sapiens
gttgtaattcactgaaattgctgttaaccaaaaataagtaatacaacatgcagtttgtgtgggttgacaaatgaaacagcccttaaaagggctacttcttaaatgttctcaattaacttaatgtaaacaaaatagaccgataggcatttgaggatttctggaccccattacaccatgttgttgatgtctgggaagctgtgtagtaaatgtcttttgtatctatccttaatgtttggaaacttcccgcctttaagcttcatatgacaactgaccaacaaacactacgtactatgatgtcaatcttttttagagacattctcattactaaaatgagtggatacttgaatgtttaactcctaaaataatgagcggtgaataaatgagcaagtacatgcatgccttccaatgtagagtcattttcattaaaccctctctcaccagagaagcagtggtatgaaattggcctgattcctttctaagtgtgttgttcttgttcacagttggacatgatataggtcgtggatgtatggggaatctaagagagctgccatcgctgtgatgctgggagttctaacaaaacaagttggatgcggccattcaaggggagccaaaatctcaagaaattcccagcaggttacctggaggcggatcatctaattctctgtggaatgaatacacacatatatattacaagggataatttagaccccatacaagtttataaagagtcattgttattttctggttggtgtattattttttctgtggtcttactgatctttgtatattacatacatgctttgaagtttctggaaagtagatcttttcttgacctagtatatcagtgacagttgcagcccttgtgatgtgattagtgtctcatgtggaaccatggcatggttattgatgagtttcttaaccctttccagagtcctcctttgcctgatcctccaacagctgtcacaacttgtgttgagcaagcagtagcatttgcttcctcccaacaagcagctgggttaggaaaaccatgggtaaggacggactcacttctctttttagttgaggccttctagttaccacattactctgcctctgtatataggtggttttctttaagt

SEQ ID NO: 98649 - DNA, 1032 bp, Homo sapiens
ctgcctctttttcctcccagtatactggggaagcctccagggaaagtactctcctaatttctgtatccgcagtgctaggtacaggaccagctgccacattgtctaagctgaatggaagtttatgaaaccaaggaataaatgagtaagtgtgatcacgtagcagaagggcagggtgtcctatttgcttatttatttcttgtcattgcagatgtcaagaccaggaagtggagctttctcttggaagagcacagtaaactaagtgagaagccttccttacttgttttatatcatgctattgttaagctttaataattcaccttaaatttgatgtatttttgaagaatcttctcctccctttgctgtggtgggatgcttgagtacagggtaagtaaaggtgaggatgcagccttgtccacatccactgagatggtggctttatgacagcccagacaaatgccgggcctcttctatcataagggtgaggtggcagtagtgaaatttcccaggcctgtgaaatcttcctgctgtcatagaagtgctagaagcatgggtacatagactttaggaatcagaagtgagctaggattgcttagcttaggtggaagtgaccatagattacttctaagaataggctctcagtgtacttctagaactggatgggatgatcaagaaagataggagagtatcactgggaatggacttcataatagagttctgtttggggcagaagtcaaggccagggacttaggcattttaacaagcactttacagactgaccaaggaaaagggatatgtgtacagatagcataagtgcaagaagaggaagccattttgggtttatcatttttcttctctgtgttttgcttagatggggcaataaattctaatatgcctggaaaaaggaaatatggtcatatctcagactgtaccagaataccagtcccttatctatctggctgtaacaattctgcattgggtttgcagctagcatggcttatgttcctctgcttttctcctaatcctgatggcctg

SEQ ID NO: 98650 - DNA, 1015 bp, Homo sapiens
tcactctctactcaccttgcccttctccaaccccatggagaaccaccaatctaaataaggaaatgaatctaaatgtttttggaataataagatagttgggaaaaagtaaagtatgtctttgaaaagccatataaggacctaatttaataccacttgattgttcctctaatatgaacatctcttagaactatattctgataattaatattacaagcatattttcagcaaataggcataatgaggtatttagattaaatcatacagttcgttggatagcagggccagatcgtgtccagaaaaatgtggattttgtaaatagcaatagcagtcagcagagagaaggtgtgttagattgtaagaaattggtgtcactgtcccctgggaaacgtgacatttttcttcccccacagcactattggctggggctactaatcctaaatgaggtaaatctatttttatatataaatatatgaaagtagaccagatagaagctaaaaagaacaaagttaaaattacctttaatccctccaacagaaaaagccactgttaacagcttatttttccagcatgtcaattattgagcaagatcatcatttttcaataactatggagcatttacatagtggagacacatcccataatttaatcctcagtatcagacatgcggttgttttccatttttgctattataaataattctgcaagtgaacatcatctatatgtaccttgcatatttatcctattaggacaaattcctacaatcagaattgccaggtcagttttcatttgacctttttaggggaggcctctgaagtccagtctggccaggcataacaatcttcactcccattcagtcttcaatcagaggcttttttttcccacatgactccgccctcaggattactggcactcttttaaacagtgaggtgtgtgtttggggttttttggtttagtttagttgtcttttgtctacactggcttttattgttaaactagtgtaataacaaaattaaaa

SEQ ID NO: 98651 - DNA, 1087 bp, Homo sapiens
aacttaccctacaagccatctatgagggaaaagccttgctgtgcaagtacatgatataaataagagtgtctgccttattttttaaatttttaaaagaagaaaaaaagttttcaagtactttaaaaatatccacttacattcaaacgaagtacttataatggaaattgtagtccttagcatagttaattgcaaaccatttttagctggttattgaggcaggaaatttcccaattattaaatgtatttaaaagccgtacacttctttaatcatatatttagttcattttccctgtagatcaatccagattagactgatgctatatagttttcatggtccctcaaaactcttcatgtatgatttggatttctgtcctattcgcaaacagtccactttctaaaaaggatcttctctttcttgactatatgggcccatggcataataatgttcagctagtgatgaaaggggctaaagataaaattgattgcctttcttccccaaactgtcccttcctatgttccccatcttaggccagcatctcagtagtttctcctgccagaaactaaggcattatctttgaattctccttttcctgccttcttgatacacctccccaatacaacaaagaatgccttcctcatcttcacatctttctttccacctaacccagtgcctgatatgtggtaatttttcaattaaagcttgttggattgtgactatcccaaggtcaagtttaaaatttttgccgcatgcagcggtacacacatgtagtcccagctactctgcaggctgaggcacgagaatcgcttcaacccaggaggcagaggttgtagtgagccaaggtcatgccactgcactccagcctgggcgacagagtaagactctgtctcaaaaaaaaaaaagaaaaaagtaacaaattacttggtattttggtgttactaagttttaacctacaaggttaagagctaacaatattagaacataggagcatgctatctgtcttagtctgttttctgttgctgtaactaaataccacagactaagtaacttacaaagaatagaggtttatttagctcatggttctggaga

SEQ ID NO: 98652 - DNA, 1082 bp, Homo sapiens
acgcctgtaatctcagcactttgggaggccaaggtgggcaaatcacttgaggtcaggagtttgagaccagcctggccaacatggtgaaaccccatccctactaaaaatacaaaaattagctgggcgttgtggtacacacctgtaatcccagctactcaggaggctgaggcaagagaattgcttgaacccaggaggtggaggttgcagtgagctgagatttcagcactgcactccagcctgggcgacagagcgaaactcagtctcaaaaaaaaaaaaaaaaaaaaaagggtgggaagctaagaaaaaacacagtggctggaagagagatgtaaattaagggaggccaaacaaatgagaaccttctctccatagtcctctgccttggaagagaattaactgacttaactactggccctgtcatttgaggtctaaagtgggaggagctggagatccttcttggaatgtctctttagtattatgtatgtctcaatatttagcttctagaaatttgtgtactgtcattaattccttagtcccctccctaaatgctttcagatctacagaggacactctaatttgtatttaaaacacattataatgatagtcggaggtaaagtgaaaactgttgatcatcttctatgatcccagataataagaatgtttcagtaacataccagagacacataaaacataaggagtatatgtttaatctgttttgttgtcattgtcaaatgcagtgaatatatcttggacctactggaaagtggaagagagaagtttttagtatttgcacaccataaggtggtcctggacgcaattacgcaagagcttgagagaaaggtgagctccctttgaaattcaccatgggctacttttgccatgtcccaagttgttctaagcaggcttaggtcagatccaagcaaagtgagaccgatggcttccggaagcattgctgaagactttctgaagaagagttcttgcttgtagaaccacagtggggtcaaaatgtttccccagccatgtcattttaacttcctccatgctccaaatagatatcccaggagtcttgctttaggaacatc

SEQ ID NO: 98653 - DNA, 3126 bp, Homo sapiens
atagtttgcgaatctgggtaaacctggatgagagagacgccttacaattgcaaacatttctcaggaggccgcctgaaaacgcccaaaccatagagctcagttcctagctaggcctctaccagccacttccgctcgtccgcctaataccgcgcctgcgcaccgcgtctcttcctttctgggctcggacctaggtcgcggcgacatggtgagtgtgggtctctgtgcggcctagaactctatctgcctgcatctgtccttgttttcttctcccgcacccatctcctctcctgccttaccccgtgttctctcctgtctccatgcctttgcaggagacaccattgtcggaagctccccaaggcggaggggcgggggcgccttggctgggcctggcgcgctccagccgggttaacgccgggccttcggagcgcgcggccagccctgggcactggtttcgttgggttgaatttagggaaaactaggtcatatgtaattcacatgtcggtcacacgtcagtgaggtggaggaacggtgtgtggaggctccagggcctgcctgggttccaggtctatcactggtttctcccttcactctaaacaggccaaacgtaccaagaaagtcgggatcgtcggtaaatacgggacccgctatggggcctccctccggaaaatggtgaagaaaattgaaatcagccagcacgccaagtacacttgctctttctgtggcaaagtaagtaaggcaaagtctctggtgagaggagagggagggcaggtttcttacccaagtgaggcctgacttcaaggtattttataagccgtgtgctggtgggcagttggaattactcataccgttgattatgagttttaagataaaagtgttgatggtaacttcagattttgtgagacgtttttcatttaaagaaaaccgcttaaacgttaatgggtaaaataatcatttgacagagtgcccccagcctaagccaaacctgctttgtgggaaatgattccatcagttttgtctactgatgtttctgcaccaactcccaagatgtctgtgcatctaataccattctacttgttctgcgagggatttttgtttgataaaggtttgaacgtttatgtgcaaaatactgcattacagcaatccctgttttgtttttgagggagaaagggaggctttcacatccctgacaataaggtgaatccaaatttagacttctggatgcttgtaagagaaaatacttacttggttcatagtgaaaattggttctcttttatagaccaagatgaagagacgagctgtggggatctggcactgtggttcctgcatgaagacagtggctggcggtgcctggacgtacaagtgagtctagttccttgtggtatttggaagtgtgtggaccacataggcccaaattccaggttgctgctggatgggctagttttaacactttctcaggactgagagaataaggatgcctttgtattttcaggattcttccgtggtggtttattttcagttattgaaagagtaaacacaaaactaccaaaatagaagtcggaaatctaattcacagactactttagaatttgatggtcactgggcacattgttgtgaacattgtcatgatactgtgcaggtccattagtggggctgaatctactgaacgttgatttgcactgcaagttttgataaaaataggtgaaggggtcagttagttcaaaactgtatttggaacttgaggccatcaggaccaccacagtttcgtctttctgaacagtattagactgctgcaggtttgtgaatctgcaactcagtatcacctgacagggcgatactacaaacactatactacaaactagcatctagacctgtgttgtccaatacactaagcacatatatggctagtgtaattaaagaattggattttaaagtttcagtcaatttaaacttaaaccgaagcagtggaaaatgttgaaatatatatatattccttgtgggggtttttattagggcagaatggaaaatgggaactagagtgctttcttggttctgataggaaagtgaattatttatatacttacaatacaggatggtgattttcaggtatagttcctgaattttatggtaaaacttttgtagtcatttcaatagctgtctttcccaaaggcactttagtgtccgctcttatttccttaatcattgttctcactgtatcatcttgtaatttattcatttcttgtaatctgtccattcccttttaataagtttaggtcagcctcttagaaccatttctttttcatgggatggggtagggggagttaaagcttgcttgtccacaactgagttacttataaaaaaaaaagcaactctggttgagaaatcagatgcatgagattgtatgtctaattctgcaagatcctgaaggcatggctcttaaaggatgccatcatgtagtttagaagccactaatttccgaggagtaatctaatgttggttagatctttggattgactgcagcaaagtattggtagagcagtctatctcagtataattctttctaggaaaatttgggaagcgactttaacacaaaaacgaggcagatttacttatttgccattttctatgttaacatgcttaattatgttggaaactgaatctttctttccagtaccacttccgctgtcacggtaaagtccgccatcagaagactgaaggagttgaaagaccagtagacgctcctctactctttgagacatcactggcctataataaatgggttaatttatgtaacaaaattgccttggcttgttaactttattagacattctgatgtttgcattgtgtaaatactgttgtattggaaaagcatgccaagatggattattgtaattcagtgtcttttttagtagtcaaatggtaaaatgcagcataagaatataagtcttccaagttagatatgagtgttagctttttataagtctgctcctgccagtttgactttgagatacattggagccaactgtaaactttagtttttaaattacagttagtttttttgtttgtttttgaggcggagtctctgttacccaggctggagtgcagtataccagtcttggcccacttcaa

SEQ ID NO: 98654 - DNA, 1023 bp, Homo sapiens
ccgtattgtacaggaatgagattaattcgcccctcaagtccctttcaaaaccaaaatgctaggattccatctccttttacagcaccccagttcagcaggacgtctgcagggccagctgattttgttcttgcattcattaataaaagtagtgaatgcaacaagagccacccttttcttttctttgtcttgtctgaaagagggcagggagggagcaggagagcccgcagacgcaggggacgtgtcagacgtgcgacaggaagggctcagcgaggcgagagcgaagctgtgaggaaggaaggcaggtgggcggaaggcgggtaaggggggccaggagggggccgggtggccccgcagacagacacatggaaccaatcaccccaggcagggggtgggggtgcacctgagaattacagagacacctggcctgctttctggagttggggaggattgagagctgatgaggaagggggttgatgatggagcaggctgggcgggagggaagcacatgggagctcactccgggaccttattgtgatatctggactcttggtgattggagggtgggtacttctcattgtttgtacagtcaaggtccagccagggaagcaggagggagggagttcgctaagtcttattcagagactttaatgaaggtaattggttacagaggtgctagaaaaacctccttggactggaggggtgacaacaagaggtgctttttcagagcccaggagcaacggtcaccctattacaatacaatacaattccctactacaattgtattaacaataacagttattgtatttaacactagttaaatctgaatttcaaataaataacaaataattgctagtattttaagtcagtatagagtgcattaaatgccacagaattgtatactttaaaaaggttaaaatggtaagatttatgttatgtgtactttatcataatcaaaaatgtaatataaaaatgtatccagttggaccaggcacggtgactcacgcctgtaatcccagcactttg

SEQ ID NO: 98655 - DNA, 1475 bp, Homo sapiens
tgacaagaacacgatctcgagttgtagaggagacatcatcagaaaagagatgttcaggaaaggtttagaagccggcccttggaagaactagagtatggtgcaaacaataacaacactttccatttatttaacttctttcacctcccagacattctggagaacttttctctgttattgtaaatattaatattcatccaagtaggtaggggatgcaggatgagtaaaggcctggaatctcaggaccctctatgtagagtctaaatgtcagaaatgatgggcaggagtgaaggctagacccggtttactggaattgctccggcaatggaggggtcctcgtataccacacaatcatgtctattatgtcctataacggaggagccatcatggccatgaaggggaagaaccgtgtggccatcgctgcagacaggcacttcgggatccaggcccagatggtgaccacggacttccaggagatctttcccatgggtggttggttgtacatcggtctggccgggcttgccactgacgtccagagagttgcccagtgcctcaagttccagctgaacctatatgagttgaaggaaggtcagcagatcaaaccttataccttcacgagcatggtggccaacttcttgtatgagaaacattttggcccctactacactgatccagtcattgctggtttggacctgaagacctttaagcccttcagttgctctctagacctcatcggcttccccatggtgactgatgactttgtggtcaatggcagctatgccgaacaaatgtacggaatgtgtgagtccctctgggaacccaacatggatccagaacacccgtttgaaaccatctccccagccatgctgaatgctgtggactggggtgcagggtcaggcatgggagtcatcatccacatcaccaagaaggacaaaatcaccaccaggacactgaaggcccaaatggactaaccctgttcccagagcacacttttttttttttttgaaataaaattgcctttctttcaaaaaaaaaaaaaaaagaaagaaagaaaagaaaagaaaaatgttgggcagatgctaatgccagctgagctgagattggggcagaggaatggagtaggggctgaagtagaggatggaaatgaaaaaaagcatatcccaacagccagttaagagaagaattgtgttagggactttttttctttttttttttttgagatggagtttcactattgtcacccaggctggagtgcgatggcacgatctcagcttactgcaatctctgcctcctggggtcaagcgatattcctgcctcagcctcctgagtagctgggattacaggcgcccgccaccacacccagctaatttttgtatttttagtagagatggtgtttcaccatgttggccagctggtcttgaactcctgacctcaggtgatccacctgcctcggcttcccaaagtgttgggattacagg

SEQ ID NO: 98656 - DNA, 1804 bp, Homo sapiens
aagccacgtgtcagtggtgggtgataccccaggatggaaggagttggtatgagccgactgaaatctacttgaaggtcaaaacggagccttatgtcttttgtgttccccagcggttagcccagtgccggccacaggggaagcgcgcaaacgaagtcctcgcgaactgaactgagagcagacaaaagcacgcgctcttctccaccgccacgccggtcctacccaaacccgcgagttatccgtattctccttcaggagtcatagtcaggccagaagagtgcggagggacggggcccgggaagagcagggaacccccagagcccgcagccaacgcggaggtgggcgagcgggcgtgcgcgcactcacttgccggcgcgagggagtgtcgggggggaagggagtggtctccaaaagggggaggggagaaggcagggggcggggagaagccggccctttaggacccggctgcggcggcgagggaggaggaagaagcggaggaggcggctcccgcgctcgcagggccgtgccacctgcccgcccgcccgctcgctcgctcgcccgccgcgccgcgctgccgaccgccagcatgctgccgagagtgggctgccccgcgctgccgctgccgccgccgccgctgctgccgctgctgctgctgctactgggcgcgagtggcggcggcggcggggcgcgcgcggaggtgctgttccgctgcccgccctgcacacccgagcgcctggccgcctgcgggcccccgccggttgcgccgcccgccgcggtggccgcagtggccggaggcgcccgcatgccatgcgcggagctcgtccgggagccgggctgcggctgctgctcggtgtgcgcccggctggagggcgaggcgtgcggcgtctacaccccgcgctgcggccaggggctgcgctgctatccccacccgggctccgagctgcccctgcaggcgctggtcatgggcgagggcacttgtgagaagcgccgggacgccgagtatggcgccagcccggagcaggttgcaggtaacgcggtctggaacaagtagttgggagaaacttggagggcagcggagaagcccgacgggcggctggaccttacggacggttttaggggcggcagagccgagaccttggaccaaatcaagggggactgttgctagcgggacgcggaagtcaggcccggggaggggaactggagttagagcaagtggaagagccctggcgactcatttggtggggatgaatggggagaggaaaggcatccctgctgccatagttttacccgcgtggaacggacccagacttctattctggaggagggatttgctgagaagggggccggtggtcagatccatgggagtaggaactcgaatcttatttggggcactgcttgaggacccaagggtcctggtgggatcgctgctgggaggcggaggctgcggggtgccagtgacaccaggaaccttggaagaggagagggagctaggaggaggcaccggcgtcccaaggggcccttccttctactggggttgtgagttggaaagaaaggacttggtactttgtaggatgagtcgcttaggagaaaaatgaaaaccaccactactatttctccatagggaacgagcagggctcttgctaccacgttgaatggaaaaataaaagggaggcatttggtaggcgaggggtctcctagcagctgaatcaatgtaacttaagcccgatcgccggctgcattccctggacgggggcagccaggctgtgcggtttcgcatctgggccccagatcgaaaggcaggagagat

SEQ ID NO: 98657 - DNA, 3044 bp, Homo sapiens
gaaaaagcaagtgagtcttaagtttctcaaacttaaaaagaaaaagtgaaaagaagaatgcttgctttttagcttctgaggtcttcgtaagccccccaccccatgcaccaacccgcctcccttctcctggtcggctattgtttttttccctgttctccttgagaatggaattaggggtcagagttgaaatctttcttctgtttctctagcacattttgctctggagtacagagcaagttagggcttcctctgagtggagcctctcagtccctttcttctccctcggctcgcttccttccctagcctgcctggaagttaacccttccctcctgcttctcttagaaagtaacaataaaaggaaaaagcccccacgaaatcctttcactgcggggtgcctgtcccccagtcatgcgttcctcctcatcacccctcgtggtccaccggggaggtgctgtgcagtttctgagctgaactctgacaaactaaacatcttcctcagcagggtgaactttttgaaaggcctctaagttcataggatggtttggctgctgactgttttaataaagtgtgtgatgcctttccttctttaacgttttacttttttttttttcctactcttcattcgtcttattctaagcctgaaaaccaattctacttcccaaatccctgaagccggttagggtctttagccaggaacagatgcggcagattttctcccattcacttttccctggagcctgaagggggtggggggtagttgtcaggggaggccagggacaatggggtgagttcatgggaagaatgtcactctggattttctgcctggttatgggactcccttccgccagcttgccccagctgcgttctcctccccagtgcccagacgccttccgcatttttgtgcaccggcctgggaagaggggatgttaagcaggggtggaaggtggggggtggggctggaagctgagtgggtgcactcaaaagaagtgaccaatgtcaggggtgcctgagaaagagtcgggctgggggaggggagcactttgggaaggagcctgagcttgcaagggtgcaggagaaaaaggggtcaaggttggaggcttttgtgtgggagagggtcttaggctggggcagagactggagtcactggatggagagtgctgggtccgagttgggtggggcctggcccagacggagatcttagcactgaatcctctgcctcccactccatctcccgtcccgtcttctctcctctccgaagaatgagcaccccccctccagcctgcattcctctttgagcaggttgcttttgagaattttaaacataccctcttatttcgaggcagcgaacctcagcagttccggctttgctgttagctcttttgtctttgttcccgggactcaggggctgtgttgctgctggcttcctggggatggcaaggatgcaggggtgggggtgggcacatcagtgggtggaaggagtgggtggtggtgagcctgtatcccacggggacgatgggctggggcttgttggttcaaagaaactgagaagtcagtcttgggggaaggggtgggtaggcctagaagaaaaaccgaaaggagaccctgagatctgcttgaagttgggactctaaaagcgtgtgtatgtgtttggtggtggagtggatagaagtgcctagaaatgtcagggtcgaggagggaacagggttgggccagtccaggccctttcagaattaaggctgggctagaccggttccttcagtatctccccagcctccttccctaccgtgtacaatgcaggggattatgctgaggggcggggccgcccgagtggccgtttggcccgctgcacgtataaaggtgctacagaaatgtgtagtcgttcaaagtcccagggcgggcagacaggcaggcaggcaggcgggcgggcgggcgggcgggcgggcctggggaggctctgcatctgcagttgccggggaagaataaaggggggaagaggcaagcactgatttacagtggttcagtgcagcttcaaaaaaaaagggggaaaaagcaatgggacttctggctcagagtactgctttgcatctcgtcttgcataaatttgcatactgagttcaaagtcgtaaaatagactagggaaatgagtgggatctactgtcactgattgttaacaccactaccttccacctcccctccccccatctggacagaactcccggcactagttctgctaagcagcgctgcctgagtcaccagtcaccactgttcatgaaagaaggagatggggaagcgcctgtctaggagaccaagcagggtgtggcagtgtgcaccctggcctcggaggcagggcctctctgaagggtgtggcccgacagattctggaccagtgaggcaagtggtgttctttctgacgcctggggctgccgttgcccatggtgggctgcagtttgaggaagctgcagaatccgggtcttctttgtttgaaatttccctactcagcttccacatatgtccaaaacatttactgtgataagtccctttgtgtggtggtaatgacccacttctttagacaagatatttgaggaaggttcgagaacagaaaaattctacttaacaatgttaaggaatctgagaaaagtggggcacaggagtctctaggttagaataggtggtagagcctggaaggagagaagaacccatctgttgtattcccgagggtctgcccacacaatggctcttggccaagtggactgttgagcttcctgtcaggcagagggaagagggaggcttagatagttctcactgttggcctacttcagcactgagcttcaagactttcaggcaaatcattccttcaggctcagaggctggaaattagttctataaaaatgccatggggccggtcgcattggctcatgcctgtaatcccagcactttgggaggccgaggcaggtggatcacaaggtcaggagtttggagaccagcctggccagtatagtgaaacctcttctctgctacaaatacaaaaattagctgggcatggt

SEQ ID NO: 98658 - DNA, 1981 bp, Homo sapiens
aggttttcaccatgttggccaggctggtctcgaactctggacctcaggtgatcctcccgccttggcctcccaaagtgctgtgagtacaggcgtgaaccactgcacctggcctattttaattttttaaggaactctgtatccagggagtgcatttcgtctcagcctttctctgtatgttcccgactccctcttcctcctcctgccttctccatgctgtcctctttgtccctgcagaccattctttcctttcccacacttctcccttccatgcctttcctactccggctcagctagaacacctgcttgctaggtaggtgggtggggctcaaaaatggtgtggaaaatatagtggtctcagcctcagagatccatccaatcagagggatattatgtaggtgactggagactataatgcttgaaaaaactagaatccttaaatgaggagggtggttgactgggctttgagggaaaggacttctataggccagggaatgggattctctcctataagagttagcactagcgctgcttctgctgaaaccaaggcatagaagcgggagatgatgtttgaattcatgagggaagctggtaacgtggttggcagatattctagatccctctgcttatcctgtctctggccagcaattcactgagatggcaggcagccgccaggagattggtggtgctcgcatctgtcctcaccctattatgaactggcttctgtgcctgctttgtctcctgtcttccacctccctgcgagggaggccgttctacctccattttgcaggtgtggacactgggtgactcagcgatacgaaaatgctgagaggctaacctgggtaccttcccactgcacccctctacctccgtggccgggtaaggagttgggctgttggtagagaaaagcttttgaccgtatcaaccagcagttttgttcctggacagctgccatgtgcaggtgatgtatggggcacagtaaatttctgccagatttcaattatgtagattcccttgactccatggacagttacaagtcctggagtttggggacctcacagttgtaagtagccagcatacagaggtcagtcaagagggacaagaaggtcacagggtgggcctcttgagagaagagctgctgggtagcagatgatggtgcaggcagcctggcctttgctgtcatattgaccggggttggttccattgcaaccctgtctcttaatacttcagtagttagtaaggctcttcctccaatgccagttccctgttggtaaaatagcaatgattttacctctttcccagggtgcgtgttggggtggctgtgataatggcaagtacctggcacatagtatgttcttgtacatgttagctgccttaatcttggcaagtgacatctcctccttgacaattagctggcctttaaaatgaaggccaaactggaaaggtcaggcaggccactcctctctggaggttcaaatcccaggtggtctaccatgtactaatcacccaaggtaagagatttcttgctaagcctcagttttcttatttgcaaatcagaaattgatagtatttcattgggtcaactacacagatgtgtgtaaagatataaactatatataaaacctaagctcttgcattttggtgatgagtcacttgatttccatctcttcacctatgaatggaaatatccatacctctccaacctactttcacagggctgtagtgaggtggtttatggaaagggcaatgaaactgtactttaaatgcaatacaaatgcaattgataaatgcaatataaatgcaactgataagtgcattataaatgcagtgcataaacggttggagaccatcgggcttgcattttttttttttttttttttagacagagtcttgctctgtcgcccaggctggagtgcagtggcgcgatctcagctcactgcaagctccacctcctgggttcacgccattctcctgcctcagcctc

SEQ ID NO: 98659 - DNA, 1054 bp, Homo sapiens
cctccacactcacaaagagcaggctgggtgggatgtcgatttttttttcttctggagaatggaccatctccctatgcctctcctcctccttggctactaacccctgacttttccctcccccttctctggccactcctgttcctgaacaaagccagggaagatctgggctggctcagcccctgggtgtcagtcaagactcagagggagactttgctcaaaaagccagccctcccggaaagaaatacagagcaactgtagtcaggaatttttccctttccttttttctgtgggcggggggagggacacttggcagtctttggggcccttctggctgccagccccacatctcttcctggctgttgggaggcagggcaggagggaagattggggagaagggggcaggggctggcaaacacccagctgctgggcagtggaattcgtccataggccctggtggagttggcctctagtgaagcctggggaggtttctaattagtggaggacggtgaaggtgtggcagcctgtgttcattcaaggaactgagctctctgagccaggaagtcaaagggaagagggggactgagtcccggaaggccttggtaggtggggaggaagttgtacctactcagtgtgttccatcctattagaagttgagaagaggggggtgtttcagctggagtgattcaggttggactctgggggtgcagagagtcagtcattggcactaagcaaagggagccacctcaaagaataagtgatataacagtgataaacaaaatggctttgttctagacattgcctgcttctaccagaaagctcattttgttttttttgtttgttttatattcttcccctctcccacttcctgccccagctctgttttagcctcgagattctctccacttaacaaatgaagaaatcaaggctacattcaggttcaactgccaaggcaagcacagaccagattgtagtctgggtctctagattcttccagctctccatttcaccagactcacacatgcagaaaagcagtgaattatatactgcttcttgg

SEQ ID NO: 98660 - DNA, 1069 bp, Homo sapiens
agacatacccaagactgggtaatttacaaaagaaagaggtttaatagactcacagttccatgtggctggggaggcctcacaatcatggtgggaggtgaaggcacgtctcacatggtggcagacaagagagcttgtgcagggaaactcccctttataaaaccatcagatctcatgagacttgttcactatcacgagaacagcatgggaaagacctaccccgatgattcaattacctcccactgggtccctcctacaacatgtaggaattgtgggagctacaattcatggtgagatttgggtggggacacagccaaaccatatcagatggtcaccttttctaatgtgtaaacattaattgagcacatgctgtgtgtcagctaggagaccatatgaaaaagcagttgtcataccacctgtaacacatgctttttcatgctggagggggacaagaaaagcattttagaaaggtgaataaagaagaaaccaaggcagcagagatgtatatacatcctatgcaaataaacaggtagctcttggtcactaaaagagcttaaccaagtctcttgggaagagcttgatgttaaataatgaagtcccttcatggtaaataaagttatgaaagtaagagaatcaagttggacaggcttctacttcttcagtcttggaagaaaaaaaaaagcagtgtcttccttcctaaaatgttaattgaggacacagaatgtcttctcacctgtccttcattcactaagtatggaaagctgtacggaagctaagaccaagtttatgtcttcaggaagcttctgtccttaggaggactaagaaaatgcacagacctacagctttttggcaatggactcaggctagagtgctgtgaagaaagttgggtcaaattaccagaagactttacccagcagtgcttttcttttttaaaattttgtaaaatttttatttatttatttattttatttattttgagacagagtccccctgttatgcccaggctggagtgcagtggcgtgatctcggcttaccgcaagctccgcctcccgggtttgcaccattctcctgc

SEQ ID NO: 98661 - DNA, 2859 bp, Homo sapiens
ttcatcaatgcaatcaagtgacctttggacacttggaggccatattgttcatccttcttccttctcaaaaggtttctcctaagttataccagagggagtctgtgcaatttcttcccatctgcaatttatcagatttgttttgttctttcttatgaaattcttggatggcttctaacttggatctctcctgttttagtttaaggctgttttctctctggtccttggggagacagaacggctccttcccttcccttgggttttcctggcccttggacacctccaccactcagcaccctctggcagcaccaggatggatttgtcccttggctttcagttctcaggcctgagtcatcttgattacttcatcttccccttcttaattctgtgaccctcttctactacctttgggtcttctttctgactcatttccgagttcttcatggcatagagaacaggccaggagcccagggctaggttctgactggtggacaagtgaccctggtaacatcattgccctggccagtgagagtggtggtgaagtccgccatgtcactatcgtttggtcctcttccagtagggcttcagggacacttgaggttactgatagctctgcttgatgaggaagatgaggggtggttggtgtgagaggtgacttttttgtttttgtttttatttttgagacagagcctctcactctgtcacccaggctggagtcagtggcgcgatcttggctcactgcaaccttcgcctcccgggttcaagcgattcttctgcctcagcctcctgagtagctgggattacaggcatgcaccaccatgcctggctaatttttgtatttttactagagacggggtttcaccatattggccaggctggtctcgaactcctgacctcgtgatccacctgtcttggcctcccaaagtgctgggattacaggcatgagccaccgcgcccagccctgagaggtgacttttttaaaagaatatttaaaaaatgcagaaaagtacaaagaacaatgtaataacacaagtctaccacccagaaccgtgggcggttgatattttgtccactagcacgcagtacttacttagtgtttatctttcttagctaagcagacttgcatatatgtgatagatgactaatatgcctatgtttgcatatattgcatctatatgcatatatatgatagatgaccaatattgtccaaattgttttgtgaaaataaattgaaaatgcacataaaggttttattttccctcttaacattaggtgtctgagatctaatgttgacatccataggtcagaaatattctttttaactgctatatattgttcctttgtattaccctactggttttatttatccattcacctgttgaaacacttttggatctggttgctaatagtgtttttacaactacaagtaatgctgtaatgaccatttttgtacatgtgtccctgtgcacatgtagagagaagaattgctgggtcaggcacattcttcccattcccatagtccctggttcaagtttgaatcaaagcacagtctactcacttgggcctcagcaactaggtcaccttgccaggttcctggatggctttagttgaacccaaggagaaatgtttgggacccgtggaaaggagtgaaagctgatagtgctgtttgccatcttgatatcagtttctctggctcttcaaggacagcttggctcacggggccccagaggaccttggctgaatttgagcatgtttttgttttctcaaactgtctgcctcagccctgaccctccccaggtctttgcaattccaggaatgaccctgatgtttataaaggagccctttggagagtgcacaggcagggaggctctggagaggctgtgctgtttctgttcactcggggggagcccgagatgagatggcagcatgagggcatactctagaaacctccatgacgccaggccaggagaggcccctctgcatgtatccaagcaagcatatgtgtctgtttacaaacccatgagtggatgagcttacaaggctgtgtctctgcaaagcttatacccgagaccacctctcttgaaaagaagaggcattgttctcgcctcaccaggaagttcttcaggaaacagacagaacagagagaatcacaaaggcatgggggcctggcaatgccagagcttgagaggagaggtatcattcaacatacagattccttagtccttgcctctgactttctggggctggggtccagggctcttatttttagcaagctcatcagatgatttctgatgaagagctatgtttgggaacttctgactgggtctaattccctgaatttacagatgagtacactgacacctgcgcaagttgaacaccctgcttagcgtcactcagaatcccaggggtggtggtgaagtcaggatcgaacctcagtccttcctcccacactgggactgcttggccaaggcttcgaacccaaaagctggtgctccaaaggaaatccaaaaagagtttgcagagtggtttgacgtggaggggattcatcggccaggtgggggctctctgccctcccttggtggtgcatcatctcctgtaggtgttttgtcaccgtggaagggcagtagcctgtgcctgttgggcttgccactcaacagaggtcactgagctcttccgcactcagctgggtgattggcctgtggtagctgcaggtggagggagatgattctcagaagagaaaggccagttcttgcagtcgtgtgatcttataacctaggggacttgtggatctgaaacatctgagaaggctgtttgcagttatttactaccacaaaggaaactgggagaggagggaccacctgt

SEQ ID NO: 98662 - DNA, 1038 bp, Homo sapiens
gcgacagacatctgtgcacactattcagaattccagtgtgagaggccactgccccctctgaccttttgaaaaaaaaagtcaggggaagacacataaacagtgtcactcacccacaaagtctcaggacctcaggttaaactttagctaaagaagtaacaaatagaacccccattttaccttcctctttcctaacttctgcctccctccctcccaccagcatggcctgaattactaatcccagcctgttggtgggctgtgctattgaacatagtggccacatgctagatggagtttggtgaccaccatcagccatccaaagaggactggcttcaaattctctccaacaaaagctgtttcttgtatgtgctggcgtgtttatgagccctgtctcaactgagcatgcgtggtgattatgagctactgcctgacctccttccctttgtccctcccgctaaattctgtaaacaaagttaaagtaatttaggcaaattcattcttgcttaaggacttctattaaatggcagagagctttgatatttagcaatgtataaaatttgtacaatcaaaaccaagctttagaagaaatatgcaatagatcatattgcagaactctcatgactcattttttccatgcatttggccattctacaaatcagacattacctagccttcccctcacatggcagatataacttttatttacccattcaagaaattgattgttcacacattcctttttctttgaaacaaggtcttgctttgtcgcccaggctggagtgtagtggtgtaatcttggctcactgcaagaagtgaactccgcctgctgggttcaagcgattcttgtgcctcagcctctcaagtagctgggacctcaggcatgtgccaccatgcccagctaatttttgtatttttggtagagacaggtttttgctatgttggccaggctggtcttgaactcctggcctcaaatgacccgcccacctcagcctcccaaagtgctgggattacaggcatgagccaccatgcctggccaccaca

SEQ ID NO: 98663 - DNA, 1053 bp, Homo sapiens
gttcattggaggaatgataagttcagggttggcttagatcatctctgtggtactcctctttcccaaccctgctcttagattttaagataatcatgagataggaggagaaggctggaaaatggtaagtctttcttcagaataaagaaaagaagaaagaagagagacacatgagctgttaggaagatgtgattgttctaggtagggaaaaggtcttatttcctcaccaggtctggataaggaccggggccacacactctgaggaggaaggaccagggaggtgcttttagattcttggggcttagtttcctaagaaagctttttaaggtctctcttagatcaggaatcaccaatttccaaatagagcactgaggtcagaacattgtgctaggagaaaatgagattttgtgggagtccgtttctatcaaacacaagagtttgatttgttgagtaagatcattgatgcaacaaacaggattacattggaaaaatgagctgtgccaaaattaggtctgaaaacctgggtatgaatgcatagaagtgaacaataaaggctctttctcttgggctgtcagcttccagctgctctccttggctaaattagtaagggtgggccaaaagacaatgtagggaccccatgataattgtgaagaatggcagagaggttgtttgctcctgtgaattcaaatggtagtccatctgggctcaggtttgccatctgtaaaatgggacaacgatccatttcttttcatcccatctgccttcctcatctccagctctcctctaggggtcttaggtagaaaggtgtggcagtctacccaaggcaggggtgggagttctcccctgcccttcaagcccccgactaatggctctggggttgtctgtcatctccctgacttctctttggaaaagcttgaccttctatatgtgaaatcccttgcttctgtgttgacccatttccctaggtgctatgtagggaagaagagctaatgcttactaatctacagggaaagtctcttcaggggccttggaggtttctatcaaccatttctaagc

SEQ ID NO: 98664 - DNA, 1071 bp, Homo sapiens
gtgggcctcctgtggcaaggagttcaagaccagcctggccaacatggtgaaatcctgtctgtactaaaaatacaaatattaaccaggcgtggtgacacatgcctgtagttccagctactcgagaagctgaggcaggagaattgctcaaacccaggaggcggaggttgcagtgagccaagatcgtgccactgtactccagcctgggtgacagagcgatactctgtctcaaaaaaacaaaaaaaaaaaatcaaaaaaccatattttataacttgtttaataaatgcaaatgtattaatattatatagtaagactttttaacctaaaagttattttttttttctgatgttaatagaaataaaaatatgtcctaggcactgtgcctccagagcccaatggacaagttggccctgcctggcgccttcaggcccgaatgcacatttatctgtgtgtgcccctctcctttttcaaatgtgtttccagagattgcagagggccttcttctgaggattaatgttggattgacctctgggacgcagccaagggatggttctttggccactgtctgtggtacaagagggcttcgtgaagatggggagctgcaggctgaaagtcctctaggaagcccagggaagatcctgtgccctgcccccaagaaactgtggactattgtggctgcagatggaagggtagcggaggggtcttagccgtggatgcggaatatagtggagctagatttgctttatatggggcctggagccatttcagcaatgggctatcagcttacaggtcttgggctaaaagcctgactccagaagagtgattctcaccctgggcagttttgcctctccggggccatttggcaacgaatgaagacacattttttgttgttccaacctggggagggtgctactggtttctggtgggtagaggccaggaatgctgcccaacatctggagtacactggatgttccaggcattgagttcgggtgagcggctccttcccagaagctcatggatagaggtacacatgagctgcctttcccgtctccaaccagacaacgtgttgttata

SEQ ID NO: 98665 - DNA, 1198 bp, Homo sapiens
tcttccagaccacaaatgaagaactttaaactgggggttatagtgggagaatttgggggggtcccagaaaggacttaaacccattccatggtcagggcctttcaaatgcattcatccctctgtgtgcctctgttctgccccagccttgtaagagggtccctgtcattcttctagagccagacagcctgatttcaaatcctgaatccatcgcttttcagatttgtgatcttggtcaagtaactgacctctgtgagcctcaaattctccatctctgaaagttggggagggtgctagtagtacccacctaagagttagggtgaagctgaaattgatcatccatataaattgctcagcacgggccctgacaggccatcagcactcattagccgcgcgtcatctccaccctcatcatcattacggtccaggtggctcccggagggcacgtctctctgggaaactggacctggagcttttcttcccttcctctcttggcagacaatggcgatgaccactcagaaggaggcctggtggagaaccacgtggacagcaccatgaacatgttgggcgggggaggcagtgctggccggaagcccctcaagtcgggtatgaaggagctggccgtgttccgggagaaggtcactgagcagcaccggcagatgggcaagggtggcaagcatcaccttggcctggaggagcccaagaagctgcgaccaccccctgccagggtcagtgagggtcaggtctggtggaaggggtgggaggacaaggaaagtggggtctcagctggaggagggcatcctaataagaccctcatctggtgtgacctgtaggcaaagcacttttctttccacaaacatagttgtggaacatagttagtgacctttggggcagtcagtatctctggctgtgaaatagactggacatgtggtttcttgatgttctttccttctaaaaccttcacatttctgtatggttttggaacatagacacagaaaatgaatcccagagatgaagacagagtccctgaaacttgcttactcttttttttttcctccccctgagatggggtctcactctgttgcccaggctggagtgtaatggtgccatcacacctcactgctgcctccaactcctgggctcaagtgatcctccttcctcagcctcctgaacagctgggactataggcatgcaccaccac

SEQ ID NO: 98666 - DNA, 3412 bp, Homo sapiens
ctggcctgaaactcagtcttgttgccatatgcttctctcactgagctacccctcccctctttcctgcccagctctgccatcttgggtcctggccctggttggttttatggaaagaagtggagcttgggcatggggtgggggcatggagactcgagacggccacttagatggatatttggaggcagagcccattctgacacatgaaagccacggtcacagaacaaggagaggagtgaacattcccatccatacaattttctttaggggctggggttgggcacccagcatggcagggagatccccgggcaggctgtcagaagtccctgtgccccctgctggctgtgtgaccatgggaaagtcccctccctgtgcagcagcttctcgctgagcttgcgtctggcgcgtgcttcgtgggcctgctgtcctcactccgggcgtcccctgctgtctgtgcgtgcagactccctgccaacaggaactggaccaggtcctggagcggatctccaccatgcgccttccggatgagcggggccctctggagcacctctactccctgcacatccccaactgtgacaagcatggcctgtacaacctcaaacaggtgagcatggtgccagcctgggccagagcagctcctcctcagccctgggccccagatgtgccttgtttctgccccacccgcctatgatcctctgaggtctgagctgagtgagagactcagactcctgtcaccatggggattgggatgccagctgccaggccggggagggtgcagctcttctccctgcctccgacgggtcagttgctggctccacttgcccagctgcccaccggcctcacttggagtccaggttgggaggaggctcttggagaagggaagtggcttaaaccaagcatctttgctttgatcggacattgacatcacctggagctcttcctgggcccgcccccaaattgccatgtggtaggtcaggtttacagctctaacaagcctcaggtgaggctcataatctgtgagccacactcccaccatcattgatttcaaccactggccgagttgtcttcatggtttcgaagtatctcagggaatgaagagtcaggcatggagaaatgccgttggaaagattctgaaaagccatctagaacaccattgtaaatacattggagaaaatgaagtttaagtaaaccactcaggagcccttctccctcctctatccaccttctgttcatatgcattttaacagtcactgtgcatatgcaatattttccctgtaacatactttttttttttttttttttgagacggagtctcgctcttgtctcccaggctggagtgcagtggcgtgatctcagctcactgcaacctccgcctgccgtgttcaagcaattctcctgcctcagcctcctgagtagctgggattacaggtgcctgccaccatgcctggctaatttttgtatttttagtagagatggggtttaccatgttggccaggctggtcttgaactcctaacctcagatgatccccccacctcgacctcccaaagtgctgggattacaggcatgagccaccacacctggctgggcattgggatttttataaagctaccctggtggttctaatggcagtctgggctgacctaaagtgtggatgtgtgaagccaggagatgggaacagggctctgctgatggcttaggggtctcacctctccacccccttcacccaggcaccttgaccctctaaatattagtttagtattaaaagctatttgtgtacatgccctctaaatgtaagctggctaactccatttggagctcagaagaaaaagtctcgatcacttctcatgggaaacaggctgtctgctgcacctttgggtaactaaagtgatttgcaggagtagttagcttatgcataaaacagagaccttggagtgggaatgcctggcttccatctcagctgtgcttcttaccagctgtgtgaccttgggcaagttgcttagcccatctgtgcttcagttttatcatctgtaaaccagggataataatggcatctaattcacaaagtggttgtgaggattaaatgactatatttgttagaaactgaactagcagtgtgtcttgcacacacagtgcctggcacacactgattttgattgcaacatgaggttttacacctgacgctatgactaagcttcagtatgctgggtcccccccactggatgggacctctttgaggctggggactgagtcttttcatcttcgggtgtcctgaatggccttgctaatcagaggggtccctgggcgggcagcatcagcatcacgttggagctcgctagcgatgcagaatttccagctctccagggacctactgcatgggaatctgcattttatcaaggtttcctggcgcatatttgaagttgcgaagctccacccggcagcgcatgggtagctgcaaggggtggctgctcagtggacgccgggttgagggacagaaggaaagttgctggctgcgggctcctccatgctcttctcctctctccccagtgcaagatgtctctgaacgggcagcgtggggagtgctggtgtgtgaaccccaacaccgggaagctgatccagggagcccccaccatccggggggaccccgagtgtcatctcttctacaatgagcagcaggaggctcgcggggtgcacacccagcggatgcagtagaccgcagccagccggtgcctggcgcccctgccccccgcccctctccaaacaccggcagaaaacggagagtgcttgggtggtgggtgctggaggattttccagttctgacacacgtatttatatttggaaagagaccagcaccgagctcggcacctccccggcctctctcttcccagctgcagatgccacacctgctccttcttgctttccccgggggaggaagggggttgtggtcggggagctggggtacaggtttggggagggggaagagaaatttttatttttgaacccctgtgtcccttttgcataagattaaaggaaggaaaagtaaagtgtgtgtcttttgcctgagtctttggggtcttccagggagagatgcagagcctggcctaggttggcctacccgccatcatccagctttgcccctggctcctaggaaaatgggaaaggccgtttccgtttcccattcatgaaatggcaataagaaggaatgggaacctcctgaatccagatcaaaccctccagtgcagccccaggactcccaggtgaggcttctgcccccatgtggcccctgcctggcgctgtacaggggcaggatgagtcacgggctggggatggggagatgtggagcgtgggtccggcttcctccctcgcacattcagataacactgcagtgggagataaggaacaggaaacgttgggatt

SEQ ID NO: 98667 - DNA, 1065 bp, Homo sapiens
ttccatacaggccctagaagagaagtgaggacgcgggtgacccacacggccttctgtgcctcttcaacagctactctcccagcctcccatttctgccaagccacattctccacaggactcaaacatttagctttactttagacttttccaggaatcttcccaaatctcctttcctcatcccccctcacctcttcctcaccacccacagccccctcctccacccccatgtacaacatccggcttttactcatgcttgtttctaattatgcatactaatttattttctttccttttttcctgacctgcctatattttcctactcattctttggcctccactaccgaaaaatggaatactcctcctgtacagggtcagggtttttccttccccagtgcctaaagctggattcagtccacagtgacttctctaataacagagtgtaagggactccttggttgaaaagaaggaaaaaccccaacttgcctttcagggtctcttcaatgagcttgatttgtgttaaatttaggggctcaggaatttctgccgatttgcagcacttactactcctacccttcccaacatttgtgctttatcgaaacaactaaattaggagcagcttgagggtaggggtcagagcacagacattttctgtattgcctgtagaaactagcacagtacaggcaccccctaagtgcaaaagaagtccttgctgacccagatggaattttcctgaagtgagtgctttgtgtctatctttagaactagactttcctgataaaatagtcaggagatttggctgaattttccagtattcaactggctatgttggggtcatgtagatacaacctttaagaacataatgacctttaaaatatctattcctgaagtcaggtttggtccctagtctgtgggcagatgactgttttcatggtatgctttgttcgtgtccttcctgggtgggggaggatttggggggacagtttgactctagttatctacaaagttgagttatgagaccagcccttttcaactttacctcttgcaaattgatcctgtaataaattg

SEQ ID NO: 98668 - DNA, 1075 bp, Homo sapiens
aaggcagaaggggcttacttctttataaagaccaatacaactctctttggataattagaaatatattcactaataaaatgttaaatctgggaaggatctttgaaagcaggtaggccagtgattttcaaatatatttcatgaaaacctggggcctcgtgaaggagtttcagggatactacaaacatttattttattcacatttcattctaaaaaatatgtaaaccactttaaaagttctaataaaagtaacatatatgagatgccacacttttatgtatttgagaactccaaaaagtatgttgtcaggttgttaggcaatgttagttactataaaaaattacacagtggttccagtaaaattatagaataaagcctaaaattggtgttcttgaatgctgggcacctctcctgcaagcagagacgtggggtccccaaccttttccatcttgtggccccaccatctttcactcaagacttccaggttctctgtgtttctctgcattgagccaacagaaaagaaaagaacacgagagatagggtgtctaaggctctttgggtgcagtgcacatccttcctttcacatgctattggctagaaatctgtcacgtggccacatgtaaccgtaaggaactctaggaaatgtagtccacctgtctggaaagaagaaaaagaactggacttgtaaacagctaacctgtctctgcgttaccaggttctctctcctaggcacatacttacatagttggaaatcagatctgttgatcttaggaataaccattttttttttgagacggggtcttgctctgttgcccgggctggagtgcagtggcatgatcatggctcactgcagcctcaacctcctgggctcaagcaatccttgacttgcagcctcccgagtagctgtgaccagaggtgcgagccactgtgcccggctaatgttttaatttttttgtagaggtagggtctcactatattgcctaggctggtcttaaactcctggcctcaggtgatcctctcatcttggcctcctgaagtgctgggattactggcatgagctaccatgcccagcccaaat

SEQ ID NO: 98669 - DNA, 1287 bp, Homo sapiens
ctatgtaaggtgctttacttctatgaattctaatcctttacagggaaggcccactttcccaagattcaaagaggttaagtgacttgctcagagtcacacagctagtaacacagtcagaatccaaattcagacctgtcagcctccagaacccagcacaatggggacagagtctaaaccgtcttcctggtcctgatcacctgcttcactgctcagttatttctattcttggggtgctctgcagtattccaggggctgggtgctcttatcccaagatggagaagctagagcagagagcattagagcaaactatttacagccctgtacaggtcaacagtatgtgggtgggtcattaatttactacctctttgcaaaaaccgttaagagatccaatggactgcataaaaaatatcaactcactgaaacacatcagtcaaactgacaaagacgtcaaacaccgagatgcacatttgtctagtgagccaagtggtgagaaatgtgggagggtggggtctacactgccagctagggtgacgttcatattcacagcatcagagaaaacagattcgaaagagatctggaaggccaaactgtctggtcctttatcacatccctgacttgcagttgcccagcccctcctaggacaaccacagggacaggaaaatcactatttccagaggcttcaaaattccatctctggacatttctgacttcctgggtgctggagcaatagaaatagaacttcagcactctcagatggagatcctgtgaatgccagtgaggccactgtaatagacacagtgggaatgccaaatgggccagccactttggaaaatagtttggcagtttcttataaagttaaatatatacttaccatatggtccagcagtcccattcctaggtatttacccagtgacaacatatttccatattaaaacctgtatacaaatacctttataatcattaaaaattggaaacaatccaaatgtccatcagctggggaattcacaaacagtggtatgtctatactgtggaataatactagtacagcaagaaaaagaacatgctactgacatatgcattagtgtagataaatctcacatgccttatcaaagcaaaagaaaccagactcaggtcaaaaggctatataggttttgatttaatttatatgacattctggaagaaatgacaaatgtgtacatgtgtgagtgtgtatatgtatgtgtatatatatgtgtgtgtgtgtgtgtatacacatacatttttgtaaatatatacatatacttacaa

SEQ ID NO: 98670 - DNA, 1049 bp, Homo sapiens
tctccttcccactcttcctactttttttccattaactgacaatgattaagtttgaccttatctcacacatgcaatcaaaagaaaaagaattctcgtgatatttttatcaaagcaaataaaaacaattatcaagtaaacttggatacagctaagaaatacagaaaagaatgacagcacccataatagtgagtgcagcagagaaaaggcattcatggtttggggaagtgcaatttgatccgaccctactggaaggcagtttggtatatatatcaacatttaataaatatgatatggtaatttcacattgaggaatatatcctaaagaaatgaccgggcaattcatatgcaagatagagtgcctattagaatgttgtttataatacccaaaattggaaacacagtaaatattcagtaatagagatttattgactagatgatggaatgccaatataatgatgcactatatatccatttagaataacaatctaaattagatgttattgatataatcgaaaggaaaaatgattacaaaatatgtagaattccatttttataaaaacaaagcattaatgtataaaaaaatctggaatgtatgcacatctaatgggaggagaaatttttaaaaatattttccattaattgaattttgattttttcctacaataaacagatatttcttctttaataaggaaatcacacatattttaaatagaaccaagaccattaacttagactttaaaagtacccagaagacatttccatcagaatctcaaagtttctaactttctctctctttaaactagattttcttcccaggattctagacatgtaaaaaccaaacaaacatttcttaagcaatattattgattaattctgtgctgaattacaaatattgccaatatgttattttctatcttttgactgcattttctacttcaattgggctgaaagaaagttgaagaaagattcttagttctgttttcatttttgcatgactgtcctctccagctgcagctttggagaggaaacaaacattgaaaccccatcag

SEQ ID NO: 98671 - DNA, 1014 bp, Homo sapiens
cttcagaatttccataaccaataatctcctaccagcacggccgcaggaagtctcctgaatttcaacccaggggttgatcagagctgcttgagtggccaagacagaggtactaagcttgctaagctatgctgggtgcatttggagttctccctagcctccaatctaaattccttcccctgtattgtcaggtcacccatgggagacctaggataggattatccagaagatcatgcaggattttgaaaaaaggaaagagcattatttttgaatttgaactgagcatggacttagaaagctctgctgatgtggccaaggaggggcaggaatgggggtcatgtgatggattttcagactctggagtgaccggaatgactcactggaggccatccaggccatggggtttgaggtccagtagtggtcagcaaagaagttcctgggaacctaatggggacaatttggggttttgcagatcatctgaaccgaggttgtttcacatatgttggagaacatgcagctctctatatgtctatattttaaagtaaataaaagattccctgagcaaaccacatggtattggatgggctcagactcctgttccgaagcctctgctttctggctttacaggagcctgtggtgaccactctgggctgggagtccgtgtgctgggtcagcttctggctcctgctgaggattcgctatagcaccagtggacaggcagcttgtcatgcgtgggcttagttctacctttccgtgaaacaggtggagccggggatcattgggtgttgtgagagtagatgaaatttttgcttagtattgtgggttgaatagtgtcccctcaaattcatatgttgaagtcataacccccagcaccccaaaatgggacttggaaatagggtccttacagaggtaatcaagttaaagtgaggtcatcaggagtgggtcctagtccaatatgactagtgtccttataaaaaagagaaatctgcacccagtgacacatgtagaaggaagatg

SEQ ID NO: 98672 - DNA, 1069 bp, Homo sapiens
ccatgaaactggtccctggtgccacaaagattggtgatatggtttggctgtgtccccacccaaatatcatcttgaattgtagttcccataatccccatgtgtcacaagagggacccagtaggaggtaattgaatcacgggggaggtttcccccatgctatttttgtgatagtaagttgtcttgagatctgatggttttataaggggcttccccctttgctcggctctcattcttctctctcctgctgccttctgaagaaagatgtgtttgctttctcttctgccatgattttaagtttcctgaggcctcctcagccctgcagaactgtgagtcagttaaatctcttttctttataaattacccagtcttgggtatgtccttgtagcagcatgaaaaaggattaatacagttggggaccactgagttaggagaggatcatggagactggtgggagatgatggcttggttgaggagaaggtgagacgtacttggaatcaggtatacgaatgcaggcacagaccatgcattatttgcctgagatgggctctggcccagaacagatgctcagaagaagggaagatgaaagtggagagctgtggtcagggttgagagagggagaaaagtggagaacactgatacagctctggcaagcccacctctgaggctctgtctgcattgcctatacctgtttgtttgcccttgatgtctacattctacaaataccttgttttggttgaatcttttgttgttcaacctggcaggcttctattcctgaacctattgttttgtccctatatgaccccttcctgctaagaacagcgctgtccttttggggcctgcccctcccaccccattgctttaatgtctgcatcacctcggatttgctggacctttcttttctcttaggacctcactgcttgctcatggagactgatcctctgtgtctgctgccacagtcacgctgctgcccatgggttccctcctgtgggatgagttttgagctccaacatcacctctactgcttctgctgtggccaacctgatccaacctgatcctcagatgcctcccc

SEQ ID NO: 98673 - DNA, 1074 bp, Homo sapiens
tgctttaactggattcctacattcaattggccgctgttacactcacagctttggtggagttagtcctcagatctgagctgcgtcttccccatggggctgcagccctcagaaggcctcttgctgcccagggccacagcgtgacttctgtgggcacttcgccctcatgagtcctacccctggagaaaaatattaaaatttatactttatgactacattggcataaaaacaaatgtaattccggctggattcatgattgtatactcatttgtattctattcattttttcttctgatttttgaaagacaactaaaataaaaacatttttgagggcccctagaaatattgtggcttctaggcactgcactgtgcctcatggagaagtacgccctgcgtgctggaagtgatgggcagtcctaagagtcttgtcctgggaactcctctggacccagcaacctctgctgccacctgacctagagcccaaccccactccttcagccgagcagccctaaggtaagggaaaaccaggattgcctctgccctcttactccaccccttccaccttctctcaaagtccttccaagcctcgtagacaatcagcaaaagaaagtcacccctctaggcccttttaaagaccatttaggccccctctgcctccccagcacaagctctttgatttcatctccttctcttccctgtttggaaacagctgacttttaggaactgcagtgaccagggcaactcaccccacttcccaggaaagtccctctttccttctctcagagaaagattggaggctgctctgggattagtgctgccggctccctccccgaaggctttgtaccctgcagcagtgggctcccagggcctccatagggagaagtgccttctctgctcagccttgacttcagaggggcccagggtgggagtgggaatggagggctccatttcttacttcattcctccatagtatatggctaagtattcaagaattataagcaaagctgcaaacttgtatgttctttctttcatccttgacaaaatactgttaaccaaactgaaatgaagccaggtaag

SEQ ID NO: 98674 - DNA, 1237 bp, Homo sapiens
aacacctgaccaccatttaaggactctaagccagaatggaaaattcaccaggactccattcttaagcctatgcgagtcccctagagagaggcattgtactgatatataaatattatataatatatacatgagacatactgacagaatctgtaagctaataaaatgtaagaaaaggttaaaaaaagaataggtaaattgacaagaagtatttattgtttttccatattgctttattgccttccttggggataaaccaattcctatccttttttatatgtgtaagtaaagcctgaagtgtagggggcctttgttcttgaagcagccagggtctccttgccctggccttggccttccctagactgtgtggggctcagcattgggaggggttgcacatgtcccagcctttggcccccttacttttcagcaagccaggggcccagcagtcagctcccaggatgtgtggggagctgtccctgactctgcaggcctgagcgagtgtgtgagcatgcggggacatgggtgtgtatggcacacataggtgcgtgtgtgtcttttgtattttttctcctccaaggagctgtgtcagtgtggacgttctgtttcagggagttggaaaggagggtgtctgcagaaggtggagagcaggggcagaggccccactggccaccccctgcttcccagagtgaaaccttgtgcctggtgaccaaagtccctccaaagtgctcttccttctgggttattcaagccaaatatctgggtttccccctctcctcattccctagcaaaccccaattatcttccaagataggagatatttcccatccccttcctttgtaaatatctcatctcccactggagagcccaggagcctattcctggcatggatgttctgtccacacttgaggctgggcggtgtatcagacccttcaagcagcctggctggggcccaggactgagtctggggtcagctttcacggtcgcttttcccttcctcaccacccaccacagcccaccttgcatgcatggccagcccctccactccagcctgagccatgtgtgcccctgcgggaggacccattcatgccagaaagctggtaactccctcccagcatccctgcggaaggagtcagtttctgagagtgtgacttttcaaggcgaatgatggggaagggttccccagtccccacagtggccccacctctgggccctgcaccagagcccttctgtgtcacggcgg

SEQ ID NO: 98675 - DNA, 1099 bp, Homo sapiens
ttttgcgaagagaatgctgggtcactccagtcctgcgggtgggggtggggaacgggtgtggggtccaccttcccttttattttctggcttccaaggttcttgagcccaggaagaataagtgtgtgtgtgtggaggggtgtgagctacttgacctttgtctccctgaccttgtggtgtctgaggaggctgagccgtttgcaggcagacagcactttcctgattggcatatgtgttgtgtgtaagaacagtcagtaggggtagggctgggatgggcggggagaggcctgtctaggaatgttcccattttattttggtctcctccccacccctcactatccagccttgtcaatcctctgcagctcccctcgcaccccttcaaaggggatttctgcccacccttaaacaaggtgggacactgtctctaggacttggcttgtggtcaggggagtgcacagaggattctcttctgcacctctctgagtccctgatgctgaggcctgctggagggatggggaagagaggttggcctgagaccagcttgctcacctgggctgctgtccacctcctggggttccacttgcccttccctcatgcccgttgccctctcccgcctgcaggctcttcggcttcgtggcccggaagcagggcagcaccacggacaacgcctgccacctctttgctgagcttgaccccaaccagccggcctctgccatcgtcaacttcgtctccaaggtcatgctgaatgccggccaaaagagatgaaccctgccccttgcccagggccagtgccatggggaaggggcttgtggggaggggacccatgaatcctgaccactcttgaacccagaaggaggactttgggccaatttcggaggagagaagaaagtgcaacgtggggagagggaagtgaattgcagaggggagggggaaaagagagagagagagagagagagagagagagagaaagatggaggagaagaacttggattcccctgggtagatggaaactgcaaaaacccaaagcctccaaaactaaccaggtccacctaacaccccctccctcccctaagaagatggatgtcctcaaaagagaaggaac

SEQ ID NO: 98676 - DNA, 1036 bp, Homo sapiens
gcatcaccccagtctctgcctgcaccttccatggtgctctcccctgtgtgtatctctgtctcctctccttgtaaggacaccaggcatacaggcatactggattaaggctcaccctaatcctgtgtgacctcatcttaatttgtctacatctgcaaagaccctatttccaaataaggtcaaattcacaagcactgggggccaggactttgatgtatgttttgggtgaacacaatttaacccataacactttcttcccttctcctgctttagacaacagcccggagacgcgggctaaagtgaagtttgtccaggacacttctaagtattggtacaagcctgagatctccagggagcagggtgagtgctgggctctgtggtgcatcagaggccatagctggctgaggcctgctgtgtcttccctgggcaaggaacagaggcaaattcagtcctctttgtagcagggggtcatcacagagggggctggggttgaagctggacagtaggaagcacttcctgcagtgaagtgtgggaacacagaagcagtagttgtagacacctcttggaagggttcttaaaaacagcaaagccttggttttcctgggcaaagtaaaaggtctgctaagataatatgaaaccttagctctctgtctgcctgatgtgggaggtttttgcattttacagggagagagaacaaagttgggaataggggaatgattctcaggggaaggctgggtgtgggacaggggtcagcaacggcagcccatgggtcaaatctggatgctgcctgcttttgtaaatgaagttttactggggcgcccccacacctgctggcttgcatcctccctgtgctgctgtcctgctgcagtggcagagtggagtagttgtagcagaggctgcatggcctgcgaagcctgaaatatttactctccggccatttacagagtaagtttgccagccaggtgtggtggtgcacacctataatcccagcacttcaggaggccaaggcagggggatcacttggggccaggagttcgag

SEQ ID NO: 98677 - DNA, 1076 bp, Homo sapiens
ctagaattagctggagctcagagccaacgtttctgtgcttcagatgccggaccacgcaataggctctcagctctcctcgcagctggttgactttaacagaccagtggtatctcaaacactctccagtgggaagggccatggggtggattatccagcaagctggcagagcctggtgattgtgtctctcactttggggtgacttcaggggcgtgggcctcgacaggactgaactatctgccaattgcacctgctgagttactctcatcttacagggccccaagtgctctggccagagccacagagtttggaggggaaggttcttaggggttaactcagccacacccatcgttgtcacagatatgcagctgacatcagcactgtgggtggtgttgggggatctgcccaaggtcacagttaggaggtaatggagccagactggagttattggtctcctgtctcttcctcaagtggccatttcaaagtccttctcctgcctgcaggcaccgtgccctgggattccagcgtgggagttggaattgctgcccgtggcctggggagtggagcggggaaggggcagggagcaaagctgtgggcagccagttccttatttcctgactcatgtgccactgcccgggtcagactaaagctcattctttgctgaccctctgaggctctgcttgatttccttgctgatactttgatgggaaattcagaaaaaaatgccagtgaggcaaaaatggccagaggcaggattattcggcttggggaaaagaataatttgagggatgtctgctatgtcccaggcgctgtgcgaaacactttacattcattcattctttcatgcattgattcatttattcataatactttgtgcgctgactgtttgccaggctttgggaatataaggatgtgttaaggcagctggtgaggagagtgatgccaacagacatttcaatattaggcaaaagtgctgagctgaggtaggaataggatgtcatgggggctgggaggagggggcatgtggctcaatctaaaatgtttggaattctaacttttgagcttctagatctgggacc

SEQ ID NO: 98678 - DNA, 1013 bp, Homo sapiens
gggctgcctctcaccagccagcacactcctgcttgacacttggcccacagagccctgggcacaggggctgcgaggggctcaggctcctgagagccggggactcaactatgcctcggagccttggggtcctttgcagggtgggcctcggccttccccttggagtccttctgtggacagcgcaaatcggccctggcctcaccccagctttcccatctccgttttctccacagattctctttctcaagaaataatccctgttaatctctttctctctttttccttttttgctcttcctcatcttcaccacctgcccttctttcctgcctctccttcctcccacctctcttctcgtcttccctcagaggaagatgaggggaaggtggtggtcaggctgtcagaaggtaagtagcatttgctgtgacttcctgctctctgggtctggaaatggcttttcaaagcagggcttgaagaggctggctggaggcagctctctttcctcactgggactcaggcgaccaggcacatggccttcctgtcccccaacgcttggtgatgagataccaccctggacacctcctgagtcctgatgggggagcttgtagctgccaggcgctggctcaggcacagccagtgtctgggggctcctgcagtgtcaccttgttgaccaaaacgctcctcttgcaccttcctctcccagcgccatttgcaccagcctgcctggtgtgcagcagctcatagaggtagacagggagggactcagatcccctttcccgggacgtgctccacaggcatttctcagagaagagattctccacgttggcaccactgacgttttggcctgaatgacgcctttttttttgagatggagttttgctcttgttgtccaggctggagtgcagtggcacgatctcggctcactgcaacctctgcctcccaggttcaagcaattctcctgcctcagccccctgagtagctgggattacaggcatgcaccaccacgcccagcaattttt

SEQ ID NO: 98679 - DNA, 1045 bp, Homo sapiens
aacttgtgttggctgccatcttgggcatgaggaggctgaagctgtgactgattggtggccccaggaagccgtggctctcccttgagcagtactgtccaatggaaatatactatgagcacatttataatttaaaattctctagtagtcacattaaaaagcataacaggaaactggttacattaattttaataacatttttgttaaatccaaaatatcctttcaataggcaaataagtcaataaaaatattgagctattttacaatctcttataaaatttaagaagaaactggtgaaattcattttaatatgttttatttaaccccagtctaaaatattagcatttcaacgtataatcaatgtaaaaaagaacgggatgttttgtgttctttttcatactttaaaaccctgtgtgtgtttcacacttatggcatgtctctgttcacactggtcaccctgcaacggctctgcggccatgtgtggctcgtgactgctgtgctggacagggtgagcctagagcaggttacgtgagagccagctctgcagcctcttgtgactgcggggaacctctctcactttccatggtgacatctgcttccattcactgttagctgtaaatggccagggaaaggacatcaccttgccttgggtggaagccacctgggctgtgctagaactgggttttgccttcttctctccctcctcttggccagccatgggtacctcggtgagaagtcagaggttccatagacacacagggttagggagagaagacagaaggtggagaaacgtgtggaatttttctctcaggaagcaaaagacttgcctggctttagcgtcgcccactcatctgcctcagcagaagggcccaattgcccaggaactgggggaacgaggaattcaggagctggaggtgaacaagggaggaaccaagagagagctcctgccctgtctggtcctctcgtccgcttcacctcctcacgggcccacctgcgcctccgctgcaccagttggttaaacatgcgcgtacctgtgggctggggctgc

SEQ ID NO: 98680 - DNA, 1366 bp, Homo sapiens
tatttttctgttctgcgaataagggctcttcaaggtgtggggcttgtttgctttaagtggaacagtttgtaagtggcagagtgaggtcagagtctagtttactgtccccatcctgggcgctattttcttagctgagatggcagcagggctgcccctgattaataaaaagcccaaagcggagactcagggcaccactcggtaccttctgcatttaatgtgcaaatgccagtcctgctgctctcctgatgcgccccccacccccgattatgggagcccctgattatgggagagtatgagggcgtgtctcagagtggctgtgcctatgtgagtgtaagtgtgtgtctgcccgtaggcttggcagccggcagcctgctgttcatgacaagtaggaaggcttcccaggtggcgctgtttatggcagcctttgtggctgtgccagactgggggtgctggggggcgtggctggggacatgcagtcctcactgtggatggcagaagatgtttctgtctgaatgagggtgatttctgcttggctgtactggcacattcctaggggctggcagtgtgtgtgcagtgtgtgtgcacacacgctgacccatgtgacctgaggcctttgttaagtcctagtggtggtgaaagcagggcggggaatctcttcccagaagagagtcaagaccagaagcccacgcttcaggctgggtcttggcctctgggacccaggaagtgagttttctaggattctgggagccagctcaatgaggcaatggattccgtgcctcagcccagctgtgggaagagggagtgggaaggaaggagggtgagattaacagcatccccaggcctgtggaatgggattgggatgggaagtacagaaaagcagatggagcacacgacttctctctgtctgctcttcagctgggagggacatggtgggatccgccgctatctttggggcagggaaaagggggcggggagctaagaggccagtataaggggagttggtaagaggttcagcggtacaccggatgaagttggggaaccccagagaaagccaaaaatatcccagaggccaactggggctggggacttcgtaacaaggcttagtcatgtctttgtttctccttgggagcaccatttgcaagatgatgcaatttagccctttccaagagttcttccccacaggcttgatgttgctggttggttgatgcagttgccttggagactgtcttttccctccacctcccctcccttgtctggaagctctggccctccgcctccaggggttggaagtagttgacatctgtttcttgtatcagtcctttgtgttcttggtctcagctctgtgtggagagattcctggtgaagt

SEQ ID NO: 98681 - DNA, 1008 bp, Homo sapiens
cgtgatccaggggtggtgggcagcagtgctttgccaaagtacatgtatcggtctgtgtcagggctacagctcccagaattgcagggtgtgcgagtgtgcgtgtgagtgtgtgtgcgtgtgtgtgtcagatgaaggggattaattgcctccagtctggctcatgctaggggagccttggagtgagctgttgtccagcacagcactgtcctggcagaagagtgacgcctccctgggaagggggctgctctggtgccctgctcctcaggtctgggggcctgtgtggaaccctggggctgggataactgctcatcctggcagggctgtggggaaggcctgatgcccgtgtatgaagcagcccttagagaacgcccagggctccttgaacatagggtgttagggtcctaaagatactttgttgtcataagggtaccccagccttctcagcctcctgggagcttctcttcctttcttcctctggccacacggcctcctgctggggtaggggctggccctagaggttctgagggtgacccagtggccccactatgtacccccatcatcccagtgtcctgctgccatttctgttaggctgtgtgtgtgtgtgtgtgtatgtacatgcaagcatgcacatgtgtgtctgtgcaaggcacctgcctctgcctaggtgggtgtaggagacagaggccctgagagagagaatggggccaaagactgagaaagtcctggggtggagggtggtggcgggagggagggaggtggggagagcaggcctatttttattatcagtcagactctgggacgtgagagagggtgttctctccatgacactggttgtcagcttgtgtccagacaccctagcttggctaaggaacaatggggctctcttctctcccctctgccacgccagtctcccctcccatagagcaagacaagagagagggaacatgtctctccaggcactccaggcggatctgggcttgccaagggggacaacagtgggacactgtg

SEQ ID NO: 98682 - DNA, 1071 bp, Homo sapiens
gctctgggtaatgcattttaatgaattgttatttgctggacttggacccaaaggactttttatcatgaagggactcatcctgaaaaccttagtaactcattcgctattcaaaacctacctgctggtccgacagggaagggtctgtcttcactgagtcattgccaatgaaggtgactcctttcttgcagtcaatatggctggcaccttttattcttcatggttgggccgtctgtcctaacatctaaataagcaaaacctccctacttttcatgaggaagagaagtggggtttcttgatctcagagcccaaagtgctgatcagctggggcgggtttctctagatgtcctccagccatgtgtgtgccaggacccctggagagctggcaaaaatgcagattcctggccccaccccaggcctctgagtggaagtccctggggatagggtcctgaaatctagatttttaacaatctccagaggaggttcttgtgaacatcagaattagaaaacagctgccctgaaaccgtgtgactttaacatcccctatttgtttccttcgttcttttttaagtgtgtgagatggctgcatccttactttcctgcatcccagcctgagctgcatggctagtgccgcacacacctctgcacccttttctgggagggagccccggggagtgggtgcacaccctagtcagctggggattttcctcagagctttccaaaagcatgactcgtgcatctggattatggctgccctggaataaaggccccgtggtgcaatcaagctcagcatcgagggtggagtctggaactctctgcagctgctgagaagagcagggagacatcctcagacaaagacagtggggccatggagagattttgggttttgcaaccaccaagaggaatgggcaggacactggacctttcagcccacaagagcagatgtccaggctggctgggcttggggcctggagctctccacttggggctgcctgcagcttgtgtttctgcttcagtttatcccactccattgtcacccgtgacaatgcccacagcccccaaacatgcagaccc

SEQ ID NO: 98683 - DNA, 1031 bp, Homo sapiens
aaatcagcctcttgattgccctgcatggccctgggaacctctgcagcctggtgtgtgtttacagacttcctgtaagtccccttttctgtcctagcctcagggactccatggctgctgcagaaatagcctcagacaagtttggagcctgaagccacccgggcaggtccaagcaggagaggagatacaggcctgccaagtccaggggctctgggatccaaacagtgcctggtagagcatcttctctgagttgtatccttgaggatccagatccaaacaggactttagggatcacctatacttgccctctgccattgcacagtggagtaaactgaggcctgtccaaaatcaccccttagaattctggctctttggctcctagtctgctgctgcagccaggcagcattttctttaggtctgtttgttacaccgtggctggttagagatctaggggcagagttggagaggtgagttttagctgctgctggaaggatggaggtctgacattcaggagaaccctcttgcctttgggggatctgagtaacaggaacaggtgccaggactagattttctagattttctgaaagttgaggagaagaacctttccactccacgcatctgtctaggtaggatgagtgaccatggcttgtggacatgggaaaacaaggcaacttctagagggttctgacaaggtcctagctcattcttgtgcaaaggggactcaggagtctcaccccaaagtcccttttctcctgcccctctttctttgctcaagcattatttacactcacaagactatccctcagggacctggggtgtcctgcctcagacactcctggctccagaatactggacctcagttgttcaatccctgggccatttatctccctgtgccctgggaagcagcaacagagctgttgatggatgtggggagcttcagactgcccaatctttacatctttacagccagtcgatgccctggctgcttatctgggacttatgcctttgattgcttaaaaaaattgttagcagca

SEQ ID NO: 98684 - DNA, 1154 bp, Homo sapiens
tacccctgcacctttgcaggctcccggccccccttggttccccagttccccctgccaagcccatatcaatatggcccattgtctttctccagctccctgggtctggtcccatgctcctggccacacctcacgtcttggctaccgttgtggcttccagttgttcaaagcagctgtggtggcttcctccaaaagtggctacggatcagcaacagatgaaactcaaggggctatttatagcagggtggccctggggcctggagcagggcctagggcctggggagattcagggactcctcattagggaccagtgaaatggagatgggtgaactgttgggtttctgtgttcctctgagggggcagttttggaacagcctggtttgggtcttgaaaaccaaacacagtcactcgttgactcccagctccacccctgtctaatccccccacccccaagcttgactcatgcaaactggagtcctcagggccagaagagctgtgagacttagaaacttccccccagtagccccacttggctcttccctccttcactgctgaggagctgctcattggtccgaggcagctgggactctgggcagagccttcttccggacagctggatggagggtccccctcttagcagagctgctctaacttggggctcagctgggagctggacctcggaacccacctatcctgcctcgtaggcactgcggagccaggagaggggtgcaggggctcctcttcttggagaccccgtggtcaagccccaggttggagtgtgaatcctgcctggccgtcaacttcccagggacttgagggtaagttattctgtgcctcagtttcttcctttcttggcagattgtggtcctgtctctttaaagaagaggctgcaacttggcggtaggaaaagaccattttctgagaggcacatgggtgtttggaaggtgtcaatgggctcaggaggtctgagaatctagaaactggccttcccaattctgcatcctgtgaggtgactggaaggatgggtagaggcgatgcagggtgttggttttctatagaggtgaatgtttggttgtaactacccttttcatttttcttgatacaaaagtaacaacaaaaacaacagctgtcatctggtaaataccaggcatgatgcg

SEQ ID NO: 98685 - DNA, 1054 bp, Homo sapiens
attgagccagtcccctgcccagccacgggactctccagcagtccaccccgggggaggaggacctgggcctgctgctgtgataatgtggctgtttgtcaagctgtgttgctgtctctggcccacggcccaggactcacaggcaggaatggctgttttcctcctgccgagttggtgtgtagtggagtttgtggatagtgtgctgtgtcgcactttgttttggaaaaatccaggctagtgggcaggaaggagaggggaaggggtgtggctgaagggggtgctatgtgggggttggccacagcccccagaggagatgtaggaatggggccgggcccctgacgtaggttggtcaccaatctctggctgcctgacaaggcccctggtgttcgcttacagaccctcctcccaactgtgcccctctggggatctgggctcaggaaatggcttttcttttggtcctgagctgttgtgtttggtctgtggacctcaaaggaaagcagggctcttcccacagaggcattgcttcaaaccaaccccacccaaggctggaggttcgtgctccttgcctcatgacggggaagaaggcagcagataacagaacctggggtcatagaccttgagccacccagtagtgtctgagtggtgatccactcttgcctgcaatgaggaccaaggcaaaaagagttggctgaatctgcagcaggaaggatgagggttagataccaggaggaaattcctgacagtgagaaaagtaagacactctgtctgggaggctgtcgaatttcctttcatggtgccctttcagcaaaggaaggattgtgttttggaggtaaggatggggagagttctgtttggtgtttagagagttggatgaaaagttctgtaatcaacctgtgtcttgagaggagccaggaagaagttcaaagccatttgggtaaggtgatttgtgatccccggagaggaaaagaataggattacaggcaggcagagagcttattttcctttttataaggtttgtaaagtcctgtagtcgttttccctaggggctccacgcgga

SEQ ID NO: 98686 - DNA, 1034 bp, Homo sapiens
tgagtaggtggcctggagtccagtgccccttcactgttggaaagtgattcctccccagtaaccgctgtctggctgcaactccttcctccccctcctcaccctgccttcagatctcccgtcttcagcactgctttgcaacaggagggtgacagagtcaacttcaggggcctgctctgacttggggcagagagagaggtctgtgtagtgccgcggaaggacctgtggcaggggcgtcaggtgacctgctagtcccttttggcactgtgtgacttcaggcaaattgcttccactttttgggctttggtttcctcaattgcgaaatgagaagttcgagttaggggcgttctctcttttcagcagtgctgaaattctgtaagtgcatggatctttctgaacagagaggctcctagtcttggggcctttggcagagctgtccagcatcgaggtgggatcctgttggctcttcaggcatctgctgggatgccatctgaaatgctggggaggtccttccagcactggaattggaacgttctttgcccagtgaccactcctccaggcagcttgatttcttggaacagagcagagggcaacagctgtcagggttgggctggccagaatctcccgtctctgtcccagtgactcaggtggggatacgcttggcaggattggagccaatgaagcaaaggaggggactggggaagatctgctgcctgccttggccacccaaagggaacagagtgggaggaagtgatgtgctggggatgggggtgcagaggcaaagtgagtaacagttgtgagtaatggctcagtgtctccactgggtaggtggctcctagactgcacagagctgtctggggctccggaaattctccccggaggcccagccactgaatcacagcagcctgagctcctccctccctgtcctccttaggagctgggggtcccggccagcagggtgccacacctcatcccctctgcctctctgtgcttctctggatcagcccctcccatcacctatgccttcacaccccctc

SEQ ID NO: 98687 - DNA, 1070 bp, Homo sapiens
tccggccgagcaccagggctgggagccagcactgtaaccaggagctgagggttcttggcggtggaggaggcaacctgggaccctctgcttccaggcgcctggccttgagcccttctggctctgcttccccatccctcatcccatgcttcttcacacttcacttcccgcaaggccccagtgaagaatttcccagggaggtggtggtgtccaggaagtataagcacagagaacctggtggccaggtggagcggggctgggttgggatgcttatgggttcagagaagatgttattgttttgcagaccaacttctggcctctgatgggctgtggctgaagccttggagtttggggaccctcaggctcctgtttctacccagataggagcaggagtcaaggggggccagaaagaacttttgtttggtctaagggagaggagcctcagaggtggaatcttggctcaggtgaaggaagagcttcctaaggaccctggtgggtcagcaggaggatgggctatcttgtaaggtggagagcatcttgtactggggggagtttagacagaggccgaataagggcttggaaggattcctgggctgggatgtggttagaggcgatgacctggatggtctcttgggatgctgagggcctgggatacttggagtcggggagttctctgacaccagaatgggggatcaggaagctgtgtcctctggcctggggcgtgggcgcagaccactcgcaggggccccctccttcctgccaatgtgtaaggaaccaagagcccgacgctctgccctggcactgtgcccctccctcacacccgtggctcaactgcctaccaggtccgcacccagctgcttcctgcaaaggttctgaggttcttcctatgcctcctggcccactctgccccttgcctgtggtgggctgcgtgacagtgtggagttgaggggacagcaagcaccacaggcttcacccccaatccctgcagttagagcccatgttccctgttgaggggctctggggctggtgtgcaaggaccgggggtgggtgctgggatgttgggcatcttgaac

SEQ ID NO: 98688 - DNA, 1016 bp, Homo sapiens
gcaggggttaaaggaggccatggctggcggagggggcccactgctggctggctccgggaaggaggcggtgcactgttggcccgccccctgggctggcctgggagggaacccgactagcagagccctctgctcagttgctcccagcagtggccctgggaccagctctgctccttgcaccccgctccctgcctggacacaggctcactcgctgccttcttctgggggaaaccagcttcttgccagccacagctgctgcctccgccactggccaccgcccctgtcctgggagtcccttggcccagacacccacctgacttagtggctcctctgcaggaaaggtgagtgaatgaatgtgcgtgtgtgatggtgtacgtgtgtgtgagtgtgcgtgttatatttgtgtgtagagggaaatggagccggccagggctgctgggctgttgatactgatgctgtcaagaccacagatcagattaggagaaggtgaggtcagcctgcctgttcccatgtctctgggtcaggcaagctgttcagaggccaaccttgtcagtcccctgtcttcagatgtttctgtggttctggcagggatgtctggggtgcggcttgtccctgctctgagagagcaaccagtcagaaggagtttcgtttgctggggaagttgctggtgtcagtggctgcttgggactgaggccagctacaggagtagggagggacacagggaccaagggagggggaagcttgggagtctcttctgctacttgcctgcccattgcagggggatgagtattttttcttcttcatctctttccctgccacccacttgagctgctgtgagggcacctttcttctaggggctcacttagctccctgaggtctgaccttggctgcagggaggggctggcaggcctggcaaggttagggttcaaagcacttttcccatctccactcctcagtgtgggccctgctcccttgcccatgggcacagactggcagaagtgccccctctgccctctcca

SEQ ID NO: 98689 - DNA, 1016 bp, Homo sapiens
agtacaaacttgggaatcaagtcctatcacccctgcttatttgctgtctcattatcattgactttggacaagtggcttcacctcttgcgtctgagctctctcaactgtacaaagtagggttagaataacatctactcccaggtatggggagaggagggaatgagtgaatgcaggcactggggctgtaccagggcttggcacatgttaagtgcccatcagctgttgggatctaaatgtctctccctccggccgcctgttctttcccttcaggtcactcagcacgatttgtgttgtgtgtttgtgtttgttccttcagcggctccctctcctagatcaagtgctccttgagggcaggggcccatctggctgtgttcatgttctgcctggagggcctcacagggcctgggccactgcgggcacttagaaagtacttgtggaatgaaggggtgagggacagatgggatggagccaactggaaaaggatcagaaccagagaaagaaccactgagcacctggcatgtggaagagtacagaaactgaaaaacctggggacgtctagcctgtgaagctaccactatgggagacttccagtgattgcgtggctgtgtgtgtgtgtgtgttgaataaagctttggggagatttgttccctgaagcaaaaccaagggttccaggaagcaggtttcccccagtggtgggagccgccttgaggatggggagtgagccctgagggcctggggtgtgtaggcaggggcgggcgagcccctgtcaggtcaaggagagccctgatatgctggaatgtggtccagccaggccctgaggccctgccggcttgctgcagctgctgtagttaggagaggagtagcaaacatagctgatgtctctgaacttcagtttcctcctctgtaaaatgggattcataaaggtcaatacccaatggggtgctggcaggattagaatgagttaatccccacaaagctctaggaacagtatgtcaattgggaaacactcactaaat

SEQ ID NO: 98690 - DNA, 1148 bp, Homo sapiens
tccacgaggagaaactgaggctcagagtggttcgtgattcagtagaggagtggctaccagacagtcactgagggtaaccaggtgcttttcttggtcttcctggaggacagcctagggggaaacagatcgaactgcagctggagggaattggggttgtcctaaggaggggttgtcctctggtggtagggagactggaagggggacaggggactgaaggagcagctgggactcccttaattggaatctcaaggacagaaatggttgtgttgggcggggaaaggctgagccttcccgcactggtggggtgtgtgtctggaggtgtggatcagaagctgggctgctggtacgtggaggccgagtgctagagtcccagcctgcctggcatggacctgtggaaaacagcatgggccatctgtgccctctaagaccacatctgttctcacatgccccctgccctgcatccacccctgggagccagcctcctagacctggccatgttcccaagaggctgagactgagtcccccactggtcccccttgccctccactgtcagaggcatccagctgcctctgtgttctgtgtggagaccaggagatggggctagtatcagtgagcattcttggcagcacacttgaccacccccagcctcaatttcctcaaatgtaagatagggataatgaaaataacacctggcttgcagggttgctgtgaagagctttgtaaatggtacatgttgtggggtggatgtcctgttcctggatgggtcaatgagtcggggacactccttctgccccccactcactgggtgagttagtggagggactggtggagtctcctaggaccccagtacaagggtaggtgaggggctgtgcagcggtggccctactgagagtcccttctagaccctctgcagctgctgctcctcctcctcctcctcctgccggcttccttctccaccctcctcccttcacacgtgaggatgatgataaacactctgccagctctgaatagggcctgacctcagcggcgaggcatctcccctcactcccaccctcccagccccagccgcattcctggagaggctagagctgaggcccccacttgcccctctctccctccacccacagaggcgtccagctgcctctgtg

SEQ ID NO: 98691 - DNA, 1023 bp, Homo sapiens
ttagatgagctaggtatggagagtgcttttacgctcccggtgcatgatagccagtgacctgtgatggctgtggtgtggtggcggtggcatggttattgtcattagatgcagtctggctctctccaggtgatgaccccgtgccggagcacctgtgccaattatccctgggccagttctgttttccgtgttccctgggtggtctgcattcttcctcctctgccctcttagtctgagcatcccttgtctgattcctggaggtatctcgggacctctcaggttgaactcctctccccttccaaggacttaattcttgaactatcctctgaccctcatctgaccctaatctgtgccttccttagaacccaagtttttgttttgttactttgtattctgagatgattaaacttacacaaaatttgcaaaaatagtacagagtttccttatatccttcacccaactccccctaatgctgacatcttacataaccatgcacggttatcaaaaccaggacattcacattgatctgacgttaatctgaggattgtagtagaatttggccagtgttcccaccactgccctttttctgatctaggatccaatccaggatcccacattgcatgtggtcatcgtgtctcctgagtcttctcctatctgggacagttcttctgtctttctttgttgctgatgagtttggcacttttggagagtgctggttagttattttgaagaatgtccctcaatttgggtgtgtttgattttctctttccatcattctttctacatttattaactggaattctactgtaaagaatggtgccttatccccattttactgatttattccattatttatttgtcagtatggacaccctgacattcactttatggatcataaactcatatggtcatttttttttcttgaatccaattgatctagccatggccaatgggagctccttgtgttggtaggacccatggttcttaactttttgttttctttttgagatggagtttcgctcctgt

SEQ ID NO: 98692 - DNA, 1047 bp, Homo sapiens
ggtgggtgtctccacagtctgcgtgcgtgggccagcgcgttcgtcttacccttccctccaccccggcccctctccccttctcccctaacctcctaccccacccagccccactcagggggcagcagggccgctccctccgtccttgcctcccttacccaccctcaccggcccttgtttctccttcccctgggggcagccgccgccatgatcctgctggaggtgaacaaccgcatcatcgaggagacgctcgcgctcaagttcgagaacgcggccgccgggtgagcgcgcgcccggggccgggggtggcgggggaagcagagttgaccccagctaatccccaatgttgtccagtcccccagacctggaggagagaaatggggtgcctggcagggtgtaggggctgccccagcggggtagacgtgggaggcgattgggcgcggccgggcgaggggcagagatgcgtggggagaggctcagaggagggatgcggaagcagcgagtggtgagggctgtgcgtgccaaagggcaggagacctgtgggacgtgggggaccctggagccggaactcgctccggagtagccccctgccctctggggcgagaaggggaccccttccctgcgtgaaattccccggcattgttctgaacccagagagagcctgtttggaattgggttggaaggagttttcaggaattcccaggactggaggagggaaggagatgcaggcccacatcgccaccagcattctcgttccccacccccatctcctttaaaaggagcagaagagaagactaaaagccgacccagtcttagagccggaaaaacgcgatctctggtttcccttccccgaacccttctgtgagagacactgggccattttgttacatatttttaaagcaaagccaattgtccctcgctccacaccccttccttatctctcctttgaggttctaatgctctctcctcacccactagcctttatctggttatcttgtaaattcttacatcaagaccctaggtctgtgatttcttctgtggtagccctgg

SEQ ID NO: 98693 - DNA, 1131 bp, Homo sapiens
aaatgtggcccattattcggaacttcagttctttctttttcttttagaaaattattcttaaaaagagaagctaaccatttcggagggattaaataggccctcaagtctggaagacataagttagaacttccaggacttttttttttttttccgagacagagtctctcactggctggaatgcagtggcgcgatctctgctcactgcaacctcgccctcccaggctcaagtgagtctcatgtctcggcttcccaagtagctgggattacaagcacgtgctaccacacctggctaatatttgtatttttagtagagatggggtttcaccatgttggccaggctggtctcaaactcctggcctcaagtgacccgcccgcctcggcctcccaaagtgctgggattacagcactgctcctttcctcaggacattttttacaaagatatgcattgtagggaagctgtatagggggtgcactggtgtgtatgcttgtgcacatgtgcgggtgtatgtgtgtataaatctaggcttttattctggcccatctccccctttgagatgtggttttcaataagcaggctcaaaacattctgctgaaaatttgaaactttgaaaatctttaaaaaaaaagagaccatgatattgtgcctggtaggcagggctctcctgggattacagatgtatcacccagtagaagcccgaatgaagcaaatgtaaattatcagacattccagtaaggtaaggcaaggtgcatgcctattccagaacttacagcagagtttgcctagtgtggttatcataaacatgtatgggattctaccagtgctcagcccaggcagcaacagaaaaaaaggggcctctctgagagcctattagccaagttagggaggtgctaaggggtgaaaggtgttggggtggagatcagagaaagacattaaagggagtagtttggaggagaaaccctggagatttgaaaggctttgctggtgtgggaacctgctaggagaggtcagctccaccctactttttgcacttctcagaataaaccgatgggggaaattacagttcggagcagccttttccagagtgcatcttccatctctgtgatgtccaataagatagccatacaaagtgg

SEQ ID NO: 98694 - DNA, 1078 bp, Homo sapiens
taatcctggaaagaaagagttaagctagatttcttaaatctcctttccattctgtgcttttcttacgatggagctccagaacacattgctattcttgtagctaccacaagggtcaaagaaccagccccacccactcaagtgggtggagtaagtaacattcatagtgttggagcagagtgcacagtaaatggctccctgggttggttaaacagtgaccaacccatgataaccacaggaaggttattactttgtcacaggccatttttaaaggtggaatgcctctgctgctagagtgggaaggtaatggtgatgagtgataggttgcctccacccatctcctggtgtcattgggagagggggtacaaactgaaaagtgaatcatggttaaaagtgcaagtgaagtgacaaggaagtgttggctggttttaccaaggggagggagcaaagcagttgaacatgatataaatttggctctcagtacctcttagatctcagaatattaacttagtaagcttgaaattaaactaaatcttagggacttagggatttaaactaaatccccaccacatctgatttccccttcctcgaaataccaatagtacgtgcaacacagacttgtagctcagaggtcgcatgctgtttcaaattcttgggatatgcatgttacttttttttaaagaagtggtatatcagacacctgaaggtcaagtctctctgtgccaccaagaaactctcgtgaccttgagcccctcctctcaattcctcttcggtaaaagaaatacctcacagtggctgtgcaatcaccaaataggaactacaggtggcattatttatcttttgcccttgtgtaagaaaatgtagtcttgcaggttgaaaatttcttccagctataggaaaatggttaaataaatatgtggaatattaggaaattattgttcagccaggcgtgggggctcattcctgtaatcccagcacttttggaggccaaggcaggagcatcgcttgaggtcaagagttcaagcccagcctgggcaacgtagtgagaccctgtctttgtatataaataaataagtaggcc

SEQ ID NO: 98695 - DNA, 1105 bp, Homo sapiens
ggatgagctttgattaaagattctcggccaggcatagtggctcatgcctataatcccagcactttgggaggacgaggcgggtggatcatccaaggtcagtagttcaagatcagcctgaccaacatggagaaaccccatctcaactaaaaatacaaaaaaaaattagccgggcatggtggcgcatgcctataatcccagctacttgggaggctcaggcaggagaatcacttgaacccaggaggcggaggttgtggtgagccgagatcgcgccattgcactctgtcccaggcataaaaagatactcatctcagttttgtgacttgtttggtgactaaatccacttcccctctgtctctactttcccatccaccaaatgaaagttaggaagaatgccaacttaggaagagcttggcaagtgcagtactttaaaaataatgaaattatcatggcctttggattaacgtatttggttttgttttgtttttattttctagttattaaagagggtgtacgggagtttcttggtaaatccagaatcaggtatgtagtcatgtgagcaactatggaatgacatgggaagagaggtgtcctttttatattatgctttttttacccaaaggatttcgtttaaatattattacaaatatttctgcatgagcccattcctaatttcaactccgtccataaaaatagcttttaaggggctttgctttgtccaatatggaacacagtagaggtacaaaattgatgtgtgacatttttaacatttacttgatggggccacatgactcttacttaatctttcagccagagggccacatttgtttgttcatggtgattaaaatggctttgaaaagaatgagcaaacattgattcccaccctcggcccttagtaattctgcatactacatatttggagaaagaagaggaatattcaccacactattcttgtgatttcaagtaataaaaatcagaccctttcttaatccagtcttctaataggttgtctcaacattcatggccagaggaattgaaaggcaccgtgtcatccttgaatagaacagctatgttatactgctttaaaaaggaggtttaaagtggaaaa

SEQ ID NO: 98696 - DNA, 1944 bp, Homo sapiens
cactgtgcccagaccaccctacctgccccccaccaccaatttttttttttttttaacagatgaggaaattaacaagtcaggcaattttttttgtttttgttttttttttttggagctggagtctcgctctgttgtgcagtggtgcaatatcagctcgctgtaacctccacctcctgggttcaagcaattctcctgcctcagcctcccaagtagctaggattacaggcgcccgccaccatgcctggctaatatttgtgattttagtagagacagggttttgccatgttggccagactgctctcaaaactcctgacctcaggtgatctgcccaccttggcctcccaaaatgctgggattacaggtgtgagccaccacacccagcagtttttttaaggtcacaaaatgacaagactaggatttggacccagttctgttcgactcaaaatagagtgccctacacttatgtgtcatgctgcatttggcaagtcacgtcacttctttgaatctccttttccctctgcaaaacagtaaccttatctagcctgcagacttcaaaggtggttatggagatcaaatgaagtaaaatgttttaaaaattgtacaatatataccaataaaagctattggggaggtatatgtatgaacaggtagttggtttttctaccctgccacctcataaagagtttgcagtggcacgtagaagggtttatcttattatcacaaagctacccatttgctggccatactgatacttggcacattaaactatcagagaaatatatgtggctcctttacaactgtgtctagaagggtacatttccaatcagagttcccaggttctgactttctcccattacatatttgtaattagtcatctttgatactgattcaaatttttgattaacattaattatatatatttacaagaatcttataaaaattaagattttatttcacctcattttgccctgtgagatagatggaaatagactatattctacccaggttaaaagtacagataatgagacaaaatgtcaatagaacctgaaaaaagatttttttagttgcctctagtctctgtttacttggtatagatagtatgctgcttttttttttttttttttttttaaatgtaactgctgggttgttttttgtttcttgttttttctttccctccaggatacaatgtctctttgctatatgaccttgaaaatcttccggcatccaaggattccattgtgcatcaagctggcatgttgaagcgaaattgttttgcctctgtctttgaaaaatacttccaattccaagaagagggcaaggaaggagagaacagggcagttatccattatagggatgatgagaccatgtgagtatagaatttggtcctgaagcctggatatggctgctacaccaccatggcacttactgaaagaaatatggcttggtcaaactttcagctgtattgcgtgaaaatgtttttctcataaaatgtcttaagccaggaagtagatgatagggcagaaatcagccactcctcctactctccagatactgagagctgacagatggtggaaagagaatccagtgctttcctttaaggcaccactgttctgagtcatgtttaagagtatagcctggataatcagcaggcagggtgaccataggtccatgttatatttacaagtcaataaaatctacttctgataatttccatctgctgcctctcttagggcattcattttgtgcactgactttgttgaccataaatatcatctcatttggcacacctttatattatgatttaagagatttatgactttagccttctgatgtacttgtagatcaagttattgacaaaaccccattctgattctgtacttatcctcatggattttgttcctctcaggtatgttgagtctaaaaaggacagagtcacagtagtct

SEQ ID NO: 98697 - DNA, 1042 bp, Homo sapiens
aggtcaagaccatcctggccaacatggtgaaaccccgtctctactaaaaaaatacaaaaaattagccgggtgtggtggcaggcacctgtaatcccagccacttgggaggctgaggcaggagaatctcttgaacctgggaggcagaggttgcagtgagccaagattgcaccattgcactccagcctgggcaaaaagagcgaaactccgactcaaaaaaaaagagagtcctgagagttagcagggcattttgtaattggatttttggtgtagttgcattcaggtcattgtgtaccagtctgctggccagttagttgctgcctctaggatggacatgagagttcattggtcaagtgacattcaggctggtttcttctgagatggctcagcattcaaaatctagtacaatggtaaaattttttgaaaacgttactaccttcattctgttccttggcagggtggtaaagatttttaaattctgaagcagaatctcttttgccaaatagagttgaaagacagctgtgcttaacagtaaagatactttgcatagccttctaagtggctaggaaaatcttcaaaagtgatattctcaactgctccatccctagtggcttttgtattttggctaattaatcagaaactagtttgggagtcactatacagaaaaattggaatattgacacttcagcatttgctagtgctgaacttgatgaaggaatatataaatatacatgtatctcttgggtcctaaaagtaagcctctagagaggcatttcatgtgtttttatgcagaattgacaggggaattaaatgcagtagctcagaaattgggctaaatccagagtaacaaaactaattttaaaagctctgaagtatatatttagatttggctggttttttaccaatcttattccattttattccaggaaacaacttatttttatactttaaacagatcttatcttggagagtgtaccggagatttgttccttaggagaattttgtgtattcttttttggcatatgatttaaatgcctccttcagg

SEQ ID NO: 98698 - DNA, 1042 bp, Homo sapiens
caaagtcccagagcccagagaaagtatggtagtttatcacctatgttagtgcaaaggaaaaggattatcactacttttcatcacattttgaagatctgacttattaagtactttgcagtctctcccgtttgaatctgaagtgtagtggtagcagctagcacttgtcatatttcaggtttggtgtagtttatttttaacctcctgctggtctggagggctacaaaggtcacaccacatagaacaaaccctatagcttgagttgccactcatcttacacccacttctcttctggttgcttttgctttgtcttggcaggagttcaaagaaggacgcagagccagccacacagccccacaggtcctctttagccacagggaacctcctctggagctgaaagacacagacgccgctgtgggtgacaacattggctacattacctttggtgagcagggtgcacttgctgcttttgtgccgctttaatgagttcacacagcagaatacctaaatctgcacagaaccttggttaacattttaaggtaggcaaacgcaggcataccaacttgttcctgttgccattgcagtgactaaaggagggatgtcacagggtattaattacagagcaggccatatgctatttttgtacagtaatcctttcctttttttccccatttttcttaaatcttaaaaataagactgaattctgatatcaagagttaaggtcccttcaatagttcagctggtagagcagaggactatagctacttcctcagtaggagacgtccttaggttgctggttcgattccagcttgaaggagacaagtacagttttggctgggcacggtggttcatggctgtaatcacagcactttgggaggttaaggcaggtggatcacgaggtcaggagatcaagatcatcctggccaatgtggtgaaactctgtctctactaaaatacaaaaaaaaattagctgggcatggtggcgcacgtctgtagtcccaggtactccagaggctgaggcaggagaattgcttgaacccgggag

SEQ ID NO: 98699 - DNA, 1003 bp, Homo sapiens
acatggtgaaaccacacctctactaaaaatacaaaaattagttggacatggtgacatgtgcctatagtctatagtcccagctactcgggcaagcgaggcatggcaattgcttaaacccagaaagtggaggttgcagcaagccgagatcatcctgctgcgctccagcctgggagactgtctcaaaaaaaaagataactaggcatggtggtgcatgactgtagtcatagctacttgagaggctgaggtgagaggatcacttgaacccaggaggtagaggctgcagtgagctgtgatggcaccactacactccagcctgggtggcagagtgagaccctatctcaccaaaaaaaggagttaagaagagaaccacctaagcagctagatgggggttctctgtcatttggcaattcttggttttttgcttattaagcccaagctccagccgtgatccacttactccactttttcgcggaataaattcaggtcttccttcagttgctccagcctcatgcactggctgattatgatagcttacagtttggaattaataagcttgttcacactgcacccaatgccactggaatgtctcctttgtgaaatgtaatttaattcacctcagtggtaaaggtgaacctgtttattggtgatgaatctgttgatttaccaaatttcattaaatctaaactatacacttttttcttttttctttctctctgtcacccaggctggagtgcagtggtgtgatctcggctcactgcaacctctgcttcccaggctcaaacaattctcgtgcctcagcttcccaggtagctgggaccacaggcgtgtgccaccacacccggctaatttttgtattttcagtagaaacagggtttccagctgggcacggtggctcacgcctgtaatcccagcactttgggaggccgaggcaagtggatcacgatgtcaggagatcgagaccatcctggctaacacagtgaaaccccatctctacaaaaaatac

SEQ ID NO: 98700 - DNA, 1047 bp, Homo sapiens
tctgggaaggtttactctatttcagcaccaaggacctaagacaggcagctgcatttcctaatcctgattccttaaagtaaactgttacagccagttagtgtgatcctggagtgtgtccagctgcagaggcaagagctagtacctgtgtggcagaccggaaatagatttcaaaatgcacagctgcagaattcaggagtagaatgaaggcctagggtcaagccctgtttttcatcgtgggctcctccattcacgctcgttgacacctttcctggccatgctgtttaacttccatgtcaagaaaaaaccctgacaaagcctggtaatactgacacaagtggagtgtacttaagcagagagggagtgatgttcactaggctgttgttcttccccaccctttggcatttgtgtcgtgtcctgacgccttgtttgtgtcttccgccttcagtgctgttccctcgtcacaccaatgccagtgctcgagacaacaccatcaacctgatccacacgttccgggactacctgcactaccacatcaagtgctctaaggtgaggggggtgccagcatctcagcctctatgctctgggtcttttcctccaccagaactcctgacagaaagtcattccattagtctacgctgtggatattgactcttaggtaaataattctagaggcttcaagaaaccatggtctttcttcatcaagccactgtcccccatccctccctatagcagagatgaatatttgtttccagaattgctcaccttcctgcttccctgcagggcctgggtcaatcccagggtgtatgttcccaaccgcccttgatgacctctctgatgaaagacagcaaagctgtctttctagaccatgactgtgctttagtacctgttatgtttgttcccaggcctatattcacacacgtatgcgggcgaaaacgtctgacttcctcaaggtgctgaaccgcgcacgcccagatgccgagaaaaaagaaatgaaaacaatcacgtaagttaggcagcaccccagcgaccaccttcctctcctgagtc

SEQ ID NO: 98701 - DNA, 1039 bp, Homo sapiens
attgctctgaaccagccacctgccttcatggtgagagataaaggaactgctatctgggagccctgagaggtatacactgtgtaggaggagctgacaaatgaggtagtactaagaagacggtttgagcctagtcggaaattcaggtacgtctaggccatccagaaattgtgaacaagtgattcttctatctaacttggtacgttgaatgtccttgtgggcttaacactgatattcccgggcatccaaagtatccaataggaaggaagagctcgtgaaaccattctgtgaaagccagattttagccgatgtcctgtggttccagtgcctctgcttaaggaatctagccctttccacctctcatttggtgtttctttgggatcccatctagtctaggagtgtggggtgggaggaaagggcagccagaaactgaccttcgcacttatctctccttttgaagggggaagacgttttcatcccgctaatcttgggaataagaggaggaagcggctggcaactgaaggctggaacacttgctactggataatcgtagcttttaatgttgcgcctcttcaggttcttaagggattctccgttttggttccattttgtacacgtttggaaaataatctgcagaaacgagctgtgcttgcaaagacttcatagttcccaagaattaaaaaaaaaaaaaaaagaattccacttgatcaacttaattccttttctttatcttccctccctcacttcccttttctcccaccctcttttccaagctgtttcgctttgcaatatattactggtaatgagttgcaggataatgcagtcataacttgttttctcctaagtatttgagttcaaaactcctgtatctaaagaaatacggttggggtcattaataaagaaaatctttctatcttacatgagaatttgctgggtttctggactgcgagtccaaagtgagaagagaaggaaggaagaaggatagacctatactacccttgaacctgcaaacctaagctgggaagccctagtttcaggagcc

SEQ ID NO: 98702 - DNA, 1018 bp, Homo sapiens
caccaggtaccctatttttttcctctgttttctgcccacttttctttgaaggccataaagactctgtgacttgtgctggtttcagccatgactccactctagtggccacaggggacatgagtggcctcttgaaagtgtggcaggtggacactaaggaggaggtctggtcctttgaagcgggagacctggaggtaagatcatcagagcgggagtcagctctgtggggccttgggttgttgggggtgcaagcttgggaggccagttctgcctttattgcgccaagccagctctgagccaatgcgccccaaggcacaggaagaatatctacctgctacctggaaagtccccgcggaaccccagaggcaggaaaccttgggtggagctcatggggcaggcttctaggtgggatggggtgacgggcctccctgctgccccttcctccctgtccagtggatggagtggcatcctcgggcacctgtcctgttggcgggcacagctgacggcaacacctggatgtggaaagtcccgaatggtgactgcaagaccttccagggtcccaactgcccagccacctgtggccgagtcctccctgatggtgagagcacctcccttgagtgacctttcctgggtgcagaggccgaatcccgggatatacacctcccagagcagccttctgggtcacagccggcaaaatctgaggcctgctgtttgcagtgctgacctcctgggccccaaagttcacagcgcctccttcctgctctgaactcacctgtgattcctggggcagtgtctgggcccttccactcttctttcctctccctctccccattcccttgcttagtgtatgtgagcgtgccctctgccctctcttcatctgtgcctctcttcagggaagagagctgtggtaggctatgaagatgggaccatcaggatttgggacctgaagcagggaagccctatccatgtactgaaaggtatcagaggtgggggaagtgttagcctgggcctttgtagggag

SEQ ID NO: 98703 - DNA, 1564 bp, Homo sapiens
tcccccgctccttccgtcctgcctacagaccagaaactacatctcccagaagcccgcagagcggacccaggagaactactcttcccaggagaccccggaggcgcgcgcgctcgcttgtttccctccagttgggggcggagtcaggtggggcggagtttgggttctctccgccacgccccggccccatcttccaatgccgctctgtgattggtgaggcggccagccaaccttcgtagctattggccgaacggccgtcgctcttcctgctggggagtcgcctacgcctacttcctgccgggaggaggggctcgagttccgcgtcgtcgcgcagagctgactctgggaggcgtttgggcccagagaagtggatccgccgcttgcgccgcatggagtccgaatcggaaagcggggctgctgctgacacccccccactggagaccctaagcttccatggtgatgaagagattatcgaggtggtagaacttgatcccggtccgccggacccaggtgagaactgccgctcctcaggccatgggacaggagacgctcacccctggcctctgactcctgcttttccccgctcccctccacacccgactggtcattcctaccgatatccctcttcccctcctcccccactcccaccctcacacttagttctcaggcctggctggggtgggggttccctgacgcctcctctggcccttcccctcacacacccccttcccatcatccccttggccctcccttaccgcacggtctctggccagccgtggcctcccgtcctgtgtcccgcgcgcccccgcggaccccggtgtgtctgactccaccttcccttctcgccacatgacccgccccagcctcaggcctcctcatgcttctctccgtacctcttaccgcctcccgagccccatcttctaaccctctccccaaagcagatgacctggcccaggagatggaagatgtggactttgaggaagaagaggaggaagagggcaacgaagagggctgggttctagaaccccaggaaggggtggtcggcagcatggagggccccgacgatagcgaggtcacctttgcattgcactcaggtaggtctttgaggcgatccacctcaaatcagtttaggtgggcgtgtaagcattaaacatcagccatggacagaacgttatgggggacacagagatgggcaagatgctggccttgcgctggaggagcccacaggtgggaaagtgtggcagaatggatgattgcttggcttctggcatcagtcgagacaccctctactttgccagttaaccttgattaacctcttagttttcttttaaaaagttatctttggccgggcgtggtggctcactcctgaaatcccagcactttaggaggctgaggcaggtggatcacttgaggtcaggagttcgagaccagcctggccaacatggcaaaacccagtctctactaaaaatacaaaaatttggctgggcatggtggctcacgcctgtaatcccagcactttaggaggcccaggcaggcggatcacaaggtcgggagttccagaccagcc

SEQ ID NO: 98704 - DNA, 1050 bp, Homo sapiens
tcatcctctgtgctggctgctggagggacccacacaaatcagatcctgtcacttccctgcttaaaaccccgtaactccatcacttcctggccaagtccaaacatggcacaaaaggcccagtgtggctgggtctctgcctgcctctttcctcctcccgcctagagcctgatcctcagcacgagccctgcattcctgcaacagcacctgtgcaggattttccaggcagccctgacgctttccctctctgagacttggccaaggtaccctcccagttttcccctcttaagctaagtaaccactgcttgggaggcactttggtatgggggaaagagcatggagtcacagactaggtgagaatcctagctcagtctcagttccttcctctgtgaaatggggatgtaatacttatctcaaacactaaaacattacatggcaaagtactggcacacctcacatgcagaaaaaaatgttgatttcttcctcctttctctttaatattggtcaataatatgtattaaggtcagagtcagagcccaatcacaatgttcataacgccttctgagtactactatacaactagtacaagctcacatgatctcaacgaactacttacttaaacttgggtctcactccaagctcccaaaagggaggatgaggccagggacccaagtctgaatcagatcaactcagcttactccacagtaaacccactgtcttctcaattccacatactttcccacctccactgccccacccctctgagattccaatcgaacccaacaattctgttcccacaactttggattcagctcgccacctgaaacttggagaagtttctaagtcctgccctcccctacaagccacgccccgttggtgggcaaaggggtggttaaaactcaccaggccagtcccacagctttcatggggttcttgcccctctttctgggaatgtattccagctccggggataggggttcaggttcctccttgccctctggggagctgtggctttgcagggcccgggtcctgttatgagaagccttgttagct

SEQ ID NO: 98705 - DNA, 1245 bp, Homo sapiens
aaggtagaagtgacttcaaggtcacgaggttcccctcccacctctgtcacaggcttcttgactacgtagttggagctatttcttcccccagcaaagccagagagctttgtccccggcctcctggacacataggccattatcctgtattcctttggcttggcatcttttagctcaggaaggtagaagagatctgtgcccatgggtctccttgcttcaatcccttcttgtttcagtgacatatgtattgtttatctgggttagggatgggggacagataacagaacgagcaaagtaacctatacaggccagcatggaacagcatctcccctgggcttgctcctggcttgtgacgctataagacagagcaggccacatgtggccatctgctccccattcttgaaagctgctggggcctccttgcaggcttctggatctctggtcagagtgaactcttgcttcctgtattcaggcagctcagagcagaaagtaaggggcagagtcatacgtgtggccaggaagtagccagggtgaagagagactcggtgcgggcagggagaatgcctgggggtccctcacctggctagggagataccgaagcctactgtggtactgaagacttctgggttctttccttctgctaacccagggagggtcctaagaggaaggtgacttctctctgtttgtcttaagttgcactgggggatttctgacttgaggcccatctctccagccagccactgccttctttgtaatattaagtgccttgagctggaatggggaagggggacaagggtcagtctgtcgggtgggggcagaaatcaaatcagcccaaggatatagttaggattaattacttaatagagaaatcctaactatatcacacaaagggatacaactataaatgtaataaagtttatgtctagaagttaaaaccctgtatggctccaggagtatgtgtggctctgcccaaagtatccacttcttccttctgcattctggcttgggctgtcccaccttttccaaggtaatcaaatacactttactgcagcagtttccggggacggatgcaatagactagtgaaggctcaggagttgggtggggaaagggagagctcaaccctatcacactggatcactggatatggaagagacctcttggctgtagtgcttgaccttttctgcaccatggaccctttccaaaagctcatgagagctaactctcttcctcaaagagctgtatgtata

SEQ ID NO: 98706 - DNA, 1068 bp, Homo sapiens
agtgcttttttttttttttcttttgagatggagtctcactctgttgcccaggctggagtacggtggcgcgatctcagctcaccacaacctctgcctcccaggttcaagtgattctcctgcctcggcctcctgagtaactgggactacaggtacatgccaccatgcctggctaatttttgcatttttagtagagcaggttttcactatgttggccaggctggtctcgaactcctgacctcatgatctgcccacttcagtcttctaaagtgctgggattacaggcgtgagttaccgcaccctgccagctttgtatttctgacctgacattcttgccctggttctatcccagcccctctagggagatgaagaacagctttcctcaaaataacccacttagagacctggacttttattcaattccccctcctcaaccctccctgccaccttcccctctctgaattatcccagttgtcataaaagagaagagataagacagtcctttatttgatccccgaactatgcaatgtgccctaaaaagagacgctggtctctcttgcttccagcagagcctctgagagcctctggtgtctgctgacctgcatctgggggtgtcctccttggggatcctaaagccccctgtagatgctctagaagaggtggtggccctgtcgagcccagactgccagggcttgtccttactggggatgcaggggccctctaggggcttccttagctcctcctaagcctgcatctctgctacctcagaggggaccaccaggcccagaggacagtaactggcagaggaggcataagagcaccgcataacatgaaggacctggacccaggatctggaaggcctccgtcctggttatgccactgacctgcgagttctggggttctggggaatcacttccctgttcagggcctgcattctctcatctgaagtgagcatttggggcttatggccctgaggtcccttccaactccagtttggggttccctccccctggtttcttggccctcccctggctatggggctcttcctgctgcagggaaggcattcccttg

SEQ ID NO: 98707 - DNA, 2361 bp, Homo sapiens
aggatggtctcgatctcctgacctcgtgatccgcccgccttggcctcccaaagtgctgggattacaggcgtgagccgccatgcctggccccttccctagttcttttttggggttagttatcagtctcctttgtctgtctctttcccctcctaatcttgaagttcaatgaaaagacaggagatgaaacaaagaaggaagtgaacagggactgtgctcagaagtattatagcatcagcctgctaatggcttcctcttcccttatctgtactcccaggccatcctgacttgggtggggtaacccgagattaccattctgatcacaggattctgctccagacaagggtggcggagctgcggtgcctgggtcctctcgtgatccccaggacagcctctccctcctgggagcttggagccacccctcggtctccatgggtccagagagaggccaccctggctagagagggggctgggaggggtggcctcgagttgggggccagaagtcgagggctggctgtctttttttttgagatggggtttcactcttgttgcccaggctggagtgcaatggcatgttcttggctcactgcaacctctgcctctcgggttcgagcgatccccctgcctcagcctcccgagtagctgggacttcaggtgtgggatatcacgcccagctaattttttgtattttttagtagacatggggtttgaccatgttggccacgatggtcttgatctcctgacctcgtgatccacctgcctcggcctcccaaagtgctgggattacaggcatgagccactgcacccggcccggtcttaactgtttctgagctgagaggtcactagagaactgagagaatggtagcttgttctggcccctccttgggagagggtgtgtgctggtgtctatcactcagagagtgggcggggctgggaagggaagttccaaacccatgacgaagaagagggctgttctggggtggagcaggaactttcttggctctggggtttccttgtctgtcaaatgaccaggtgagatccaaagtctaagccagctctgatattttagtgtttagatccctgtggcttcatcctcttagtcccaaagtccaggctgatggaaggatatttagttgattctgggcccccttggtgcagaatcaggcctggtgacttgcccagacactcctgggtgtatctttttactcatttgctctcgtggctatgaggtcagctgtgccctggggtaggaggataaagtgttttcttgtgggggcagataaaggaaaagggaggggaacaaatcgtcagatctgggctgtgctcctgcgcctgctgggtggggtttcctgagatgtgcattctgagctatttttttccactctgggcatccgtctctggcagggaggagggcaggctgcctggaccagtcagctgctcctttccatccctccctccagtacacatactctcctcttgctgtaaccccagtagctcaggcctcctctgcagattccggagccttaacccttcaaatacccccaggagagccccagccggggcctcagtaggcagacagcaggattaccacactgagagggctccaggggaggaggtgcttccgcctctgcatctgaaaaccttgacacccagcaagtcctgctgtctgagctcacccacttgtgccgctgctgtggtagaaagcaggggctctggttccttcctaatgggggactggggccctgagagaggagcaaacttagatctataatgggcaaggatagggcacagtctgaatgccttgataacaggcattgtgaggcaaggaagaatgttctaatcgagctgtctgcagacaaggggcttgctccatgttgctggagttccttcaagcagaaggtgggccagacacagtggctcatgcctgtaatcccagcactttgggaggcctcggtgggtggatcacttgaggccaggagtttgccagcctggccaacatggtgaaaccccgtttctaccaaaacaaaaagaaaaacaaaaacaagcagaaggtgaatgcctactgtattttgggaaaattcaggcttccagtggggaccttaaagtccctgcagactgtgagcccctctagtagctgctggcagaacccagatctgatttctagtcctcactctgtgtcagtctcgtgatctctctccccttctccctccttcccttaccctccattcttctctagcctccacccttagacatagctacgaaagtaaacactgaccctttccccctttgctgctacctaggcagatgccagccccaaacctcatccctagtggaggccttgctgatgtggaagtggccagggcc

SEQ ID NO: 98708 - DNA, 1051 bp, Homo sapiens
gccgagatggcaccactgcacatctgagtgatgtgcagtgagactctgtctcaaaaaaaaaaaaaaaaaatctaaaatgcttccagtcataatctttggttgattgactcatggggtaccatttgtttattatttttttgtgcttttaaaatattttctgatcttctataatgaaaacatattagtattttaatttttaaaattattattttattaaaacaaagaaagtagtcctctctgctgtctctacctttcacttcacgtccattctcaggccactcaactgggcccctgcctgtactgctccatcctaatttggcgctgtccccttgaaggtcaaacccatttgtcattgttcagcccttatcactgaacctctgggtggcagctatgacaatggagcatgcctttttcctctgccttccctgccacagtctctctggctctcctctcccctctctgacaagctccccttctgctagctctaaattcaccacttacaggctaccacctgtatactcattacttcaaaggagaaatgtccacaagagcctcccttggatgccccacggtaggggtccccaaccgcttccctccaaccctatactggtccttggtctgttaggagccaggccacacagcaggacaggcaaagctttacctgtatttacagctgctccacattgcttgcattaccctctgagctccacctcctgtcagatcagcagcagcattagattctcataggagctcgcaccctattgtgaactgcgcatgtgagggatgtaggttacatgctccttatgagaatctaatgcctgatgatctgtcactgtctcccatcaatcccagatgggaccatccagctgctggaaaacaagctcagggttcccattgattgtaccttatggtgagttgtatgattattttattatatattacaatgtaataataatagaaatctagtgcacaataaatgtaatgcgcttgaatcatcccgaacccccctaaccccattgcctcccccagtccctggaaaaactgccttcca

SEQ ID NO: 98709 - DNA, 1047 bp, Homo sapiens
gctatttgaaaatatgcaggccagtgcctgtggctcatgcctggagtcccaactaccgaggaggctgaagcgggaggattgcttgaaccctggagtttgaggctgcagtgagctatgattgtgccactgcactccagcctgagtgacagagtgagaccctgtctctatttttaaaaaaaagtatgaataagacccagagttggcacaaaaggggacatgcttaagcccatgaaggatcctgctgggagggttcaagaagagctttcttggagagatcacacccaatttgagtctttggggaacaaagaataaatggcactccacgcagaaggcacagtatgtgcaaaggcatgggggtgtgaaacaatatgatagcttgagacaatacctaagtagttaagtattctagggtataaagtacaggagaggggtaataataaggcatcagcctggatgggatagaaaattcttatggcagaggaagtgaaactaaagcccacttgcagcagacattagaagtcttccagaacagtctaagggtggggttatggctccctgggcctgcatgactcccctaaaacactcaccctcactccttttcccagtcccgccttgactccatatgtttcatcaaacatatcttggatttattatctataatcttgttaattgtctggcttgagatttagaatttggtcatctctgtgttctctacaagctcatgcttgagcatgcatttcctgtttcagattacaggactgcattttaatttcttgatagaatgcctgatatagccttacctggcacagccttacctgcagaaagttgtgtgcacaatgacttttgatgatgcctccatgatccttcactttgcatgtacagacacagacacggagatgcaaactcctgcatcctacaagggtcatctgcaaattggcttatcagttttctcactcctctgtctcctctgcggtaccagccctttatatgccaggcactgagaagcaacctaattacaggcgaggagacagggagggagcaggccat

SEQ ID NO: 98710 - DNA, 1047 bp, Homo sapiens
gaggagctagaaaagtaattcggcgaatgaataaatccatgaatggcagctgaccccgatgatctctcaggtttctgccagttgagaaagtgtagcagtgccctggacggggaggcgggcggggcgaactgcgagctcctgccccttcccagggctcaggcgactgtggaccccgatcagcgcaggctcgcggcccgctgtggccccgcctcctggccgccagccgggcggagccaggccgccccccaagccgggtggccttcggggtgcttgcccggctggaggtggtgagggggcgggtccaaaggagaggtcaatgggcggggcggggccacaacgcccccacgtccagagccggcaggcaggttccccgcggggggccggggccgggccgttgcctagcaacgccgagccccgcccggccggcgcgtgcctgcccccagcatggcttggcagggctggcccgcggcgtggcagtgggtcgccggctgctggctcctcctcgtccttgtcctcgtcctacttgtgagcccccgcggctgccgagcgcggcggggcctccgcggtctgctcatggcgcacagccagcggctgctcttccgaatcgggttagtgcccgggctccgaagcgtgcgggctcgggaggcgggcgcgctgggagaggggactgggaggcgggggctggagctgggggtgggcgtggcggttaggaaggggcttggtctaagggaagagggatcgaggagacggactggagaagccactgagttggggggcctgagggatttggggggctggacaattgggataagctggggaaggaggatcggagaggcgggccagggtggccacggaaggagggcgtgagaggacatctggagcaaagtgccacagaatgggctggagaccaggaagctggacagggggatagtgcaggagccagggctgggaagaccgtccctgtccgggggtgaggtcagcagatgcccgggctccgatggcaagtgccggagagaaggaatgcctcccaccgtctgacatttaaaa

SEQ ID NO: 98711 - DNA, 1050 bp, Homo sapiens
aaatatacaggattgttttgcatgctttttatttttatttttatttatttatttttttattttagagggagtcttgctctgtcacccaggctggagcgcagtggcacaatcttggctcactgcaacctctgcctgccaggttcaagcagttctgcctcagtctcccaagtagctggaattacaggcttgcaccatcatgcccggctaatttttgtatttttagtagagacggggtttcaccatattggtcagactggtctccaactcctgacctcaggtgatccatccacctcggcctcccaaagcactgggattacaggcgtgagccaccgcgcccagccatgcttttgtatttttaatgaatatagtcatattgttttctctgtggtatgtctcagcataacaatacgtgcttgagctttgtgaatgttgaaacctgttgctctagatcatgtgtttcccttgctgtgcagttttccaaggtctgagtatgttgggatttatttgtacattttgctggtggcagtcatttagggggtttccgccctttcactcttgggagcacgggattatcactgggcggtacaggaggggaggaggcagtccctgctgtggtctcagtttccagaaggcctgactggaagttggacatttgctaataagcagtgaggagccactgaagacttttgagcaggagcaagtctcagcaaaatgcggcgctttaggaacttctttttgccagtgctttgcagtttgggttggaggtagagagctgggggacagaggctcttgtaaggccctaggtgagtttccagggcctgttctcacaggtgaggctgcgctgggggcagtggaaggcaaaattgagagggatcctgttttggttgcatatgccagggagagggctaaatgcaactgcgaggacagggggcctttcccagaaagagaagaagcaggatggggagctgaccatggggactgtcactcaccaattctgcaggcagatggagggagagcctaagctaagtggcttagagagtcctgtggaag

SEQ ID NO: 98712 - DNA, 1181 bp, Homo sapiens
accacacccgactaagttttgtatttttagtagagacagggtttcgccatgttagtcaggctggtctcgaactcctgacctcaggtgatccgcccacctcggcctcccaaagttctgggattacaggtgtgagccactgcgcctggcctctccaattttcttctgtgagttcctcagttcatgtctccctgatagattttgagttctaggtgtgtccgtctcattctccatcttgtcctgagtgctaagcagggcaaacagtaggcacataataagtgagagtggaattgcattggctcacagggtcaccaaaggaatggagatgtggggcctgcaggcatcacgaaggagtctaggggagctagggagaaaaggctaatcataggccacccactcgccctctaggtacagcctgtacacccgcacctggctcgggtacctcttctaccgacagcagctgcgcagggctcggaatcgctaccctaaaggccactcgaaaacccagccccgcctcttcaatggtgagctctgactgccccggccagcatcccccattctgtgcccccaccctccccgcctgctccccttcacataccccagcccctgggctccctgcctgttaccccgcccacagcccatctctgtccccaggagtgaaggtgcttcccatccctgtcctctcggacaactacagctacctcatcatcgacacccaggcccagctggctgtggctgtggacccttcagaccctcgggctgtgcaggtgaggggagggcagggagcagggggtgcctggagtcaccttggggactggcagtttcgccttgctagagagggctgacccttgtccgtctgcccgtgggatgtgtcccatatgctccatgttcacacgtgcacatgcgcacacatagcctggggaaggggggtacagggcatggctgggcagaaggggagagcaggagtgggggatgcagagccagagggctgggggtgttggcccaggactctgggtctagtgagtttccaggctggctttcactcccattggcccccttcagaccccctttctttctgtcacctctgtctgtcagtatctgggtctctctgtctttccctcccattccttatctctctgtgtctgcctctctctatgtacaagtgtccctctgcctccatgtgc

SEQ ID NO: 98713 - DNA, 1085 bp, Homo sapiens
agaatgggagaatgtctgtagctgagtaaagccctgcagggaattagtttcccctgggtggagactggttctctgatacagtgactggcaggactaggttatgaaaagttaagaacagctaggtgagtgggtgggtgaggatcacaagtcccaggctgcatgaaatcccaaagggcagcctaggcgaagaagtgttccgtgggaaagagcagccctgcgtctaccaagcctggggcctgcagcccgaagattccacagcccctcccttcaggtgtcactgtgtgcaacggaggcctcggatgggcttggtcagggggtgaccagttgggcccagttcccagtgaggagggaatagatgcctggggtgggtctggaaagtgcacagtcagggctgacggccagccagagcattacaagctggttcccacctgtctgggtgtgccttatgccatattgtgttatcctggcaccttgtgacataccctccaacccccacccagggcggacctttgagggcaatgcagagaccatgctgagctcactggacactgtgctggggctaggggatgacacccttctgtggcctggtgagacacccccttactactccccatcctccagccccacgctcagcctgggacaagggccttcccaccccctcactcccctagaaagcaggccagcccagttcctggcccagaagcgacacagctccacctctaggggtagggacagagttctggcctcccttcttcctggagtgctggctccgtaccacctctgcttctcacactaccttcccctgccagtcagccttcagcctcttgggagccttgcaggccccagggcattccagagagatgtctaattgttcatagccttagcccagaacagaaaatagcctttgcttatctggggagaagtcagtaaatccactctgcatgtaaccattgccttgtggtgcataaaaacattcacagatatctgttaatcctcagaacatatattcattcattcattcattcatcaagtactttatgtgcacctaacacataccaggctctgttccaggcaccaggaacaca

SEQ ID NO: 98714 - DNA, 1367 bp, Homo sapiens
ggcccttgttcttaggcccgtctgcccgccttcctccatctaacctttcctgttttatccgcagcccttttcttctttgagttagtaaagatttattctgtaacctgacactcatctggccctttgcagtttgccagccatattcccatgtgatttcccactggatccaggcccccatccggctggcaggagggggctctgacgtgcaggttggaaatcagaagtctgtgagagcgcgggagtgcatggcagctctgggtcccagacctggcccgacccctctgcttcacctccagctctgctgctcctctactcttgggtcgagatccctttggagccacagcgaggaaccctgtggtcctcaggcaggtgtaccttgagtcagccaggagccctcttttcctgtgtcaaagcctgccctcgggctctgctcacctctggtgaccctccaagatgcccctgccctcagtttcccctcatgatctggcctctgcccccttctctagccacagcctctagtacactttagcaataccaccagactagttagagttccccactcaccaagcaagacatgcagtttcatgcctctgtgccttcgctcatgctgtttcttccgactggaatgccttcccctgctcctcctgccttgtctgcctggcaagttcatctctcacgatcccctcaaaggccccctcctccaggaaggcaacccctgtgcccctcccctccaggctacctctgcactttgtcaatgcttctcttgtggcacttatcacactgtattttacttgtttacatgtttgtctccccttctagactgtgaatccttaagggcatggactgtatcttatgcatctctgtatttctgcgcctagcacggtgcctagcacacagtaggcgctcaataaatgttgaatgaatgaatgatttaatcaagacttgatcacccaacagcttgtctttgttgctacatgagtgaaaacagcagagaactttctcacagttttcccatctcagttccaggcctgctaacttgcagttaggcacttcaagagttttgatcagaaatgatgcccaaaggctgggcgcagtggctcacacctataatcccagctctttaggaggctgaggcgggtggatcacaaggtcaggagttcgagaccagtctggccaacatagtgaaacctcatctgtactacaaatacaaaaaattagccagacatagtggcaggagcctataatcccagctactcaggaggctgaggcaggagaatcacgtgaacccaggaggcggaggttgcagtgagccgagatcgcaccactgcactccagcctgggcgacagaatgagactctgtctcaaaa

SEQ ID NO: 98715 - DNA, 2066 bp, Homo sapiens
gagggatctcccgccaacacacagctacgttccccacaaacttcgcgtcacgcgtggaggcgccgaccccctcggaggcacagagaggacggccggcacttccaagagtcgcttggcgcccgcggggagagtcgtgcgcctagtgggcacgcaccaccccgcaaagcctcgccgccccgacgaggctgcgtcccccagcgtggctgggccggggtgggggggtctgtcttctccttttccccgtgtggacctcaggatctggacgctgcccccaggtctgcccaccctcgcctgggtctggctgccccggaactgagggcaaggtggaaaggctagttgcagggggccggaggggggtggggtgggaggggtatctgtcaatcaggctgctgggctccaggtcggaggtctgggcggggcagggcaaacagatggccactggacactggccccaggccgcgggactgcacccctgcctctgggcccagccgcagtgaggacttcgtacccacgggggtggagaggatggagggagggcaggggtggactgccctgggtcccaggccctggctgtcctgagcaggggtgctcaggtaaggtggggtcaggaggcaccgcaatggggctgatcagcagcagtcatggaggctgtgagaggcagggagagagcaccccaggacctccttctccaggccacgcactccctatgtgggcgccttaatacctgctagacctatttgtctgggagctgcaggagccttgcagttgattgtggagccctgacaggggcgtttcagagaaagtcaggagctgccttcgtgtgtctggatgaaggggccacggcaagatcctcctggctcaggggttcacacctgggcacacatgcaggattctgcaggccagtgtgcaccgagcctccaacttgtgcctccctacttcaggtgaccagaagtcagcagcttcccagaagccccgaagccggggcatcctccactcactcttctgctgtgtctgccgggatgatggggaggccctgcctgctcacagcggggcgcccctgcttgtggaggagaatggcgccatccctaaggtgcgtgggggccaggtggggccacgggggcacctggactcagtcttcagggctttaggggaaggggctcctgactgagcttttcaggatggacttgcagacctgaaaggtgcagagtaggagggtggcagcctcccctgccaggccctgcccactgtggggaaactgaattctccctcataagtggaagctttttcctaccttggtttttagagaggtctcaaagagccaagaggcctacccaagccctagagctggcaggggcaaagctgggaagggggaagtatctgttcctggggcctggggttcctctggagacggctagggggagaagcctgcgtgggaggaaggaccaggcccggagagaggcaccccagccagccccgccctccctacagcagaccccagtccaatacctgctccctgaggccaaggcccaggactcagacaagatctgcgtggtcatcgacctggacgagaccctggtgcacagctccttcaaggtgggccctgctcaacagccctcagcccgggtctcggggggcatcccccaccctggcctgggagggaggtgtgtgctggaccccatgccctggggctcctcctccaactccagcagctcttttccccccacagccagtgaacaacgcggacttcatcatccctgtggagattgatggggtggtccaccaggtgagggccaggaagaggcagtggtgggcttggcatctgcctccagaccctaggctcttcccaccaatccggagcgcctcggatgggaattggatacatgtggaatgtcagaggcccagagagggtgtgagacttgtcccaaagtcacacagaacctcaagggcttgtgctgactccaagcctgcagagtgggctcctcctctaggctcccccgtgctgtgctccctcgccccaccctgcccgggacccagttcaagtaattcaggataggttgtgtgctgtc

SEQ ID NO: 98716 - DNA, 1581 bp, Homo sapiens
gaattgccagttgtgacctactgatggcccacagaattaatttagtgggttctgattgggaattttaacaaaatgaaatagaatagaaaatatccggtcgggtgcagtggctcatgcctgtaatcccagcactttgggaagctgaggtgggcaggtagctgagcccagtagttcaagaccagcctcggcaacatagtgaaaccttatgtctacaaaaaatacaaaaactagccaggcgtggtggcgcatgcctggagtcccggctatgcagaaggctgaggtaggagtatcacttgagccctggaggcagaggctgtggtgagccaagattgtgccactgcactctagcctgggcaacagagcaagaccctgcctcaaaaaaaaaaaaaagtatccgagtgcttcgcacagataaggttaggaattgtgaagcttttgcattgttacgttataaatgtgttttcctggggattgctgtcaaaaaagtttgaacactgtgggtgaggggttttcagaaactgcatgatctgagtagtggctacatagggctggcctggaaattctgcacccaggaccacctgcccccctcatcttcctacacccacttccccaggtaccggtggcctcgtggtttgacaacatgagtgacacagagctccacgacctcctccccttcttcgagcaactcagccgtgtggacgacgtgtactcagtgctcaggcagccacggccagggagctagtgagggtgatggggccaggacctgcccctgaccaatgatacccacacctcctcccaggaagactgcccaggcctttgttaggaaaacccatgggccgccgccacactcagtgccatggggaagcgggcgtctcccccaccagccccaccaggcggtgtaggggcagcaggctgcactgaggaccgtgagctccaggccccgtgtcagtgccttcaaacctcctcccctattctcaggggacctggggggccctgcctgctgctccctttttctgtctctgtccatgctgccatgtttctctgctgccaaattgggccccttggccccttccggttctgcttcctgggggcagggttcctgccttggacccccagtctgggaacggtggacatcaagtgccttgcatagagccccctcttccccgcccagctttcccaggggcacagctctaggctgggaggggagaaccagcccctccccctgccccacctcctcccttgggactgagagggcccctaccaacctttgcctctgccttggagggaggggaggtctgttaccactggggaaggcagcaggagtctgtccttcaggccccacagtgcagcttctccagggccgacagctgagggctgctccctgcatcatccaagcaatgacctcagacttctgccttaaccagccccggggcttggctcccccagctctgagcgtgggggcataggcaggaccccccttgtggtgccatataaatatgtacatgtgtatatagatttttaggggaaggagagagggaagggtcagggtagagacacccctcccttgcccctttcctgggc

SEQ ID NO: 98717 - DNA, 1051 bp, Homo sapiens
gtctcactctgtcacccagggtggagtgcagtggcatgatcttgactcactgcaacctccacctcccgggttcaagcaattctcatggctcagcctcccgagtagctgggattacaggcatacaccaccacacctggctaatttttgtagttttagtagagatggggtttccccatattggtcaggctggtctcaaactcctgacctcaggtgatccacccacctcggcctcccaaagtgctgggattacaggcatgagccactgcacccggccctgtttgtaatactcttcacagctcctgtacttcacctttctggcacttaaccctgaaattaaataatagtgtaaccaggcttctctgatctctctcctcctgggatataaggtggcatgaaggcaggatcccatctgtcttgttcatccccagcacctagtcacctgcagggccaaatctgggagtcaactatggtggtccaacaaatggacttctttgtcttcctttgagaatctgacctacctccttcctgctggggtccacaccctcggggagctcctctacaggcttgttcactagctgctccagggggaagatgggcagaggcccagaactgaggttgctgttagcattgaacacgtccactttggggcttgtgacctcctaggaaagaaaaggaaaccactggttactttagctggtgcacagctacctcccaggctgcctttctctctgaagtctctagggcaccaccttcaagaagcctcccatgtcccaccccaccctgccacacacacactcataagaacaacataggctgggtgcagtggctcacgcctgtaatcccagcactttgggaggctgaggtgggtggatcacttgaggtcaggagttcaagaccagcctgtctaacatggtgaaaccgcatctctactaaaaatacaaaacttagccaggtgtggtgtcaggcgcctgtaatcccatctactcaggaggctgaggtaggagaatcgtttgaacctgggaggtggaggttgcagtgagctgagattgcg

SEQ ID NO: 98718 - DNA, 2523 bp, Homo sapiens
ttttgcacattgtgatcagtttgcccagaattggggatggggcagttagcatgttggggccaggaagggacaagttagataaggactgagtgcttccgttgcaggcagtttgcacaatacctaattaaccttcctattgaaaataccaaatgtgtggttacattactttaaatgacattgaattggaacttgatggcaattagttctagatacaaccttttgatctttgttggaattttaagggaaaaatgaactaaacttcatatttgttgattttaatcacctaatagtactgaaggttggaaagttgcatgtggctggatgctgttaatttctttaatagccatgactataatttaagcctatgagaagatagactgtttcgtagggatatattcacatgtgtgtgcacactcatgagttttgtctcagcaggatagaataagcaaatccatgaactggtcttctattaatactttgattctaaaaattatttgtttacttgctatggtctgttcattctgggcctaaccttaaaggctcaataacaaatacaacaaatgtaaatatgtttacattttaagacatatgcagtggttcttacagatcagttaattaactccagaaagcaaatgttagactacacatttatttttctccttgatcaagtataaaattctgaaacagaggctttaaaatttaaaacctcagcaaaataatccatgaatttactgattcttctgtatcgtgtgtagttaccattatgtaactatacacacatacagctacggatataatgaaaattatctgcaaacacctaaattaaagagaaaaaaaagtagtttgtaaactcatttgtgatctactgaaaagaggttatattaaagcaaattaaaatattttccttctctgtcctctgaaatgactgcagtagatactcttagttatcccatttagggtggttggagggcctttttaatttaattgaccccccgaggtggtcttttgttttaaacagggggcaacagctggatctccaagtacatatggattttgtatatataggagatttttagaaaaatcaacaacctaacaccagattcaagtcacataaaagtgttccaataaaatggatggatgtctttttcctccccattttgctttatactgagtaatgcactcttgcaagtgtatacaaaaactaaatagacttctgccctccaacatctttttattgcattacttcaaaatcctaattttgtctctactgatatgtcttattaacatctgaaaaaatatatattttttattggaaaattctaatttgttaggccttgaaagttttgtgacaattattttgctgtgtttaaccacaatcattcaccttatggcatgctttgattactagacttcaggcagtctcattcattgtatcatacttacacacaattagtaagttgtctccatgtgtgctatatgtctgaggtgtatggagtttttatttaaaaagtgtgccagtctgaatataagcatttgattttgtaacattggacttttcttaaaagtacagaggttcaaagtataggtatgtccattggcataagaatagagtgggtgagggtctggaccaggttccaggttggtccagtcagatgccagaacaaagaagaacagtcaactaaactggtctacttcaaaaatagtgggcctgtgtgaagagtgagaccacatgtgggtgtgcacacctcttgtccccaggtttccctccctttgagcttttctttccctccctaacttctctggcctattgtcattgttgtttctttaaacttaaggagagaaaaacaaaaatgagattcctacactttgcctaattgagccactaccaggttttctggcagctgtggccacattatttgtgagatgattttttttctttatgttcagagtgacttttgattctgattctttatgttttgtatggagcggcacttttatctgtgttttagcagaactgttcctctgtatcctttacggtttttctttgtttttgtttcctttttaaattatgcatagagtttttttgtgtgtatgaaattaaagcctttattaaccttctttgatttgactgttatttctgaaaaggacacattcttgctgatacttgtaacaacctgttcaaagttgtggaaatcaccttctgttggctttctgacatggacttccttgcagcactgttacttcttaaaaggaacagaatggcaaaccagtgtctggccgtagtccccattgattcctgttattttcatctgaggagcctgtgaagctttgcagaggcttctgggtaagtttgtaaacctagcattggccttcactaggctcttgctttgcctcattattaagggttgggagagggagtgaagtagcatatgcatttcatacttgcctttaggtctcaagcctagccccagtggaagtgctgctctcactggtactgtttggaatttgtgaaacctcttaaga

SEQ ID NO: 98719 - DNA, 1751 bp, Homo sapiens
agaaactttgccagattctaaataatgagttagaaatcaccggaactcttttttttttttttttttcctttgaggataaaatgtttccatcagttgattggttgaaaatttttggtttttatcatctttggttagggtctatctcttgatatttccttgtaagtccagaatattttctctcataactcagcattaattgctcattacacagttgtatctaggtatggaagttaagacagtttgttttatgatagaagatgtcctgtcataaatagttttggtcatccagttttatcagctagaagatctgatttatatggatgggaattacctagcatgttcattaaagctaactgttgtcagttcccctctattcttaaaaatcagcattcaaagggttaagatcaaatgagtgagctgctttttaaataaaatacaggcatgaaatggaattgtgaaggccttatccatatcaattttattttactttttctcctgcctattctttggttctgcttactaaatttccagttttattttttgcttgttttatcttaagggagatctttgatgagctgctggaaacagaaaagaactctcagtcacttagcacggaagtggggaagactacccgtcaggccttgtgaggaacaaactcctgggttggcagcatgcactgcatatttgttactgctgcccacctcacctttcctctgctgaaggagaatttggaattctacttgatgcgggagcaacaaacagctcagggccaaaccaaaagacaaaaattggagtaacgtagaatgctccatgctattttatggaaactttggtctcacatccgtagctgattatcctctttttctcctatgagtggcacttcttttgtcttaggaatacatgttgtaaatatatatctgtgtatgtgtgtatacacacacacagacacacacacacacacacgggatgaatggagccttaaagagttaggatgagccaccagaatatgcctgctcaaaattaatagcacagcagtttggagaagaaatgaaggtgtcaaagagtccattcacctgagaaatgtgtgaagacatacttatcagttggcttttagcttttatgttccttgagtagtttcactcaagtctgtaaccttttgtgtttccttattagtaaaattcactggaaagccagctcttcatgttacactaatgacagtttgttctctttgcaagagaggggcattactgtcacctgacttgaggagctgttttgttgttgttgttgtctgcaaatttcatgaatttgtgatgtctttgctgtttacatgcagtcccaagaaatggattgttggtgctttggaatatgttacagtcccacatttgatatttcttatatactttgttttctctaaggagatttcttcacacagtatgttcatcatatatcatcatcattattatggtggtaaagatagaatcttttttcttttttgtcattctgccatggagcagcattaccctaatggattgcaaccaaaactttaaacaagtagaaagataatatttctccaattgggactccccagcaggaatacttagggataaggaagaatgctagcatctctgtctctcaaacatagggaggataagaagagtgttcttctggtaaagctaaaattctggaccactgaagctaaaagccctattgcaagtatgaaattaagtacttgagctgtaggacaaaccttg

SEQ ID NO: 98720 - DNA, 1045 bp, Homo sapiens
agtcttgctctgtcgcccaggctggagtgcagtggcccgatctcagctcactgcaagctccacctcctggattcatgccattctcctgcctcagcctcccgagcagctgggactacaggcgcccgccagctaattttttgtgtttttttagtagagacagggtttcactgtgttaggcaggatggtctcaatctcctgacctcgtgatctgcccaccttggcctcccaaagtgctgggattacaggcgtgagccaccacgcctggccttccttccccaaattttaccttatagtgctgtctgcagtgcatgaatatcactttttcagttttgctttattttaccaaaaatattttaatcatattttttaaaatataaaagttcactctgatccctacagcaacatagcaactctttttaacatttttgttctattgtccaatgcctaactcttaacgtaacatttttttaatagagttatagttactatgtgcattcatatgggtttggaaaaaaggttaacatgttcctgatccatgtagtttttttatataactgaacattattatattgaattgatatactaaccagttagctattattggatatattgttggttccagcttttcaccagataatgccacagtaaataatttgatacatatactcttcttttgacttatttccttagaataaattcttagttgagggtggaattcttgggtcaaagggtatgaacagattttttaattgattcttactatgccacataccaaagcttagccatgtcagctttgataataaatttatattcagtgttttgcttttattcaaatgaagacttaaaagttatacccacttctgttttccagacaggaaatctgcctcattcgtaccggctcatcagtgttgtcagtcacattggtagcacttcttcttcaggtgaatagccatcatgatttcagcattttataaatgaactagtcagcatttgctctttattatattgctctttgcctagctttgtgaagtgtgtttttcttttt

SEQ ID NO: 98721 - DNA, 1045 bp, Homo sapiens
attttatttccagtacttggtcaagtgacactatgacctatggctgttttttcttccccatctttacatagtgtgtttctgatgattaattaacttttagaaccatcactgtagatcatttgttctcaaacaagaacaattttgccttccagaggacatatagtagtgtctgtcatttttggttatcacaactgtagagggtggatgctactaatatctagtaggtagaggccagaaacactgctaaacgttctacaatgcacaggacatactcttctcccctcaccccaacaaaagcttgtcccacccaaaatgtcaatagctctaggttgatcaaccctgacgtagatctagtaaggtgaaattgtatgtcctaagcaaattatagatgaaattagggtaaattgctttatgaacagtaggtgtcactctagttcagaaatttccatttattaggattttccaaattaatgttatgttctgcttcctcagatcctgccagttttactgagataactaaagactgtgatgagaataaagaaaacaaaactccagaaggatctcagggagaagttgattggctccagcagtatgatatggagcgtgaaagggaagagcaagagcttcagcaggcactggctcagagccttcaagagcaagtaagagatatttatattgctactttctctgtacttacctttcctgagaaatataataataataactaatgtgttgagcacttactatgtgtcagacattgttccagatgatttacatagagtaagtcattggggaaaaaaaagacttgtttgaggcagggtttggtggttcatgcctgtaatctcagtactttgggaggctgaggcggacggatcacttgaggccaggagtttgagaccagcctagccaacatgacaaaaccccatctactaaaaatataaaacttagccaggcatggtggcacacacctgtagtcccagctactcagaaggctgaggcaggagaatcgcttgaacccaggaggcagaggttgcagtgagctgag

SEQ ID NO: 98722 - DNA, 1050 bp, Homo sapiens
ctgggattacaggcgtgagccacctcgcccagccttctttacataatcttgatgtcgtgtttatttttctcatttattgttaataagatcagctaacatttataatggtgtagtaggcataatgatagaatatttactgtataatctatatatatctggaagaaaataaattgaaaatacttagagtaattatctctgagtaatctattttgaatgaatttattttattatttttatgtattctccaaatttgtacaaaatatatacttatttcaatcaagaaaaaataatgtattcttatgtatttattatttttaaagttagactcaccatttagtttatatattggttattgattgttaaataacccaaagcatcaaagaaaggaaactttttagaaataaagttgctactttaaatactaattaagattgctatatttgtaggtattctggtttcttctaaaagtaactctcttcttcaggattcaaaattatgcccaatagagcctgacaagtctgaattggaaaactcaggatttgacagaatgagcgaagaagagcttctagcagctgtcttggagataagtaagagagatgcttcaccatctctgagtcatgaagatgatgataagccaactagcagcccagataccggatttgcagaagatgatattcaagaaatgccagaaaatccagacactatggaaactgagaagcccaaaacaatcacagagctgggtaggtttaatgaagattaaacctctgtgaaacaaaacataactctttcaaagttttgtagtgacaaataacctccaaataacgggagataaatagaaaaattagctgagcatggtggtgtgtgaccctaatcccagctactcgggaggctgaggcaggagaattcgcttgaaccgggaggcggaggttgcagtgagccaagattgcaccactgcactccagcctgggcgacagagtgagactccttctcagataaaaacaaataaagggaggtgaagtggatctgtatataacagggttgatggcattt

SEQ ID NO: 98723 - DNA, 1018 bp, Homo sapiens
ataagtggataagtggaatgttactgttatttttaaagtgcatggatcataatttaaaagatcacaaattagtcttcatgcactttgttgtcaaaaacatttattcattgctatgcctgcatgaattcaatagcataatttataaagacaatagcaaatttcattggggttgatcattaaaagaaaaaaggcacaacatgattagtttactgatgatacgtagtagcataagagttgtccagttttcaaagcatggctcttttggagtggggcaaaggtaatgctgaaatatacctcttttgatatatcttttttttctgttaagtaattttccgtaatggaaaagcaatttgttttgatatttttacaataaaagaataacaaagacaaatgtttatcaggcttttttttttttccttaaattacaggaaattcaccttcaaatccaagagctccttggctttatgccttgattcagacagtgaggatgagctaaaacgttctgtggccctcagccagagactttgtgaaatgttaggcaacgaacagcagcaggaagacctggaaaaagtaagtaatattttcttaaaacatctgacaaagatttgtttatctcttactgtccaaacaaatgtctttcataaccatcatcaaactaattagttttaaagaaaatgccttctctggctacagaaatcagtctgtttacagatggatcaagacttacgagaaattcgttgttctaaacaaattactttctttttttgcccttcaaagctacttttgcatattcgtcctcaaataattacttgctttattttggtagcagttttttaagacagggtatcgctctgttgcccaggctggagtacagtggtgtaatcacggctcaccacagcatcgttctcctgggctcaaacaatcctcctacctcagctccccaagtagctgggactacaggcatgtaccaccatgcctggctagtttttaaaattttttgtagagacaaggtcttact

SEQ ID NO: 98724 - DNA, 1019 bp, Homo sapiens
caccacttactacaacctccgcctcccaggttcaagcaattctcatgcctcagcctcccgagtagctgggattacaagcacccgccgccaaacccagctaatttttgtatttttagtagagacagggtttcaccatgttggccaggctggacttgaactcctgacctcaggtgattcgcccacttagcttcccaaagtgctgggattacaggcgtgaaccactgcacctggcctattgctagtaatttaaaaagtattataattgttcaattttcaagaggacataaaaggaattatagtaagaataattcattttataatttaaatatatatctttaataattcatttgtatacattatatattttctaattttctgatagttctagaccattgaaagcctctcaaatggtgaattcctgcatcaccagcccttctacaccttcaaagtgagttatatttcttatgtacccaaaatctgtgtttaaggttttggcttaccctaatctccaagattgcctccctgccttttcattattgtttttctttttgcatgataatgctctttattacctatacttttgaaactttcctgaatttggtttagaatatattgaaggatataacaaattttaatcagtgacacaaggttagctcatcctctcaatattctgtcttaaaacttttaaaaacttattattgttaatatgtaatactttcatcctaaaactctaaaaattaactgaggacaagggagtctagggatttaagggataaaataacccctattagtctaaagcactcttccttaaagataggcatggaatcccaaaacattttttacctgttgttagccagtctggaacttcttgtctttgacaccgaataggagttgttttgaaaggggacaggaaaacaagcaagcattctacaaatgccctatttttttgtttaagaccaaactttatccaaggagggaagcacatgccttttttgtttgctttttaaatatatttcctc

SEQ ID NO: 98725 - DNA, 1093 bp, Homo sapiens
agaaaagaaatcagaccaagaaggagattttaattttgctttactttgttttagtgttaaatcactgcctgaagtaattgaagaaaatgcttaaaatttttccaaagttattagttgcttttcatagtgaggtgcttttttaggaagtgctcttggttagagtgctagaagacagtttgatatacttcttgaatatgagtcaaacttaggtgataataagagtcacctagacactaaaaatactgatttttgtgttttttccctggaagttctgtttcagtaggtctgagataggcgcttaggaatcaatatttttagcaaatgcttcagttgactcttcaggacatgcagatgtgagaaaccctatactcaatgttatgccttcatgcatatattatcagcagtgtaaagaacttaaatggctcctgaaatttctcaagaaaaaaagaagtaatctttactttaggtttttgcttcatcatgtatgctgggaaaaccttcggacttctttgagtgttccccttttttctacatacttgcattactttgaagccatatgttatgtcattcttttctatacttgaacactagtttggtagaataataaaattgtagaactttgaagatggaagagattttagaggtttttgtccaaacccttaagaggaccaaggaaattaaatgattttcctaaagtcatacagttagtgtctgaaagagccacgtctcatagaagtttacactagtgtctcaagggtctactaataaaggcatgtgcccagagagtctaagtgtttctggttttttcctctcacagcttttcacgtttttgcttggtgcatactaccttctgctggtagagctattactcttgctggcagtagtactatgtcacactaatagtgtatgatcacaggcctgaagccaagctatctgactgtacaatttgatagcttttagaccttgcacagattccttgacttgtctataagaaaaacaataggatggttgtgaacattaaatgaggtaataatatgtagagttcttagcacagtgtctgacatccagtaaatcctccataaatgagagctat

SEQ ID NO: 98726 - DNA, 1065 bp, Homo sapiens
tattaccttcccccccaccttttactgctccatgcatagcagggctacactataggcagtgtgtccagagtagcctcatattaccttttattttggttaggttatttgaaattctagttaaaatatttaattttgacattggtttcatatcagttgtgtccttgtattctctcaaattgtatatttgaagatcctgagttctagcacgctttttaaagagaactacaatctataacttcagtttgcaaatttttgtttgtggcttctgtgatgaaggcatatatggtaagaatcagttttttatagatcatttttgtgtgtgtgcctagaactgaagtttattcccataagatgtttgaaattcaatttttaaagtgttcttgtgggttgagaaatatatttaatccatcaagcagagatcgtgttctgtgtgagaagtgaaaaggttaccacaattttaaccacaaagaattcagtgcttctaaagagctaaaagcctttacagacccacagatcagatttggcatgcaaatttttgtaaagcttttttctaaatggggaaaagttttgtatttcctccttagctttctacagagaaagtacttctgaaaataaaagaataattctcatcaaaaatcatcttgaagtaattaatgtttaccatcaaatataagagctatgtaacattttaatagacattattttactagtagtggttatataaaacctattgctttttaaactatgtaacagtgaagtaaataatttaaggatttaacccaatatcagtgccaaatttaacattcttgtctgctatattttatttatttgtgttttttctaggaacattataagtattttacccaaaccacactaatccaccattatttgtatgctttttacctagcccaatgcctggcactaacaggtattcagtaaatattctttgacgtgtctttggtttggccaaatggattttttaaatcaaaagtcgtctaacatagagtgatctcttttactgtaagaaagatacatgtattatgtatgaattagtaaggttgtcat

SEQ ID NO: 98727 - DNA, 1027 bp, Homo sapiens
ttgaagagaaaaagggtcttgagagttccaagaaaatggcaacagaggatacagctgctgagactttggaataattataagaactagctagtcaatttttaattcagtaatgtgtaatattcagttatattttgttgccctgtgttgtgctgtagtctttttctgttatcccatactttcagtaaaaacctgctatagacacatacacacatgtatataagaataaaacagggagtaattttttgcagtttgtgcgttccttcattctaaggatcttataaattagtaaatttcctgtaatcataagataaattttctgatataggaatgaaattaacttatattgtatctgctctgtataaacataaaactgaagtagttacaaaaaattattatgtggttacaggacagcttttagttctttccaagaatagatcgcaaacaccaaggttgttattaacattaagtatttatgtagcactttgcctacagagtgctttactttcttttattagcttcaatattctgtcagtaagtgtggaatttctggaacctagcccctagagactagttcttttacatttcataatctactcctttctagaaaatgggagttggtttttttttttggttgtttgttgttgttgttgttgttgttgttttgatacagagtcttgctctgtcccccaggctagagtgcagtggcacgatctcagctcaccgcaacctctgcctcacgggttcaagcgattctcctgcctcagcctcccgagtagctgggattacagctgtatgccaccacacctggctaatttttgtatttttagtagagacggggttttgccatgttgaccaggttggtcttgaactcctgacctcaggtgatccacctgccttggcctcccaaagtgctgggattataggcataagccaccgcgccgggccaaggaagttggttttaaagaaatgactttataaaggctgggtgtggtggttcacgcctgtaatctcaacattttgagaagcc

SEQ ID NO: 98728 - DNA, 1063 bp, Homo sapiens
agaataaacctgacattgttcacatatgtcattgactttcaagggttttcactgtataaattataatgttaataagctattattttttgtttgttttgttttttgttgttggtttttttttcttttcttttgagacggaatcttgctctgtcacccaaactggaatataatggtgcgatcttggctcactgtaacctctgcctcccaggttcaagaaatttttctgcctcagcctcccaagtagctgggattacagggactgccaccacacctggctaatttttgtatttttaataaagatggcatttcaccatgttggccgggctggtctcgaactcctgacctcaagtgatccgcctgcctcagccttccagagtgctggaattacaggtatgaggcacaacacccagcctcagtaagctattgtgacaagaaatgtttttatctgattaaggatattgttgtcttattaggatgctcatgaatttttaagtcagtgtttggaccagctgaaagaagatatggaaaaattaaataaaacttggaagactgaacctgtttctggagaagaaaattcaccagatatttcagctaccagagcatacacttgccctgttattactaatttggagtttgaggttcagcactccatcatttgtaaagcgtaagtagtgtctaagaaatgatttccctttttacttctttatggcaagtgattaaaattcttctatgacataccaaatgccatgaattcttttctgtttttaagacagggtctcacacagttgcctaggctcttgggtgcagtggcacaaccccagcttattgcagcctggatctcctgggatcaagtgatcctcctacctcagcctcccgagtaatgaatttttatctcatcttcctttctacgtcataggggaaatataaaccaacagattatatcaaacctttttttcagagtctttttctatagaaatgcttgggctgggcacagtggctcatgcctgtaatcccaacaatttgggaggatgaggtgggcagatggtttgagcccaggagttca

SEQ ID NO: 98729 - DNA, 1093 bp, Homo sapiens
gtgtccaaacctactgaatcagaaaccttggggttagggtgtagtaatatgtagtttaacaagccctccaggtgattctgaaacataaagtggagaactcctactatactgaacatactttaggaattcctgttgccttctaaagcactatttctttaattttcagcttctccaatttgggaaatacctgctatatgaatgctattctacaatctctattttcactccagtcatttgcaaatgacttgcttaaacaaggtatcccatggaagaaaattccactcaatgcacttatcaggtaatcattatgtactgtacttactgagtaaccttttacttcattgattatagaataatggaattttagacactcaaaaattttctgtgccattattagtaattattctttaaaatatcacgccatgtcatgtaaaacgtgctaactttgtgttttttgttttactagacgctttgcacacttgcttgttaaaaaagatatctgtaattcagagaccaaaaaggatttactcaagaaggttaaaaatgccatttcagctacagcagagagattctctggttatatgcagaatgtgagtattaattgttttaaaacgtttcagaggcctgacacggtggctcacgtctgtaattccagcactttgggaggcctaggtgggcaggtcacctgaggtcactgaggtcaggagtttgagaccagcctggccaacatggcgaaaccctgtgtctactaaaaatacaaaaattagccaggcgtggtggcatgcgcctgtaatcccagcttctcgggagcctgaggcaggagaattgcttgaacccgggaggcagaggttgtagtgagccaagatcataccactgcactatagcctgggtgacagagcaagactccatctcaaaaaataaataaataaatatttataaaaataaataaaataggccaggtgcggtggctcacgcctataatcccagcactttgggaggccacggtgggtggatcatgaggtcaggagtttgagaccagcctggccaacatggtgaaaccctgtctctactaaagattaaaaaaaattagccg

SEQ ID NO: 98730 - DNA, 1061 bp, Homo sapiens
tactgatatttccctaaattcaagatttttttccttaaacattgacttctcttaatctattcaaggaaaatagtagtattcaaaaatttattttgcttcttcattatttatgcttttttgtaggactaatgtttcaagccagactccctctgccaaaagaagtttgggatttcttcctcagccagttcctctttctgttaaaaaactgaggtgtaaccaggattacactggctggaataaaccaagagtgcccctttcctctcaccaacagcagcaactgcaggggtaggtcaattctttcattttactttcttttttataaagtgattcaatagaagtgtgctttggtgtaaaatgtaattaaaggagtcacattaaagttctaaaatatttagaaattagatcacttattaaagatttattacatccataagtaatgttaacttcattttctgttcaccaaacaattttagaactttggaatatatataatattcattttaaagcagaaaatgtgtattttccaacccagtacacttcattctgctgctgagatactttcaacattttttatatattttccctaggttcttcatggttatatatatattaaacacaaaaatgagatcatagtataataactgtagtaattatagtagctatcttttaaattttttttttaatagaaatgggatctcactatgttgcaggttggtagaactcctggcctcaagcagtcctccctcctcagcctcccaaagtgctgggattataagcatgagccactgttcctggccagtagctctattacctaaagtgtttattacatgccagatactgtctgctaagtgcttaaattgattttttttaaattttaaatcttcgcaacaagtctttgagatagatatattaaaaatctggttttatgaataaaataaggcttagcaaagttaattaacttgctcaaagtgatatagtcagtagtacagcagtagtaaatccaggcagtagtgctgcagttgcattcttaatcactatgctatattgcttctctgttatct

SEQ ID NO: 98731 - DNA, 1056 bp, Homo sapiens
ggcccaagaagagagacagagatggggtaataatgacaatttggtggagcagtcagataaattgagtttgccgtcttatatgggtgcagttcgtggtaccccaaaacagtgacaacagtaacatcaaagatcactgatcgcagatcactgtaatagatataattaaaaagtttgaaacattgcaagaattaccaaaatgtgacatagacatgaagtgagcgagcgtatactgttgggaaaatggcactgatagacttgcttggtgcagggttgccacagccttccatttgtttaaaaaaaaacatacaaaaaaacctgcaatatctgtgaggcacaataaagcaaagagcaataaaatgaggtattcctgtatttgatgagaaggaaaaagagttaaatataatcaggactaatgtatacttttattattaaatgaacttgaatggttgatttaggaattaagtttttcctttgttcatttgttttatagggcttttacctttacagtcatcatccttttatggtagcagagctggatccaaggaacactcttctggtggcactaacttagacaggtatgcattggttatattacttgtgaaaaacttaggagttctttttttttcagaatattgaatgattggataggttatgtattatcctcttaagtgaatatgataatttaacaaaattgacgagactcatagaatcctgacatgttagttagaaagtattctagaaatgagctgagcacagtggctcacacctgtaatcccagcactttgagaggctgaggtggaaggatcacttgagccttggagatcaaggctgcaatgagccataattatgccactgtactccagcttgagcaacagaacgagaccctgtctcaaaaaaaaagagacaagatctcactgtgttgcccagcctggtctcaaatttcctgacttgaaacgatcctcccacctcagccttccaaagtgctagggttataagtgttgaaccactgctcctgctcctggcctctacagaattttttttttttttttttttgtt

SEQ ID NO: 98732 - DNA, 1050 bp, Homo sapiens
tgacctcgcgatctgcccgcctcagcctcccaaagtgctgggattacaggagtgagccaccgcgcctggccacagtttactttttaattgattcttttggtcttagtagctgaatcattttatctggtcttgcttttggccaagaaaatctaataatcttgctgtctctgatttgacttttatataaagaaaaatgctcctttacttttgctaagttatcagagtcatggattggattggctcttgagatagtaattaaagattatttttgtaattttcatttgtttaagtcattgaccttttgagactaacaatcttgtagcttaattttcaagcatatcaatgaatttggcactttaaatgtaaatgttttaatgacaactatttaaaattaagaacaatatttttatacacctgtactatattgatgtaaaattattaactataggaacaacaaggccatgacagatccctccagaaagtatttaaccagcagtagagaaaagcagctgagtttgaaacagtcagaagagaataggacatcaggtaagtgtttgatcttacaataaataaggtgctcatttattatatatttattagattagaaataaaaacctaacccatctgtacattctttttatttttatttatttatatatattttttgagacggagtcttgctctgtcgcccaggttggagtgcagtggcacaatatcggctcactgcaacctctgcctcccgggttcaagtgattctcctgcctcagcctctcaagtagctgggactgcaggtgtgttctatcatgcctggctaatttttgaatttttagtggagacgagatttcaccatattggccaggctagtttcaaaatcctgaacacaagttatccacctgccttggcctcctaaagtgctgggattacaggtgggagccaccatgcccggcctaatctggtgttagttattgggtgccaatttgtacccagtacttggctaaaatattttaaagtattagaaatccagggaatttgtattctgtttataaagaa

SEQ ID NO: 98733 - DNA, 1052 bp, Homo sapiens
acataatcaatatgctaccaaatgactggttttctcaagggatgcccttggatcagggtctcagtctttgctgttaaccaactggacattcagcagccacagtagataaaccttggtgaaggggaacccattttttatagcttctatctgccaccatggctgttacgttattcatggtccctttgtggaaataacggaatgtctaaggacagaggctggctgacatgcactggacaagttatcctgctgattgtttagtgtctctttagtgttgttctctggtgagcattaacatgtaaaacagatcactctttgtacatactcccataagtctgtccatatgcctcttccataaatcatttctttccaatcttccaggcttgctcgttccaagcccctatttatccaaatcatttgccacaacccaggagtccatgacccacttctctctccatacaaagtagatgatgagatgcatccctccaagctctgcacaatggaggatttcccctcacaactgtctttcaaggcagtccctagtgggactatagtgcaacagtagtttatttgcagtttgtaccaatgtaccaagatgacctatccattaatcaggcccaggtttattcctcgtttcagcttgatgtaggaaatgcccctaacgcttgttcttgtcatctctttcttacttgggcccaattccaatatacctgcttccattttatgatgaattgctgttgtactctcctggtcttatcacttcatgggtgtgatagcacttagctcctgatggttagctctggttgcacagtcccttgatgaccatcagtcagatgctctgtctcttccagggcttaataatatgccaagagtagtatgccatactttacagatgaggtataatttttggctgcagacagcatggtcttgctttacaaggtctgggctgcaactctcctgtgggtgactctacacattgtctttgtcctttaagttggtaattggctcaactgagcctgtcttctctcttgaacacataaatactcagcatcaac

SEQ ID NO: 98734 - DNA, 2031 bp, Homo sapiens
tgtacattagaatcacctggagtgcttttaaaaacaacaacaaacaacaacaacaacaaaactgatgaatgagccttaccgcagatcaactagaatagaatctctagagatgtatctccatttgtattttttcctttttttagagatagggtcttgctctgtcgcctaggctagattgcagtggtacagttgtagctcactataacctcaaactattgagctcaagtgatcctcccgccttcgctttctgggattacaggcatgagccatcgcacctggctccatttgtattttttaaacctttccattggagaatcactgttctaaaagtattccagttaatttgaagatttaactatctcaaactttatttttacaggcttctgcaaaaagaggaagtttggaaactaaagatgatattccatttcgaaaagttcttggtaatccgggtagaggatcgattaagactgtagcaggaagtggaatagctcggacgattccttctttgacatctacttcaacacctcttagatcagggttgctagaaaatcggtaggagagacttttttcttagtcactagctgtatctgtaaatgtcttttaggccttttagaaataccagtaatttgaggagaaataaagtatagagtacatttttggtagatgtaatgattacaagtatttgtcatatgtagtttatgtcagtgacatgtattaagcatacaaatatacagcatataaatttaaatatgggccaggtgtgatagctcacgcctgtaatcccaacactttgggagactgaggcgggcggatcatgaggtcaggagattgagaccatcctggctaacatagtgaaaacccttctctactaaaaatacaaaaaaattagcctggtgtggtggcacacgcctatagtcccagctactcgggaggctgaggcaggagaatcgcttgaacctgggaggcagaggttgcggtgagccaagatcatgtcactacacttcagactggggtgacagagcgagactgtctggaaaataataataattaaatatggtgtagagaattagataatagtagtcccatttcctgtccttcagtatgttgatttatgaatttttgtgatatgaattgtggctttttaaaagtaaccttttctttgttctctgtagtactgaaaagaggaaaagaatgatatcaactggctcagaattgaatgaagattaccctaaggaaaatgattcatcatcgtaagttactttaagggcctttatagtgttagagcagtgtttcttatattggtatttgtaaccactggggaagattggggaaatggttttaatttatgagaattccaaagatggaagagcagaatgtaaagtagtttggtgacagtagactgtaggctcaatagagagggaaattagccagtgctattgctttggtcatttcattgcatttctcttatcctgccttttcttaaatctgcagtacttagtgggagaatagaactgaagaactctaaacaaatgtttcttgctggctgctgttttagtgtgaaccccttcttgtcttctttatgcttaattaaaaaaaaaatttttactttttcattttactcatgtaaaaagtcagcctagaggttaaaggatgtgagcctatgtgttctaggcaagtagcattaatctttcagagatgttttctgggttgaacaaaagggaatagatcaacccagggtgctcgccaactcgtaatcatcgtcctcattttgtgaggatttttttttttgtcttctaggggagaaaactaattatacagttatcagttaaaatctcaattaataccttaacagaatcagttggtagacagttaattggtacttgaggtcaagaggtcactagaaaggagttgggaaaaagccaaagaaactttatgtattaattgatttgctgctgtaatagatgtaaaagtctgaataggtggtaggactggtatctgaaactataatcaccaaggactcagattctttct

SEQ ID NO: 98735 - DNA, 1028 bp, Homo sapiens
gtgatcctcccacttcagcccctctagaagctgagactataggcgtgtatcaccatgcctggctaatgttttttcagtttttttgtagcgatagagcctccctgtgttgcccaggctggtctcaaattcccaggcttaagcagtcctcccacctcaacttctcaaagttttgggattacaggctgagccaccatgcctggcctgaacacactttttttttttttttaacttatatttggaaatccagacccattagctttcatgaaggaagagaataatcaacactttaatggtgaaggcaatcactttgagaatgggatcttattcctgttgacatgtctttagcggtagcagtatggttgtgaatgatacaaaatgtagaatttaggcactaataaatacagtactggacacatggcaaagaagggaaaatgaaggcgcagaagaaatgcatggtggttagaaattaattactagtaagttataacttatcttatttttcttccttagaacctgccaggtaaaggtatatttttgctttttaatttagccagaagcaatttttaaagaaaatatgtctcctctgaagatacatggtcctatcagaattcgaagtatgcagactgggattacaaagtggaaagaaggatcctttgaaattgtagaaaaagagaataaagtcagcctagtagttcactacaatactggaggaattccaaggatatttcaggtaataccaaatattgatttggaatagctcttgaagcagatcatttagtaaatagctattctgtgccatagtaaacatcacagtagccctcctcctagattaatatttcttgcttcttatttctaggacattaatatttttatgtacatgttttataaattattcatcagtattgttgttggtatataataaaagcaggaagtagtcaccattattgaaaagaaaacttgtgggaggaagctgacaagagttcggatactgtatatctaagctatttttaaaaccactttaagataat

SEQ ID NO: 98736 - DNA, 1774 bp, Homo sapiens
ttcattataaggctgtctgaaaggtgtatggaggtagaatttttttttttttttttctgagacagagtctggctccaggctggagtgcagtggtatgatctcggctcactgcagcctctgcctcccggattccagcgattctcttgcctcagcctcccaagtagctggaattacaggcgcacgccaccacacctggctaatttttgtatttttggtagagatggggtttcaccatgttggccaggctggtctcaaactcctgacctcaggtgatctgcccacctcggcctcgcaaagtgctgggattacaggcatcagccacagctcccgatctgtggaggcagaattgatgggattctcctgactttccatctctaatctaataccaataattatcaagaaggaagccaaagacaagtcttctgtttctggcatgggaaactggagtagaagagtgatgtattctttgtagcactgagtggcggagtggaaaaaagtctcaaggatgtatccaacaataaagtcacaaattataattgcagaaaaaagtattacagatatacattgctggctcaagtttctgtagctctgtagcattactagtttgagccaaatgtcatgttaacagacagttctataaacattaatggactctattactttgacgaattcatattacccagcacattatactaatatctaaatctgcccatagtaagcacttaaaaatttttgatgagatgagtgaataataatagagtacttatgatacttaacacctttaaactctcgaaagtgttttcatatatcttcttttatcttcagttatttgccatacagtaaccagagacctccaactaggggcccccaaactgtatcctgcctgtaggtgagttttgtttgatttgtagctgttaaaaataaatttgaattcattgccaacaattaaaaatggacagttttacataaacgtttggatgtctttattttcttgaaaagttagatggtctggcaatgctaggttcgctatttctacatggtaataattggctagattgggtagcaattgttcaaattttgcctgcttaagtcatttctgtcacctgctagcccctatagatagttgagttagtgactcctgttaacattgtatttattgaggtctttggagaaagaggtattatggacatggaataaattcagaaaacagacattaattccattaatattaattactgctgtctgctgagtgcctagtatgtattatttcattctacaacactaaaacatttgctattcctattttgtggttgagaaaacttatggttaaagaaggtaagttacaaattagtaagtgatagggctggctggctgctgatttctagacctagcatcattttcctttatatactagcctttctggcttttcttgttgagctgtttaggcaaaggtaatgtttaattgtgtttaatttagtaaattataagcaagaatccactttagaagtagtgtttttaaaggtttgaaatagtataaaatttgagttcgcaattttaaatgattgcatatttatgtatgtaacacactatttgataacattctttgctataactgtaattttatttacttgttgacttttgcaaaagctaatttgaagagttttacacatccgattattgctgtaagtttaagttttttgtgttttttttttgtttgtttgttttgagacagggtctcactcagagtgtcacctaggctggaattgagtggtgc

SEQ ID NO: 98737 - DNA, 3084 bp, Homo sapiens
ggatagctgaattacactatctttcttttttgttaaaagatcacgcgggtaaaacgagatgtgtcgaggaaaagttttaaatgcagagaacctaagtcagatgcaaaaattatgcacttttccgggcctcaggttttccataaataaagcaagtggtttgaactagaagccatttccttcccgctgcgacgtggtgagttctaagagcaggggccgcgtcagattgaccatggaattcccctcatcgacgccggcgcccagaacacaactggcgccctgaaactgttggtcagcgcaataaatcaatgaatggcctgctacgggcgtgggaccaggccccggcgcccgcaaagaacgcgatgggtcgcgctgaaggccgcgagaggcgtccggcaaggaaataggggccggctccaccacaaccaaagcgtgccgaggaggggaaccggggccttggagattgagggcagaaaaaaatcagactagggacccgacaccgggaattaggagagaaggccgaaacgtgggtctgagaaaggattctggttccaagcctgggggcccagccactcaccgcagccgtcgccaggctgtgcatgttgtgagcggccgccgctctcttccacagccggacgcgtccgacccgcgtccccccttcagcacccctgcagcggaaaacaatgagccgccgtagccgccatccgactccggctcgctccgcccacttcgcggccctctgacctctcacccctgaccccacccacacatcctcttcccgcctccagggcctagttaacagtcccagagtatgtcctttgccccttaagatttaggaccggaaggacgtccgcgaccactagtccccgcaacttctggctttgagcagttatttccagagagcggcgtgaactctgaccctcctccaaaagccagtgaacggcgggaaaagatggacagtcccggcaagacaactattgcgcatgcccgactgggttgcgtaggagggaaatggtgggggggcgtcgaaatcgggtgaggtggaaagtgcgcgtgcctactacagtcacggcaggggcggggctgcccgggctaggccgctctaggtactggcggggcggggcgagggcgtgtgaggggcggagttttcgactgacgcgcacgcgcctgtctggtcgcgtcgagtgtgcgtgcgtgcgtgcgtgtttgcgtgtggtcacagttcccgccatcagccgctctccctgactaggggtagctagcggcctccctcctttgggttcggtatccctacttccattaccctcggctcctcccactcctcgcgggctccgtgctttccgcgggtctgtccgggggctccggaccctcggcgcaggtaaggcgggccggggtagcttctcaattgagccgttttccctacctcctcctccttctgtgcgatccgcccactcggcgttcactcctctggagttcgccctgctgctactcagcccgcccacaacccctcgatgcacccccagcctcacaggtactacctttgggtgcactgccccggcttccacctctcctttgacttggtctccactgccactcgctccctccgaaactcaaacctggccccttttctctggggctgttgtcgttcgcctcttaccttctaacagggcctgctgtctcttcaggtgactttcgttacggcacatccaccaggccttggacatgatactcattcactctcttgaccatcttcaccttcctcttgaccagtcctcactgcaaaacatgaattgtatttttgttgtgcatttccttgcgcccatttctagccgccagatcaggttgttagatgtaactattttaagtcatgatccatgaaaggaaatgatgattgatgataaaatcctgtgtcctgaagagttgtcctaaagtggttttggggtattcctctcaaaatttcagctctgtataaattcctttattgaggtggcaattcctgacaagtgtctaactggaagagatacctgagagggaatgtcaagtaggcagttggatatagtgggtttggagatcttaggagagttctgggctgcgtacgtaaatgtgcgcggtgtgtgtatgtgtttgtcatctgccatattgatagtaattgaagccatggatgtggatgaaattgccgaaaaagagtatagtgctgtaaaataaaggcacctaggatggagcattgacgaattcctgctgtttaataaccaatagaggaggatgcgtcttgcaagccatgaaaaaagtcatcagtagtgttgcattctgctgaaaggtaaaatggaaggaggactgaaaaacccagtgatataaaagtactcacttgtcttaaagatgtttgatgaagtaaaatgagtatttgggttcagtcctaggtcctcttcttttactcttatattcctccctaagctttaaatttgatctatatattgatgacttaaaaattgttatttccagcctattccctttgttttcagctccacatctagatagccagctgtctgcttgacatctcaacttgatttttttcttaggagtttcagatgcaacacagccaaatccaaagccttgatctttctctccatatcgaaattctttcttctccagtgtcccagtttattaagtggcacatgacacaggctacacacttgggaggcattcttgacttctactctctccaagttctatcctacttccaatacgtgtcttgcatctttttctgtacattttcactgtcacttttctagtttaagccacagtccttaaaaaacctggacttgattgccttggcttcctgtattatcatctgtaaaatggaaatagtaattttcagcctattggattgttatgaggattaagtgagataaccatgataagcacttggcacagagtaaatggccagtaagcattaattgttattgttataagctgatcaactcaatactcttctatctggttacattattttcttctgttcttgctcttagtcactctcccaaaacccaaaccaaccatatatgacttcctcattcagtagtaacatat

SEQ ID NO: 98738 - DNA, 1047 bp, Homo sapiens
ttcatctgatgctgatttccattttttaggaaattgtaaatatttatccatctatcaacccacccaccttgacagcacaccagtctaacagagtttgcaatgctctggcattactgcaatgtgtagcatcacatccagaaaccaggtaaatgctttgggtgagtcacttgggggagatatacattgaatatggtcctaaacgttctctgaataataaaaggaagggcatggaggagagagagagagaacgtttgtgtgtgtgtgtgtgtgtgtgtgtgtgtgtgtgtgtgtgtctctctctctctctctctctctctctctctctctctctctctctctctctctcctggtcttccggattcttatttacttttacccaatgaactttaaagaaacagtgttcacattacaggaaaggtatcaggcatacagctacttctcactccctgacctgttattgacactatgtcatctgtgaggcatagtgcatggcatataagaggagtttagtaattatttttccagcacttttcccacactgaacccagatttgacttcagaatccttcttaacatagcattctgggcggcctctataatagacgagaattggcatgtaagttaaaatatttttgccacctgtcatatctaaaaaattaagaaaagggaaatcctgttcaggaatctactttgtgggcttttatggccccaaaggcacttaatagtcatcttattaaagcctttcctctttgtcaagtttccttatgaaatatgtatgctaggttggcactgaccttacacagctttagagaaattactaagaaaattacttttaagcacttaacaaaaacacaagagtactttgagtgttaaaaatcttgggcgttggctcttctacaaggtgtaactataaataatataaaataatagactgatttccttattagttgcctgactaaactgttttcagaatggtttgtgtatctgaaatgccctaacaaaaaaagaagaatgtgcttattaaagtatagcaggtaagcctgataat

SEQ ID NO: 98739 - DNA, 1023 bp, Homo sapiens
tgctgattacagggaaaatcatgtgttttcttaaccactgtgatctggactagggttttcagctttggcaccattaccatttggggctggatgaatctttgtgatggaaaggagagggcaggagaggactgtcctgtgcattgtaggatgtttaatggcatctctggcctcttcccactggatgccaatagtgcttcataatcctgagttgtgacaatcaaagatgtctccagacattgccacatgtcctccagggggcaaaatttaccccatttgagaaccattggttgagactaatgaccagtaacattgttttcctaaggattccttgctctgacaatgttaaggccttacagaattaaccacctagaaatttgaaagttcaggatccttagaaatcaaccctgggctgtgaatgtaattattgttttcttccaggtcagcgtttctcgcagcacacatcccactttttttgtacccctttttgcacactgtcagcaaaacacgtccctttgagtatctccggctcaccagccttggagttattggtaagttattagaattgttttgcaagcctgaaatactcacagtagtagtctaagttgggtgttttgtcttgccggttatgatttttgtacaccagtcattcatttttgtctttgaggttgtctcattcactaatcaataagtatcaggaacatgatgactcctatcaagcactcttctaagtgttgttaataagactttgagatccaacatttgggattaaattcagcatatatgtggaaacatttgctggaattgtagggagagtaaagcataagaacttgattcaatatataaagagtattattaaaggaataagagtttaaatttgggacttctcctcttcccttctctcttctcttctcttcttttcttttcttttctttctgatagggtcttgctgtgttacccaggctggaattgaactcctaggctcaagtgatcctcctgcctcagcctcccaagtaatagggacca

SEQ ID NO: 98740 - DNA, 1015 bp, Homo sapiens
ttagagagagtctgtcacccagactagagtgcagtggtgcaatctcagctcactgtaacctgtacaggttcaattgattctcctgcctcagcttcccgagtagctgggattacaggagcctgccaccatgccttgctaatttttgtatttttagtagagacggggtttcaccatgttggccaggctgatcttgaactcccgacctcaagtgatctgcccgcctcggcctcccaaagtgctgggattacaggtgtgagctactgcgccgccctcttcctttttttttttaatacgagtgtgaatctgattcctttaacaaaccccagtttgtgttctgttatttaagttcacaactcactggataaacagttcgaagttaatgttaactggaaaccctaactgtaaaataattttgtttgtccttattttctttaggggccctggtgaaaacagatgaacaagaagtaatcaactttttattaacaacagaaattatccctttatgtttgcgaattatggaatctggaagtgaactttctaaaacagtatgtacttttaacttagattttacattgtgttgactcttaagctgcttccttatggtcctgggatcattttctctcttcaagcttttgaaatttgtatgaatattttctgttttgaataaaaattattatgaaacaattattgaaaaacccaaaccattcagaagaaaatcaagttaaacactaaatttcttttctccaaacccacatctcactccacaggtaaattctaagtatattattacggtttcatttttttaattttaaaatttcaatcctgctccttctataaccgggcttttttaaaatacataatcaattatatgtacttgagcttctgcttactatgtactttaaccatgaatgacaacatgacaaggtacagaattcttactcattgtacagaattcttacctcattgttctgtctcagacctccattgccatagtccttttgtcttctaacattga

SEQ ID NO: 98741 - DNA, 1056 bp, Homo sapiens
ttaacagttataccgggcacatagtaggtactctgtaaatgagaaggtctctgagtttttaagaatttgataattacacggaacctacccttgtatgtaaagtgagaataataatggtacctacctcattgatttattataaaaataagataagcatgtaaagcctctagaaaaaaaaactggtacaaagtaatgttcaacatggtaatatttattattctttgtactatacatatatgataaagttgtacataatatacaaggatccctgcttgctcaattttctgactgatagtcatgcctgggaaaatgagtagaaaatgagaagattaaatctgagcaactttataaactcttcgattttgttttgcttcaggttgccacattcatcctccagaagatcttgttagatgacactggtttggcttatatatgtcagacgtatgagcgtttctcccatgttgccatgatcttggtgagttctttcatctatcccctttacaactacttctcatcacaaagcttaatctctttataactggcattgaacaacttcagtcctctgactagaactaacaattttggaaccttttatgattcttggactatctgatctctgatgtcaattagaatttgtttgtgttttgtgtgttttttccaacccctccccttattttgggggaaacagggtaagatggtcctgcagctatccaaagagccttctgcccgtctgctgaagcatgtagtgagatgttaccttcgactttcagataaccccaggtaaacatttataggatgtataggactttagggaaatactctgctgaacagtttcctaatctcatggcatagctcctgtgtctttaggacagggaagtggggatataactgcatttagtttgtctgagacagaacttagattcttttaaaaatctgaaatgctgaattttagtagccatcagtttcatcttctcactgtaactctccatcctactgtgaaattccagagagtctaggcgattccaaaggaaaccttatgatgcattactcctgttg

SEQ ID NO: 98742 - DNA, 1063 bp, Homo sapiens
actggcactgtttacaagtctgttagctgcataagctcaataaaaagttggtctgggcattacatcccctctggcaggccaatagctgcatcaagctgttgggagaaatgggagggcaggggaaagatgtaaagccaaagtacagcaggaacccaccacctgtttcccttccttctcccattctactcccagtccggaatgccacgaggaccttaaccttgtttctggctttagctgctagttttcccaaatctcagtgctttccctttttgaacttcccttctattaaacttaaaacagatgtcttaattaatcaggctgtcttggaagggtattgtattgggagacaaggggcggtggtggacctcaccttcaatccaagttttcaaagatattttctcaataactctaaaagggaggtgcttgggattaaggtgacagtccacttgatccttttctttgttttagtgtgaatttcagcagctccatctgtcttcatgattgtacttgagcagtattagctgtatgagttaattttattcagattgaagatggagggctgggttctgctcactcagtcttttttttttttttttttttttttttttgaccattctcttttagtctatgggaattacagggttgccgctaaaatattcacttgttcatatcgtgtcagagatttcctcttctctggagcttaggtggctcttcacaatccataggcttgaatctgcaacctagtgtaaactgccttgctttccccggttctttcccctgctagcacctgctttctcatccctatctccagtcaaagatgggattgcttaatccaactctggagagggaccaagtcttttctgcccacatctcacacaattgaggtgtctgaacaagcttggggagggtctataaggggtaggctcaaaaaaaaaaaaacccatttgcagaggcagttttgccaacacaagggctctttcaagccgactttcacaaagagagccggacttgttagttggcttctgtctctttagagccaagaaaatagtaattaagtggccta

SEQ ID NO: 98743 - DNA, 1040 bp, Homo sapiens
caaaaaagcatgagagagcagaggagcaggaggaaacagagaaaacgggccaggagaggccagaattctgataagagaaggaattgcagtctacccattctctactttcagccccctatgacctcaatgacctcgctgctgtcagcttcatggagtctgaaagtggtgctctctgaggtttgagttactttagactggaacattgctaataacttagctcttcgtcctcctattttcatcttgagtggaaatacatttatacataaaacccaagatctccttatgctaaaagtgggagagggtgattatttcagccagtaggtagagaagtataagcatttagtgctgttattggctcctgtagactttatcaagttttatgtatctccagctcccaaactgcctccaggagagagagaaccttcacaggaagcaggtacacccttgcctgggcaggagacagctgaagaggagaatgtagagaaagaagagaagagtgacacccagaaggactcccaaaaggctgtggataaaggccaaggggctcagcggctggaaggtaatgacattctgaggcttgaagcccttggtggtggggaagaatggattgttgaaaccctgccattgaggctctggggtttgttttctgagctttggttcggatccttttattctgttctaccttgactcaaaagtcaaggtctagtgggaaaatgataaatgagtgaatggtaaagactttagtaatatagcattggggtaaatcgagtttgcttcactgggctggttttcctcaggcagaaaactctagcagggaagcaggaggtgatcttcatcatatagagatgccagaagttattgatgatcagcagcctattttgtctggcactgagccctcaaatacttttttctgaatctttgcttcccagtttttcacctcagtagaatatttgaaagtcatcccacaaggagcatagttatcaagtgaataagaaagattgggttgtatttattaccaacttcattattatctagagcct

SEQ ID NO: 98744 - DNA, 1031 bp, Homo sapiens
tagggctgttggaggaccaaatgagagcgtttattaagcctttctttatcaaagtcttgcccattgcttttaaaacggcagcaattattatggagaataataattattttcagaaggatattctccattttatccattcctgtgcctttgtaaagctctttacagaatttgaaagtaaagctcttaaccatttatattgcagatattatccctagtttgtcattttcttttggaagtttctggttttcacttgggcaaaatatactgtcttaatgctttctggatttgcttgcttgttcactcatttaacaaatatttattaagcacctatcttgtgccaagtattgtgctaggaatccaaacacacgtgccagatagatggtccctgaccttatggggcctacagtccaggtgtaggaccagacttaaagtccatctgtactctacgaatattaaaagattcacctacattttctactagtaactaactcctatgagtcttgttccatctgattctatgcctttctctgtcggtcctctgcctgcaggtgtcctggtaaaggtggtggaggtgtacttctgtgagcgctgtgaacagagcttcgcagagcccactctgctggccctgcaccagtgcagtgagacccatatacagcctgtgcagggcctctctagccccccatgctctgtagagctgcctcccagcaacccaaccctccctggccctctgcagggccagagcccgccagttagccccctatcatgccctgtgtgtagacaggagtttgcccaaccccaggccctgaagagccacttcaagattcaccggggcactcctgacaccttctcctgcccagaatctggctgtgtgttctctgctgaagatcgcaagggtctgcagcaccacctgaggcagactcacagagcagttcctgtgccctgttctttccggggctgccccctgcttttcgggagccagcagggcatggagctgcaccggcaggcgcattaccctttccactgcagccact

SEQ ID NO: 98745 - DNA, 1033 bp, Homo sapiens
aaattactaaaaaagctatacatctagggagagagactgacaggtaaacaacagtgcagtgtgacctcgtttctgatagggctgtgtacagagtgcccttaggacgccagaagagagaagataagagtttcgggaagccaggcccggcgcggtgcctcacgcctgtaatcccagcactttgggaggccgaggcaggtggatcacctgagttctggagttcaagaccagcccaaccaacatggagaaaccccatctctactaaaaatacaaaatagtagccaggcgtggtggtacatgcctgtaatcccagctactcaggaggctgaggcaggagaatcgcttgaacccaggaggcagaggttgtagtgagctgagatcgtgccactgccctccagcctaggtgacagactaagactgtctcaaaaaaaagaatgtcaggaggccttcatggtggaagtgacatttgtgcagcttcttcaaggatagttaattggttagccagataagagagagagattgagaaggggaaaaggcatatcaagccaagagacgcaaaaggctgtgagggtatgaaagcaaaagagaatgtggtgggtctggagaatggcacatcatctggttcagagatctgctgaggggagaagtgggagatgagtcaggggaggtcagcaggagccagatgatgaaggaagggccttccttataatccatgctgaggaatagtgagattatcaaaggttaagagggaaagggaccaggcaaggtggctcacgcctataatcccagcactttgggaggccaaaacgggcagatcacccaaggtcagaagttcgagaccagcctggccaacatggtgaaactccatcgctgttaaaaatacaaaatttacctgggcgtgtgtggcacatgcctgtagtccagctattggggaggctgagacaggagaattgcttgaacccaggaggcggaggttgcagtgagccaagatcacgccactgcactccagcctgggtgacagagcgagactctgtct

SEQ ID NO: 98746 - DNA, 1694 bp, Homo sapiens
gccttccatgcataggtgttttggaattctggatcccagttctgaggctcagccgaggtcactgctgtcagctcacctccctgcatgccaggcgcagggcaaagtggccggggttcggggttggaggagaggtgtactagaaacaactttgctcttgtccctcaggatcttattgtctacgatgtgacgatccgtggagaaagtagcagatgggcagattttcatttggggagaatgagggagaaaagaacgggcattccgagccaagagcactgcatgagcaaggagttgggaggttgcttacttgttgaacatatttgttgcgtatttgcatatttgctaaacaggtagtgttaggagctaatccatgaaaggtaggtgggcgccgtattgtagagagccttgagtaccaggctgagtttatacccaattcaggggtctgctgggagccagccattgaaggtgctggagcagagagagatatggtattggagctgatccctatgatgaaagatctggacccttgtgtagatgttccgtgaagcaggaggtgaagacctattaaaatgccatttcaagaactacgattttaaagacagtttaggtgggaggtaataaaggtctaaacaagacgttaaatattggggacgtaagggggaggatatttgaaggacattactcataacaagacatagggttactgacaagtcaacggacgcttctcccttgctgactgcagccaatggacccctttttatcatagctggtcccagggaccacaaaaatcctgtccatccattaccctgatgtgaagcctgtttatatagctctttttggtttaaggcatctccagacatggtcctctggtaggaaacaggtatgagtagactaatgaaggacaaaatgggatgagggacctggagcctccacccttgcattccaataccacccttaccccacaaaaggagggtattgacccacacagtaatgctgacctgtggccagggctggggaggtccaatttctaatctgtgctttgtcccatctccactgttccccacccctaggttttcgtaacaccccagggcctgtaaggtttggtgtttccctttcaagatgccactttcagactttattctggctctgaaggacaatccctactttggggctggatttgggctggtgggtgtgggcacagccctggccctggcccggaagggtgtccaactgggcctggtggcattccggcgccattacatgatcacactggaagtccctgctcgagacaggagctatgcctggttgcttagctggctcacccgccacagtacccgtactcagcacctcagtgtcgagacttcgtaccttcagcatgagagtggccgcatttccactaagtttgaatttgtccccagccctggaaaccattttatctggtaaggtggggagctagggagggctgtgagagtagaaaagaatgatgggagctgggtttgacccattcactcactcagttttgatcgttcttattcaggtatcgggggaaatggattcgggtagaacgaagtcgagagatgcagatgatagacttgcagacggggactccttgggaatctgtcaccttcacggccctgggcactgaccgaaaggttttcttcaacatcctggaggaaggtgtgggatggcacaggcag

SEQ ID NO: 98747 - DNA, 1048 bp, Homo sapiens
gcagggctgggaatgaacgtagatatccggggcaaaagacatgatcatcctggctctatccctaggcattccttacagacgtggctacctgctttatgggccccctggttgcggaaagagcagttttatgtgagtattcaaaatttctctcaacttggcaaaacgaagcctttgtggaaacactaggctgatagggttggaaggggaaatgaatctggggatcggggaccaggataaacatgaaacgtgtggaacatcagggtgtgaggtagaagtcaggcctctgagacacatgtccccaggcggtgaggagagtagctgggcctgaggaagcatttccaggttgcctgctacctcctgccatcccatgctccatagcacagccctggctggggaactggagcacagcatctgcctgctgagcctcacggactccagcctctctgatgaccgactcaaccacctgctgagcgtggccccgcagcagagcctggtactcctggaggatgtggatgctgcttttctcagtcgagacttggctgtggagagtaagtgaggggttctggaggaagtggagtgggtaactgtggaacaggggaagaaagcagaaatccagagggctggtggaagatgcctgggttagtgacaagagcccacaagacacatggataagtaggggaacatagtggggcatgctaattttatgctgggctatgactactcatgcttccttatctttgccttcctccagacccagtaaagtaccaaggcctaggtcgcctcaccttcagtggactgctcaatgccttggatggtgtggcttccaccgaggcccgcatcgtgttcatgaccaccaaccacgttgacaggtaggaaggagccaggcatcctgagacttaggcaagagcccacctcctcccctagtgccttgggaggaacaggaggtcgaggggccatctctgttgggtgctagtgtgacctgctttccctgtcttctctcaggctggaccctgccctgatacgcccggggcgagtggacctgaaggag

SEQ ID NO: 98748 - DNA, 1084 bp, Homo sapiens
aaattctgatttccatgccttctatttggccagttgacaacttaaggtaacatattccttgtttttaaggagtttagcaggagaatgcattctggtagattgccatttttctacaaagcctgcctttattggccttagcaggcttccacagggagagctgtaatggtaagttagtctactcctgtctctctagggtccttccctctgaagttgaagtattggagtccatctatctagatgaactacaggtgattaaaggaaatggcaggtatgtattcaaccagtggtgggcaggagtccccctagtaatgaggagaggttctatgctgaatttgggtcttaagacattgtgagccttgattcagagataatatttctcttgtgtagacaaaagctattcctttaatcctaccccaaaagaaagagtccaatgtgtacttcctttgcccacttcactgtctcagccccatcctccccagcccccaagcccctacccagtcacatctgcgtgtccacttgatccacctgcagaacttcaccatgggagatctacatcactttgcatcctgccactgcagaggaccaggattcacagtatgtctgcttcactctggtgcttcaggtcccagcagaggtgaagcccctactgtgtggcagcaaagggaggaaggggagagtccctggggtggaccgcttcagcagtaacttgttatttgcccccactagtatccccatgaggtgccacagatctctatccgaaatccccgaggactttcagatgaacagatccacacgtaagttgaacctgtcagaacagggaaaactcagctacagctttgcccggtgacagaaatgggcaggtctaatatttggtttgccctcttcctccaggatcttacaggtgctgggccacgtggccaaggctgggctgggcactgccatgctgtatgaactcattgaggtaagaggtgcgctagtctgagatatgttctttccttcaagctagagcagtttctagctgtaaaagggaaaccatgggcctagaatcttaaacggatctggagtcattaggtaaggcctaaat

SEQ ID NO: 98749 - DNA, 1022 bp, Homo sapiens
cagcctcccaagtagctgggactacaggcacccgccaccacgcctggctaatttttttgtatttttagtagagatggggtttcaccatgttagccaggatggtttcgatctcctgacctcgtgatccacctgcctcggcctcccaaagtgctgggattacaggcgtgagccaccacacccggcctggaatgataatcttatgggacattgtcttctatggggactatctgttgactgaaacattatgtgaggcatgactgttaggaaaatactggttcactgagttatgcagatctcccacgtgtcacagtttattgtatagtgtcaaaaaaatcatatcaccacaatctcttcagagaagtagttaaatattgggaagcactcaaactcgtggtggcagataccattttgccaaaattctaattttctttgggaagctcaaattttatcattggcaacaagtacagtcagttggtttccttgaagtgacaggcttactttgtttcattttccagaacctttgccaaataatgacgtcggaataactattacttatgtgtcattcattctttcaagtaaacatggcgttccacagaaaaatcctgcaattcagacaatcacacaagtgctttagagataatcaacatgttctgcatgcagcataaatgttttatatgtacttcacattttatcacacagaatattaaaaagcatactcaaggacactttttaatgagatttaatataatttacactgtgtcgggctgggcgcagtggctcacgcctgtaatcccagcactttgggaggccgaggcgggcagatcacaaggtcaggagatcgaggccatcctggctaacacggtgaaaccctgtctctactaaaaatacaaaaaattagccgggcgtggtagtaagtgcctgtagtcccagctactcaggaggttgaggcaggagaatggcgtgaacccaggaggcggaggttgcagtgagccgagatcgtgccactgcactccagcctggcg

SEQ ID NO: 98750 - DNA, 1145 bp, Homo sapiens
taattggctcatggttctgcaggctgtatgggtagcatggctgcggaggcctcaggaaacattcagttgtggcggaaggggaagcaggcacgtcttcacatggccagagcaggagagagagaaagcagggtggtgctacacacttttaaacaaccagatctcatgagaactcactatcatgagaacagcaagggggaaatccgcctccatgatccagtcacctcctccaacattggggattacaactcaacatgagatttggtggggacacaaatgcaaaccatatagggactatgagaggagacaagaagtgggaaatgaccattgcagagatatgagatctggaataccttagagagaagagaatccactctactctagtacctgcccaggtgtgttgtttaacactttgtctgggagcaggccacctgcagcttctgaggagggtaggcatgtatccttgtcctccctcttcctcttttggattaaaagccaagccagctgggtgttgggctatttgtgttcatgtgcttggcactgagggttcatgtggtgggatgtagcaaggcaaacattgagcaatgtgtgtgcaaaaggaagtgttgtgcagtgagtgcctgtggctacaagggagagtgggattggctgtggtgttgatgagaagtcagtgatgtgcttttagggactttccacaaagggccttggtataaacatggaggagtgtttccaacctggcttttgtctggtacctaaagattaaagataatggaggggatggagtctaaatatgtgtttcattctgtttaataggcattgtagactcagacagatttgagttttaatctaggcactgctacttattggttatttaattataggaaagttacttaacttttctgagtcttggattcatcatcagtaaactgaatgtaaggttttttttaggattaaatgagataatatggataaaatgcctagcatggtaccagacattcattaggtgcccaaactagtattcaagtttgtttccccttcatttactgtgcttttccagtttgtttactcaacagaatattgagcacttcctgtgtatcagtcactgtgttggggacatcagctggaggagaatgtgctccttgctccta

SEQ ID NO: 98751 - DNA, 4261 bp, Homo sapiens
gctcagctcactgcaacctctgcctcccaggctcaagcgatcctcccacctcagcctccccagtagctgggacttcaggtgcacgccacaatgcctagctaatttttggtagtgacggggttttgccatgttgggcaggttggtcttgaactcctgggctcaagctgggattacaggtgtgagctgcctcacctggactcaaataatctttaatctttcagaattgatttatgagaaggaagatactgagtcctctctctcacttcagatttgctttattcctagccacactggttttgggtgagggaaggtagcccctcatggaaagttgtgggcggtgagacagaaagatgtattttttgttggagagagaggaaagctttctgagtgacagagtggggactcataagcagcttcacagtggtggtggcacctcagtgttttagtccgtaatgaagccagctttgatcctatgagggcagtaggaagatcattgaaaactccctggaaatctggtgttcttctcccagtgccccaaatgacgaccaagactggttgcccaaaaatgctgaagtgggactgtactgcttacctgaggaccactgtagcatggtgtccgttctcctggcactgtaacatttcctatcatttctctccacttcagactgacagacttcaaggatgcagctgctactaccggaggtgtgtggcaccttacctcagcaaggccatgagaccgtgtggccatgatgtgggcccctcatggcctcagcaggaacacagcactatagtattggcctccgccagaaaaacagcttcaagcagagtggtccctcaggcacagtacctgccacgccacctgagaaaccctcggagggcagagtctggcctcaggcccatcagcaagtgaagccaatctggaagctggaaaagaagcaagtggagacactgtcagcagggttgggcccaggcctcttgggcgtcccaccccagccagcatatttcttttgccccagcactttatgtagctctgggaccacggctgtcattgcaggccacagcagttcctgttacctacactctctcccggacttgttcaacagcaccctgctataccgccgctccagctataggcaaaaaccgtaccagcaactggagtctttctgcttgcgttcgagcccgtcagaaaaaagccctttttctctccctcaaaagagcctccctgtcagtctcactgccaacaaggccacttcttccatggtcttctccatggcccagcccatggcctcctcatccacagaaccatacctctgcttggcagcggctggggaaaacccttcagggaagagcctggcctctgccatctcagggaagatcccatctccactctcttcctcctataagcccatgctgaataataattccttcatgtggccaaatagcacgccagtgcctttattgcagaccacacagggcctgaagccagtatcgccacccaagatccagcctgtctcctggcatcattcagggggtactggagactgtgcaccgcagcctgttgaccataaggtgcccaaaagcattggcactgtcccagctgatgccagtgcccatatcgccttgtctaccgctagctcccacgacacatccaccaccagtgttgcctcttcctggtataaccggaataacttagccatgagggcagagccactttcctgtgctctggatgacagctctgattcccaggatccaactaaggagattcggttcactgaggccgtgaggaaattgaccgcaagaggctttgagaagatgccgaggcaaggctgccagcttgaacagtctagtttcctgaaccccagcttccagtggaatgtcctcaacaggagcaggcggtggaaacctcctgcggtaaatcagcagtttcctcaggaggatgctggatcggtcaggcgggtcctccctggtgcctcagataccttggggttggacaatacagtcttctgtaccaagcgtatcagcattcacctccttgcctcacatgccagtgggctcaatcacaaccctgcctgtgaatctgtaattgactcctcagcatttggagaaggcaaagctccaggtcccccttttcctcaaactcttggcatagccaacgtggccacccgcctctcttccatccagctgggccagtctgagaaggagagacctgaggaggccagggagctggactcatctgatagggatattaggtatgttggcaatgtttttggttcatttagagcagtagaatgtatataccataatttggggtggcaccgaccctgtacctctgaaggttggttttattttttagctgccctagaatttttggttttcacttcagggcaagggttgggaaactatagcttgcagaccaaatcttgcttgttgcctgcttttgtaaataaagttttgttggaatgcagccttgtccattcatttgcagttgtctgtggctgctttcttgttacgatggtagagctgagtagttgtgataaaccgactggcctgcaaacaaaaatatttactctctggtcctttagagaaagagttcgccaacccctattttaagtaaaaaccaggagagaaataagaattgtgagcaccaaatgttgaagcctgtgactttcctactttttccaaaccaaatgaggttctcagtcattcttggcatgacagccatttatagttagggcacacacatagttggctccttctgttgtgttttgttattttcctgggaacttggtccactaaggcctttttctgagttcccagagagtggcctagggacatttcaagtcaattaccagatatccattgatggttttttagatgtagaatgttgtacttatatgctatgagggacaccaaagaaaatggaaaacatagtgcctctttgcagaatgggagatgtaaggttgaggagctatgcctagacctaagctttgaagacaaaagaaatgagttgtgaggtccaggcaagaagtagcagattggtaatggagaaggggcaaatactgggagatgatgaaggaatgagaatctaactgtgacctctttgatggagttgactaggctgggggcatgattctttcttttagttcagctactgacctccagccagatcaggctgagactgaagatacagaagaagaactagtagatggtttggaagactgttgtagccgtgatgagaatgaagaggaggagggtgagtaggaaaccctttcacttccaactaggagttggttatgacctgttgggcagggggctgacaattgtgtactaggtccttgactcacattacctacatcagtcatttgctttgggggtcttaagtgggggtagtgccttctagaggacttgggtctctagtcctcctgtcccactggtcttaccttcccgctgcttctgttgaggaaggcagtgcaaagcagcggggtggtgcttgtggctccccaagaagggttgagcccaggatattcaaggaagagttgcctaggcttggtaagtttgtgctgcagcctcttctagtcagaatttctctgttcttccttcctctaggagactcagagtgctcctcattaagtgctgtctcccccagcgaatcggtggccatgatctctaggtaagtgtggctgtatagatcattgttacatgctcatcttttgtctcttaaagattataaagagataaaccactcaagtcattaatggcctggagaactctaatgcatttttaccaaatttttatgtttgcgactttagtttttgaacagggagtaatggggggccagaagcacatctcatctgtggggcttaaaaacagtatcatgggccaggcgcagtggctcacacctgtaaccccagcactttggaagctgaggcaggcggatctcctgaggtcaggagttcgagactagccaagccaacatggcaaaaccctgtctctactaaaaatataaaaattagcaaggtatggtggtgcacacctgtaatcccagctgctcgggaggctgaggcacgagaatcacttgaacctgggaagtggaggttgcagtgagctgagatcgcgctgctgcactccagcctgggtgatggagcaagactttgtctcaaaaacaaaacaacaacaacaacaacagtataatgggctgggcgcagtggcttatgcctgtaatcctaacactttgggagactaagatgggtggatcacttga

SEQ ID NO: 98752 - DNA, 1221 bp, Homo sapiens
ctcacctctgccctcttcctgcactcacccttttcccttttgtagctaaaccatttcccaggctcattccagattgggaggaaggaccggctatggcggaacctgtcacgtatgcagagccgctttggcaagaaggagttcagtttcttcccccagtcctttatcctgccccaggacgccaagctcctgcgcaaagcgtgggagagcagcagccgccaaaagtggattgtgaagccagtgagtgaatcacagtgggcaggagactatggtctgtgagtgggaacaacagagtattggacctggagcaaatctcatctcctttctgctcctagccagcatcagctcgaggcattggcatccaggttattcacaagtggagtcagctccccaagcgaaggcccctcctggtacagaggtgagcctgtagcacatatcccttaccccatcctcccacctccttggcctcgaggttcccttcttacaatgttctgccctttgttctcccagccaaagagcttccttagccaactgttctaaggtctttatcttggggactgttagctggcttttcctgtggcttggttacccactgagccccatcatctggctgtatgagaagctggcctttgtcctatgtaggtatctacacaaaccctacctcatcagcggcagcaagtttgacctgcggatctatgtttatgtcacttcctacgatcctctgcggatttacctcttttcagatggactggtccgctttgccagttgcaagtatgtgacagtggtgaggtatcctctgacaatattggggattttattttccttggagggagggaaactagaagacaccaaacagaaaaatagtttttgttagcaaggggaaaggcaggaaatgggaaatatggaggctctctacttcgttaaatctggggagggtcttcctgcatgcgggactgaggtgggataaaggagatgagtttagctgtggtttttcagaactttgccagtagacacacttctcaggctcttgtggctatgaaaagatctgtgtacttgttctacacctcttcaggatttggggaaatgtttggccccttctccatctgctctgttaccatcttacctctgccttttgtttccttacttccaggtattcgccttccatgaagagccttggcaataagttcatgcacctgaccaactacagtgtcaataaaaagaatg

SEQ ID NO: 98753 - DNA, 1502 bp, Homo sapiens
cggatgtggtggctcacgcctgtaatcctagcactttgggaggccaaggtgggtggatcacctgagttcaggagtacaggaccagcctggccaacatggcgaagccctgcgtctactaaaaatacaaaaattagctgggtgtggtggcaggcgcctacaatcccagctgctcaggaagttgaggcaggagaatcacttgaacctgggggacggaggttgcagtgagctgagatcgcgccacttcactccagcctgtgtgaaagagtgaaactccatctcaaaaaaaaaaaaaaaaaaaaagaattggtctatttgcatccaagttcatctctttcataatttaaactgcgaaaggaagagatatgaagaaaataccattaggtctcttcttcgtttttctttgtctttgtcactcattcctagaatttaattcctaatacttcctcttcctcctctgcagggcactgaaggctttgtggaactacctgagccagaagggagtcaatagcgacgccatctgggagaagataaaggatgttgttgtcaaaactatcatctcgtgagtcacattgccaacctggatgtggggcctgctgctgaccccctcctttctcctgggcctcacactgctgtgctctggactttggccatgctgtggtttggttttaaggacagagaataggaaggagtggccagagttaagttctaatgaacctcatccccaggagctggtcccagatcagaggtgtcacttgagagctacctttcctgggttgcttctgcctgcctatctctgggccactcttttggcaggatagctctgagtagagccctctgggaggagctgaactgagtacttcctcatccccatgaccaggtcagagccctatgtgaccagcctgctcaagatgtatgtgcgacggccctatagctgccatgaactctttggttttgacatcatgctagacgaaaacctcaagccctgggtcctggaagtcaacatttccccaaggtaggtggtattctcaggacactcaccatagaatccttccattattctcacgctcccattgccactccagtaagttgttctttttttttttttttctttgagatggagtctcgctctgtctcccaggctggagtgcagtggcgcaatcttggcttactgcaacctccgcctccggattcaagcagttctcctgcctcagcctcccaagtagctgggactacaggcatgcaccaccacacccagctaattttttgtatttttagtagagacagggtttcactgtattagccaggacggtctcgatctcctgacctcgtgatctgcccacctcggcctcccaaagtgctgggattacagatgtgagccaccacgcccagccagttgttctttttaagtggatccttactgcttgctttcctttagcagatcaaggtcatgggcaggttattcaccgtctttggggcaagagagtcttgtgatggtgatcctg

SEQ ID NO: 98754 - DNA, 2112 bp, Homo sapiens
atttgggacccaaaagcaaacagcttttctttttttttttcttttctttttcttttttttttttttgagatagagtttcactcttgttgcccaggctggagtgcaatggtgcgatctcagctcactgcaacctccgcctcccaggttcaagtgattctcctgcctcagcctcccgagtagctgggattagaggcatgcaccaccatacccagctaattttatattttttagtagagatggggtttctccatgttggtcaggctggtctcaacctcccaacctcaagtgatccgcctgcctcggcctcccgaagtgctgggattacaggcgtgagccaccacgcctggctgcaaccagcttttcttaagagcacggtttcttaatccaggcctgtgatcctctgatgcacagagatttgttggcatgtctgtcattctgggagagtgttaattgtctttaccatgttttctggccccctcttgtccaaactatagacttttaccctttgggtttctttctctgagaggcacagtgagagaccccaggaagctgactttctcagagcagataaggaagctggatttaagcatggcagatacaagactggtgccaaatctgaattgctggatcctcatcttgactttacccaacaaactacttaacctctcagccccagtggctcccctgaccccaaacaagagtgccttcccccactagctaagttcagtagacttaggaacagatgtctttcagagctggcccactaggctgccctcagtagttccatgagagtcccggagctgtaggaccccaggggtgtgctccctgttccccagcttcttgagtctctgcccctggcttacactctctcacaccctttttctccctgttccttggaccacaggacttctatgcatctgtgctggatgtcctgacaccagatgatgttcggattctggttgagatggaagatgagttttctcgccgtggtcagtttgaacgaatttttccttctcatatctcctctcgctatctccgcttttttgagcagccacgatatttcaacattctcaccacccaatgggaacagaaataccatggcaacaagcttaaaggtgatgtgccctccctgccctcagaaagccaagtttagtgagagattaaatcccagtataccaagaaatgggcctctctggaaagaattggccaattgattctaccttcttaaaccccaactcctgctaatcttgtcctaggagtagatctgctccggagttggtgctacaaagggttccacatgggagttgtctctgattctgctccagtggtgagtgctgccagtgtggaggacagctccttctcaggcccctccctcctctgccttatgagtgcagcaggagttgggttggtatgtataggcctctctcacttctccgctaggctctgcttctgtctcaccattctttcctttcaagggaatagttgcctccaggattccctgggtacctttctttcaaggatcaaaaagtgctttgtaggcctcaacttcttgtttgattcagaagagaactgagacttttacccacctgggcccatgcctgaggggtagggaaggggagaaccccatgatccatttagaggtagagctggagggtaccaagaccccaaacactcctgccttgcctccgccaagccttttggtctcattgcttcctttgctcttagtggtctctcccgacatcacttctgactatctcaaaggatgacgtgatactcaatgccttcagcaaatcagagactagcaagctggggtgagtgctgcctgggcaagggaggggctgctggctgtgagtttgtagagttttcttccttcccctcttcccagactgtggcagtgagatcagcattctccagctgggggttggtgggagcgtcaggacatgcagccatagcatcctttttctggtagatcttggtatgcccagggaagctgagctggaggacagaagtgcttcctgaagcagccactgtcagccatacccactagctgtgggaaattgttagccctctacccgcacccccattcactcttgcactgcaggtctcaagcct

SEQ ID NO: 98755 - DNA, 1157 bp, Homo sapiens
ctttcaccctgtccctcctcagagtattttttgaagtggttgcattatagagatgggtatttgtagggccggagggatggtagtgatggggagaaggtgaggaagggtcaccctctgtcacctgtctgcctggctggcacctcatatctcagcagagaagccagtggtggccacgcagccttataaagcaggttttggtttctaccttaagtgagccatgtgtggtttgtctgggggccctggtgtggttgctgagttgtagctcaagaggagaaaacatacagaacatatttggaccggaaatcctttgttctgaatttgagggggtcttctgaggtccttacttccttaggtctttcctcacccctctcccaccgctgtcctgaggagaaacccttgaacttcctcagtagacaggcggagaggccacaacatgccgaacccatttcctgtcatcctagtcttgggtcttcaccgcctccttccaaatacccaccctgccagcagccctaggtcttcctgttctgaccccccatcactgctcgttcagccttctagatgtctctctcgtggacatctgttctttagctgttggctttctctgaggtgtgagagggtctatgaactttgtgaatttcccatggccccagtgaaggagcccagataatcccagtagctgttacctgtctccatgtatcaaaggacacagtccagggggagggtggaaggagatgtggtttctctatagtgcaacaaacatggtttctcaatgttctgctgtgcagcaagcagggtctggcggcttggtaggtgggtttcaggagcagtcactattgtaggatgggcttccaatcaaacctcagactaaactcttgtactgaactgattctacctccctcctctagactcagtaaacagtgactattcaataaatgttgactgagtgaactgtatttacagagatctcaaaggaccccagcacttgaaccagaagttctaattgtctctcatctaggtatgagaaagtggaacctgggaacagcacaagcggaagagttcggatcagaaaggttttctctgaagccgtgctccttcctaaccctgcacttagtggttgctgcttgcctcctccccagcccctgtagtccctttactta

SEQ ID NO: 98756 - DNA, 2561 bp, Homo sapiens
gaaagtggaggagggcagtcactgctgtttactttgcatccactttggaatgatgagaaactcagtttcttagaagaaatagtaatgaagagatggccttgtgtcaggaaaggatcgggaaccttgaatcaggctgaccttgggtttaaatcccagttctgccacttactgtgtgaccttgggcatgtcatctaacttttaagtctccatttctttgtagtatgaatataatacctacagtgcagggttgcgaagatttaaaccaaatgtagtgaaagtacgtaggacatagagggcactttgcatggtcacaccttctccacttgctgtccaagccctgtgccctaggtgggaagagacaggcaagaaacgtaaaaccctctcctccaggaggtggagctgccatcgagatattttagaagtgaagatgccagaacagggtctagatagctcatggccctcaccttcaccccagtgcacacacaaacatcaccattcaccctcctattacattatcactcctctggggatttattctttggttaaacacttcacagtcagagcacagaatccctgagaaaggaagcacattaagcattagaagtatgtgaactgagtgggattattaaattatttcaagagaagctttgaaaagaaggggaaagcaagcacagtgggtgtcaggtggctggaaaggggagaagcagggtacagaaaataagagaacttgattggaactggacccaaagagcagatatatggacctaacagctgtacgaaggggcagttgtcattacaggtaccttctcttggtttcaagctgtttggctgagggtgagtatccccctgtcaccctagccaaagtacatacccagtggcttctggggcagtccagtgctgctgagggccagtgaaggagactgatcatctggacacaaagacctttctacttccttctcagctgaattagttacccaagataggtgaccaacaaaggcagacagggatctcctctcctgggctccccttgatttgtcctctaagattaaggcttacctgtgactgttgttcgaatcccccaactgctgtgagacttggaaacactgatggttttcagatggctaagagagctccatttcttgccacctgagattctgaccaagcctttcacaacccttcttggccttttagagttccccctgtagcagagtttgcccgctcattaatatccggggatctatgccagctcatttggcttgccccttcaccagcgttggatcagtgaaagttgcaagcagtcatatgttgctctcggcaaatgttttacaggtgaaaacacaagaagggtcaatagcaggtggtggttttctaaaacccatctgtgtcataattataatagactgagatacatggaatgccagggactgccacaggcaaagctaacagaattttgaaaagatatttaagtttcagttagtaaactggggacaccaaagcctactcagaatagttatgggactaaaatatggaggaaaagcacctaacaaggtgcctgataatatatgatgcagatttaaagtagtggattctaaaacagaccaaaactaccacccagaacatataaagtaaaagcactataacatgcaatagtgttacaatactattacaatagcgtgttaatattaccaaactatggtaaaatatactttgattttatccataattaaagctgaggatgtattgatagttaacttagaaagattaaagcccccatcattagcagtcagagaagagcagtttaaactgcaagataccacttaacactaaagtggctcaaacttaaaagattgaaaataccaagtgtcagtatgatactgagatattgagaaggtgctgatgggaatgcaaaatgatgcactggaaagcagcttggtagattcttacaaagtgaaacatgtccttaacgtatgacctagcaattccactcttgcaggcaaatgttcatagcagcttattcatagtagcaaaaatttagaaacaaccatatgtccaacaatcagtgaattaacaaattgtgatatctctgttcagtggaatacccttagatataaaaaaggaacagagggccgggcgtggtggctcacgcctataatcccagcactttgggaggccagggcaggtggatcacctgaggtcgggagttttgagaccagcctgaccaacatggagaaacgccatctctactaaaaatacaacattagctgggcatggtggtgcatgcctgtaatcccagctactcgggaggctgaggcaggacaatcccttgaacccaggaggcagaaggttgcggtgagccgagatcgccccattgcactccagcccgggcaacaggagcaacactccgtctcaataaataaataaataggaagagttcaggtgctgtggctcacgcctgtaatcccagcactttgggaggccaaggcaggaggatcacttgagcccaggagttcgagaccagcctgggccaacacagtgggaccctgtttctacaaaacaaataa

SEQ ID NO: 98757 - DNA, 1027 bp, Homo sapiens
ggcttgcagaggatgggcacagattccatctactcaccatggctggcaagggtcccctgttggaaaggccgctgtccctcctatgtggtcaccatcttcccttttcttttccccacaggcttcttcagccctcccaaattgcccttgccctacctgtgctcccagaagccctcgggcatgcccagtgcaccatgggatgatgaaattaaggagaacagctgagtcaagcttggaggtccctgaaccagaggcactaggattaccccagggccatctgtgctccatgcccgcccatccccttgccgcctgactgggtcggatggccccagtgggtttagtcagggcttctggattcctcggtttctgggctacctatggcttcagccttcagctcctgggagtcccagctgttgttcccagcaacgtcgccactgccctcctactctccaggctttgtcatttcaaggctgctgaaatgctgcatttcaggggccaccatggagcagccgttatttatagaactgcctgttggaggtggggagtcctccctccattcttgtccagaaaactccttagctctcgcagtgagccatgttcttagtctccagggatggatggccttgtatatggacccctgagaatgagcaattgagaaaacaaaacaaaaggaacaatccatgaacttagattttattggtttcactcaaaatgctgcagtcatttgacctgaacttgtggcaagagacttgtgctttctaaattcaaagactagaaggaaaatggataaaaatcacaagtgccgtttctcttgcaatgtagcgctattctactgaaatttctttcttctcttttctttacaaaatcataaagaaaaaattaattcattacttatatagtaggtacaactcagcctacaaactctaatctgcaagaagcataactttatttttctaacacagaatgtaatttctattaggaaccccgtttcagcaggtggtagaaattaatctcagtcaattcaaagtct

SEQ ID NO: 98758 - DNA, 1061 bp, Homo sapiens
gcgagggcccgggcttcagtgcgagcgcggcgagcgcaacggcggcggccgggaggcgagggatccggcggcggcgggggggcccatcccgggcgaggagggcgcggcggaggcggagagcggacggggcagccagcgcctgtgtctcctgcggagctcgctcgggagaagaaatcagagccgggggcggaggtgggaggggagcggggccgaggcgggggcggggggcagggggccggagggaggtggcagttgcgacagtcaggcagcgggactctcgggagcgagccgtgcgccccggggcggctggcgcggagcgcagcggagggcgggagcggggtgccggggcggggccccagcgcgcttcgggctgtgggacccgcccgcttcgccccctcgcctcgcctctctcggacttggagccccccgccgctcgcggccgcctggagtcgggggcaaggaagggctgggaagaagagtagagaggggtgaggggggagaaagaggagctgaggaatgggggacgggctggaagggagacgtttgacaggtttgttgactgtaaagagagaaaacttcccaggaatgagggagtttggggcggggggcggtgcggagggagatgctggcgcggaggcaagagaggaagttggcctggggcgcggggtgcttcggcgagggttgtcaaactggaccgcccgacaggcggatgctggaggggtcatctctttccgtgtccctgttcgatgcctcatgccccttcgtcagcctctccttgaagaagggaggaagccctgggcctccgctctcgctcccccagccatcccacctctcaagcccgcgttctagggcggggaggtgggggaaatgagagggcaagagtagccgctccagggcgtgcgcgcaagcgctggcacttgtaagcgagcgggagaatggaggtcgcagactttcaagagatcgaggggtcagaattcgctttagcccggcctcgcgtgtccaagagtccctgcctcgagttcctcccccaacctggcccgggtagaaggggtgggagagcc

SEQ ID NO: 98759 - DNA, 1112 bp, Homo sapiens
aggggcgtggcagggggcattgggcaaaacaccaagcttcgcttccgatctctggtttctgtcaactctgtgtgggctgagccactctgatcaagtcattcccctttgtgggcttcagaaaaactgaggagttagcatgagagactcacgtaccccctataactttggcttttgacaacacatcaagtaataactcccccatccccactcacctttcaccttcctcgctttatgcttccttagggagtgaactctgcttttcaggcctttgggtcagcattggcctaggatcagcccagagaagatgtgctcctttgggagaatttgcatgttttggggcctgaagcacagtggtagtagggaatacacaatatataggatctgggatcctcatcaaacagccattcctgggcatagaaaaaaatgaggctagccctaaaagaaatcagtatgcggacaagaagggacaaggcaatggatggtcattctaaccggcttggcctgcgccaaggtctctctaccaaggaccatggttggtaggatcaattgcctagggaggtggtatcaggggccagccagtccctattggcaatatgtgtagacctaagccctggatgtcctaggtttctggcctaacctacctttccatctcttgagtcagagggccaagaacaatgtcagagatcacccagttcagccccacccacttcaccctcgttatgcagatgagcaagacaggaggcgactgactctggccactggtggagggatccctattgcaagacacagtagatgaatatttcaaacataaacagtgctggagggaaatgggcacgtgagatatcagaagacttccagtggcctcccacaccatcctccacacagccccgtacccctagcaaggttgattaactctgaatctattccagataacatcgctaaaattctggattcagacccaccctaagtcatcaaaatcttagcatctctccaaactcacctcagatcccacttgccctaaggagcctccctgggccccagtccccacagaccttcctccatgcatcacccggggcgcctctcatttgggggcgtctgttatcctgccagtg

SEQ ID NO: 98760 - DNA, 1002 bp, Homo sapiens
ccaggagagggctgcacacaccctagcccaggacccaaggaccttcccctgcccctggggctgctccacgaagagccctgctgtagtccaccctctccctaaacctgcctgggatctgtccaacgccatctcgcccctcccccttctctctctgtgccacggactcgggctcagcagatcctttggggcctctgggtagttgggtgacataggggcactagagcgggtggtggtggaggggacaatccagcacctctaggaacatgcagtttggagggacttctgaccctggttcccatctcccggggctgcctctgcctgagctgagggccacctacctaccccaccccagctgatggaagcgaggatgtgggattctgaggtttgaggaaggtggtgaaccgctgtgcctgggggcttgtccttttcagtcagtctgactgtctcagacgtttttagactgaaagagggaccaagggagtgtcagggagtgacatctcaggatgtcagcagcaccacagagatccgaggagtggatttgaggctccatggtggccctcagcttcccccgcccagattttccacacctcagccttggctccaactccgtgagggcctgcatcttccccagcatgaccaggagcccaggaaccgggacaggaggctggggagggcctagcccctgcgggaggccagaccaaccgttcactgagcaaatgggaaaaccaagaggccgggaaatgacttgcccaaggccatagaagtcgcggggacagaggcggactagaatccgggtttccacctccagaagggtttctgttctgggccacggcccccttcgccacccgctggagccggctcagcccgtattacgacgcagaatggagcctggcagcccagaagctgcgggcagggcaaggcagggcgggtggggccggatgggagccggatctcccctggagcggcgcacagcctctcccacccgtacggttgagatggcgg

SEQ ID NO: 98761 - DNA, 1584 bp, Homo sapiens
gttggaagcaagctgtttgtgctttgtgtgcttctggagagagtagcagctttactcttcactgttatacttgccacccaaaaaagagggtggagagaatgaagatgaaaccttggcttcttgggtaggtcctgaagaattggagagtaaaggagagctttgagaagcaggggctattttggggaggtaggaagacaatacctactgagtaggcaccctttaacatatcatcccatggaatccttccatcagcctcatcaaagtagctgttggtctcctcatttttctggtaagggagcagaggctaaaaggggttagtaacacacctggtaactggcaaagccaggatttaaacccaggaccttctgatgcaaaagccatgctgcctcagtcattgctagagaccgaggagttggctagtgtggtgatgggggacagtgaattacccacaggttactgggtagatttctgtgtctccctgatctggaccttgactggtcactgtattactagataatagtatgctttgggacgccagtgaagagaagttaatacagatgcttctcaacttatgatggggtcgcatcccaataaatccatcctaagttgaaaatagcagaaccaagcgtggtggctcatgcctgtaaccccagcactttgggaggccaaggcgggtggatcacctgaggtcaggagtttgagaccatcctggccaacatggtgcagccccatctctactaaaaatacaaaaattagccaggcgtggtggcaggtgcctgtggtcccagctactcaggaggctgaggcaggagaatcgcttgaacctgggagagagaggttgcagtgagcggagactgtaccactgcactccagcctgggagacagagcaagacttaatctcaaaaaaaaaaaaaaaaagcaaagaaagaaaatatcctgagttgaaagtgcgtttttgacttatgagactatccagagatagccccatcataggtcaaggagtgtattgaatgcctgtcactttcacatcatcagtaaaatagaaaaatcctaagtcaggaaccatctgtaattagatcagacctagtttctctatgtactttatcattagggcacttcttgagtccacttagcactcattggagtagggccaggcaagagaagtctcaatgtgccttgcaaagggaaggaacagacatttcttgggcacttactcgattctctcatttaatcctttcacacattctgtgatgtaaatgttgttagtcttgatccctcagtgcctgactcccaatgtctctctcctttccctcctctctctctcaaaataaaccgttaagtatgatggctttcccacagtgtcacagctagcaaatagaagaccaccttaggtacaaatccacatctttgagaccttaaggccagaacttaaagtgtatttcttttttttttttctagtaattttttttctaattcctgaatagccttgcttcttcctctttgagtgagaacctactttggactttcttttttaaacctttatactatcctcgcatgttgggttcatctttccttctgactctc

SEQ ID NO: 98762 - DNA, 1810 bp, Homo sapiens
gaaaatctgtggtatgccttttatgtgttaggtggaaaaagagaaccactatcttaggcagtctgacagggcctgtttcctcctggcctgtgaattgcaggcagtcctgagggctaggaggagatttgatgtttttctctcctttctcacctttgcctacctcatatatactcccaacccacgcctccttgcccctcccctttcctttattctctgccagacaccagcccgcctccagcacgcagagtctgcctgcattgtgaatggttgtagttgggacacagagagcccttgatgcagcaagtgcttcttgtgacatcagctctgtggctttagggggaaggctgtggctctgggtccccaagggagggggctgtttttctcttcttgatccttcacgttggtgcccgtctgacttataaactttaatggccagttttaaaggttactgccatggggcacctttgttgccagttttagttttttaatttggaaactttttttttatcctttgtggtcttgggaggaaagatttgggaccatttggggctgggaattggtatttgtgagtgatgatgagatagcacagcagcattctggttctggctccaataaccagaatccctggcatattatccagttgcccaaatgaaccccaaaatgagaaggaaaagactggcattgagatgtgtagtcttaggcagcatcagtcaaggatgtagagggttgggggcttgttgttctgtctgagaatggtaaccatagtttaggtgctggggcactggaaaaagaaagagatatctcactcttattctaagtctcttaactcttctttcatctctagtcccaatcctttgttctgaatatagatgtcattgacagtggttaagtttaattgggatgggaacaagggttcagatgtagaatacacaggggaatgtggcccatggtggtttccccactgtagcacaggtatagaactaacagagtaagcttcactgagtctttttgccattaactcttataccttagaaaaacctttttttttttccacccaggataacttcacaaagcctcatatgccaaaaaagggtcattgcccatctcagtaatctgtatctctagggggaaaacagtattatagaataatactcaaataatagcatcttggaatcagaagggattatttatagcactctcataaaactatcttattcaggtcctctgtctgaaactaagaatatgtggaacttaaaatgtatttggtaagtgctagaaaagaatttttagaagtttagttctgagcgtgcctcctgcctgggtacttttttgtggatgactagagtagtaacacaaataaatggacagataatctaacaaatagaccctaggaaaaggcaaacacatgaatccaagggtgcttagatgcttgctcaaagacataggctctttacttaactgttggctggtgtccttgatagccaaaacctatctttcactctctagcatttggatggattagactgaactcaggattcaactctggatgaacttagagaattcaggaaaggaggctgctgtggaaggacggacactcagctcttcaagatgtgtggaaggagggcagagccttctgacagttttgatactgttcacaaggcatataatacagggtcttggattcagatctcactcctggctgttcttcctgggctggacaaagctagattttcttcttgttccctgtgttacagggcaggggaggaggtgtgggggttggctcggggctgggccacaattagtgacctgg

SEQ ID NO: 98763 - DNA, 1748 bp, Homo sapiens
agtgaagaccataggaatggtacagcagcataatatatctaagtcattgctttttgggtgatactgcgttcattagtgtttgatgacaaacactagatcatgtcctctcggtgctaaattcgaatttctgtgccaaaccaagaaagccaaaacagtgtgatatagtaatttcaaaatatgtggactctattaagtagagaaagggtttgttgagtatttgtctttctcaaatcggccagactcttggagaaggaacgtcacaaagagctgtaggactggatataaaaatcctatgagaatgttctggctagttagggtccaaggaaacaggagaagattggagcactggatttctccagtgtgctccacaggaatactctctttaatagaaattatggtttctcttctcttagattaaattcctttaggatttatggtgaattaaggaaggtagcttgaggtccactcaattcaaagatctgttctactcagttgtcatgaaaggacagcaggtggcgccaaaacattgtcctacttgtgctgggccaggggcagggtggcggggaggactcaggtttgtgagggggagggattctcttctgaaatagggatgggggagtgggggattggttaccctggctgttgctcaggtaagaaattattgtgggcttaatgtcttctagctccccatcactggaatctctacccttaacgtcttgatttgacaggaaggttgatggggagagggggatcccagcaatccagagtggaagacagttcactttctgtccctggcaagactcctttagggccaattccaccagatgccatagtttctacactattgtctcattctgtgagcctctttttcttttctgtgaatttgtttctgtcttttgacagatttccatcttgaaatacttttcttgcttcaggacacttctttacagataggtttctttttttcacttgcccccaactcttatttctccgggagactgggagtggggttaagggagtgaggcatggagaacatcggctcctcgactaatttaaactgcaggtactggttgggatgcagaggaagacagggaaagtggtttgttagaggtttgttggtcctgagaaggaagcagagcactgtcaagactgtgggacaccaaagcagatggttcaagtccccccaggatctgctgaaactcagagtctgccctttagcatctgtctgtgtgctggagcgggccccagctcccaccagccgccattgattcccacagctcagtcattagctctcttccagcattgtctctgacgcccctaatttccccactcccttcataagcccgccgggctgtctccagccttcattccttcagcttgttccttgggcctcccccttccctggggcgggtttaagggctgggcggagctgtccgcctgaatcccctgtggcccctttggttcctggttctatatatatccctgtccttctctgcacagggtttgatacggctttatgggcatttccatccgctttacagacacagccatcacagaggcgtgtttcacccgagaaacctcagcggagcctggcctgtagcagactcagtctggccccctgaatcaaggctctcttctcttcctgccctccctgtccctccccctccatcttcccactgcctacccccaagtgaataacggagctctggggagcactcagtctccttggcagagcattttggacccca

SEQ ID NO: 98764 - DNA, 1346 bp, Homo sapiens
ttcaaaacggtcagatatgctggatggtgagaactcaaatttagctccagaatggaaccttttaaagcttacattccactcattctttcaactgatgcccgctttcctctgcttcccagccttttcaggcctaggctccacagttttgctgatatcaattctttattcctcttccctactcctcccagttcctcacctctttctttgttaaccaggaagaagtcagagacggactgttgtagagggagtgaacagtaagccatgctgatctaggttgatgacagctggcctgatgtcccaggctgaagtctttgaggtttacccagggtggcgaatgctgggggctgccattgctagggttattgctaacaatttcgattcctcctatttccttctccctctctctacctctgcccccaccgccaggattctataaatactttattatatggcactaataaaacttcaagtatttctttttattagagctacataatatggtaattgtgtgacagaacacagcgcctgagagtagcccccaccctcttcctaggtgtggcctctcaccacctcagcttgggctaggcctacaggcctctctgttcctcttgagtgtgggtaaagggggtcggatcagcttttcaggcagagctaaggggtgaaggcctttgagtaggatcaggctagaggagtaaagacgcacttttctagttttaaatgtagtctgtcttggtggatgagtacagcaggaatcttattagcattaattccagccactgcatggggttacttaacctgcctttccttttaatagttctgtcatgtgacatagaagtagattttgaacttagacccagggctaggcgtacatgggtttctttggttaactttgattcacagtactttttgttttgttgtttttgtttgtttttaataatgatcatcattctttctgatgtttcctgggttgaggatctgtaggtggaaaaagattctgactccttctgtctctcactgcatcagtcgtagaatagctttccgcttaagtctcagtcattgttttctgtgtccactagtctcatgggagggtatggggctggaaactccagtctatagaactttacttactgttaatgtgtgatctacaaaatatgtctttgttgcctaattgagccttgtaatttgattctggtttttgtcctatgtgatctgactgtcaacctttcctacccctctactgtagctattgaactaggtcagtgtatccctaccagtgtttttctgaattgagtatgatttagcctctacatcctaacttctccaaagcttgagaattggggattcct

SEQ ID NO: 98765 - DNA, 1020 bp, Homo sapiens
gccgttccctctggaaacccccttccaccttttcacttgggtaactcctgttcattgtttggatttcagtgaatatgttacttcctctagggaattctccctggccctctgagttcagtttacttgcccttcttatatgctattctgtttgctctatcgtaggccatatcaacactgtactataattactggtttttctggctcctcctactaggtggtaagttccccaagggcagggatatgatgtcttgtttaacttgtctgatccattgtaaacactcagtgaatgtttgtactactatgaattctgcagagaacttttgcctttttgatttcatttgattcgcataactgcctggtaaaatgagcaggcttccttgggtaaagttcaacacaaatatattgatcacctactcagataaaaagaagaccaaattgacataattattattttgaggatttgtttgtttgttttgaaagcccactagggccacttaaggatgaggaggtacgatgggttggctcagagaaattgaacggcctcgagttgcacaagtaataggtagaaaacagaaccttgtcctttgactttctagtgcagagcttttccccattatcccatgctatcttagaggctttgttgtaatgaaatatatttgaaaagggagaaaactcagtaaatagcgttcctgtaactcatcctaaaatctgcccattgaaccacaggttctgaaattacagaaaaatggcaaagtcccaaagtggaatatcattacacagaaggtcaaggaaaaatgttaggaccatgaaacatggaaatgagctaagacacagttggagggaatcctctatcttggagaaggatctaagaaacagtgacattttcagctgccaaaatattttccttggggctaccctcagaacagaatagccaagtgggatgagagcagaactggggggatacttgctggcactcttccaactctagcaattcctcagccacggaacaagtaaggcaga

SEQ ID NO: 98766 - DNA, 1068 bp, Homo sapiens
aaagagtaagctcccttgattaatcagagagggaggaaggtttgctggtccccaaggttcttgatttatcagagtaaagtcataggtgggacttgctagtcccacttctcagagctcttggagaaaatgtcccaaagtctttcatcttagattagatggcaccttcatgtgagtctgagagttgagactcttactctgtttatacctccaagaactaggctcccaggtgttggatttttgatctttggttctaaacttcctagctaactccttggaagtttagttttgacattctgcatcatgcataggtgcactgttttacatattttagtcttgatgataactggattcttgaagttgaggatctaatgcaatcaagtaagtctgtttaggtaaaaatagttgctcagaatattctattgaagcctcaaatattgttcttcttgggcacttggttagatgatgatcttcttggatttagtttggtacagcataccatggcctttgttagagtggtattccaagacttaattttacctacaactctagggaaggggccaaaagcctttgcttttagaccaaaccatatgggggatagaaagtaggctataggaagtgcattggaagagttgtatggactaggtactgggtcattgggggtgaagttcttgaagggtgacctaggctggcagctacctatggccccacagtggccctcgaactgaggaagtggtggaaaaggaaaagcaaacaggggttgtggtcaggattctggctggccggtcattggccaggactctcctatttgtgtgtcaggggtggttgggcttctcctgaggccgggcaagaacgtgtcaaggagaggcttcttgcagctcttgttttcccaaaacaaaggaagctccttgcattgctggaagtcgcgtgcttggatgctgagtttgttattgcctgataacctggccgccaactcctgccctcctcttcaccccatgcagtcagtggcttggtgggagcagcttcctgttcctcatccgaggtagcagattcactatctattgtacccag

SEQ ID NO: 98767 - DNA, 1048 bp, Homo sapiens
tgactaagagagatttcttaggccgtttttctcttagatagcttcccctgtctataagtttaggtatcaaggctggggataacatgctggttccctgcctcatccccttagttaaacaatgcaaggcttgttcttagctcagtagagaggtctcttcctgatctagtgcctgcatacctctccagcttgacttcttgacatttttctctgtgtactttatgccttagctatatggaatgacttttaatttgccccaatgctgtttcatcttgtctttagatacacattcttcccatgatctagaatgtccaatgttctggccttatctaacttgcaaacttctattaatcttctagatgtcagcttcaccttgtttgggagaccgttctgtactctgcttgtaaagactattcttcttccctgctactatagtaccttggattatacctctgttttaccacttataacattgtaatattactgtttgtatgcctgcaagactatggctttctcctccactgatctgtggactctttgaggcaaggaccatgctgaatgcatttctatatccccagcactgtgcgtggtgcctacaggtagtaagtcttcaataagtttggattaatattttgataagtctatgctagggggattttatacagattatgacactgtggcctgtggatacagtgttgcttttttttggctggagtgcagtggggtgatctcggctcactgtaatctctgcctcccgggttcaagagattcttgtgcctcagcctcctgagtagctgggattacaggtatgcaccaccacacctggctaatttttgtagttttagtagagacagggttttaccatgttggccaggctggttttgaatgcctggcctcatgtggtccgcccaccttggcctttcaaagtgctgagattacaggcgtgagccactgcacctggctcagtgttgcttattagacctatatttggggtcttcagttattctcatggctcattttgcagctttggataaatcacttctcatttata

SEQ ID NO: 98768 - DNA, 1047 bp, Homo sapiens
ctcccactactttttgcccacatgctctcagcccttcttctcccactgaactaggtgtctctgcatgatgcaccttcctcctctttcctaagtagccctgttctgttccctttccatcaggtaagaaactcatcctgtatgactcatatttcttttttctgatccttcttattacagatcgattgaagacagaaccatttgaagaaaattccttcttggaacaatttatgatagaggtaaggtatttgtcattttcttgtgtgtctttgccctacttcctctttccaggtgcctgagtggccatttgtgttttgggtgttaggtggcttgtgtggttggaatgccctttgtctgaaaaagttgcccatagaaagtctgataaggcttgagatgtacttagggaagatgagggaaaaaacggggaaagaacgtaagaggcggaagtggactgattgatatttataaaacatctctgttaaagtaccagggatttcatttggaattctctaaccttggaaaggttggttgaccagttattaaatttttgcttgttgagatctggtcgtaaggtctggactgtggaggagaagggtaggcgtcattacttgtctaggccctttcaggatcctgcaggagaggaaggtaaaaagcttagggctaccatttgggggctgtcttgtgggcacagtaggttgtggaaaatcacagtgtttatacaaggggactggcaaaggaatgaatggggagtagataattgtggcctgtcagaagctcctgcctaggtttcccttctaaggattgagctcagccaaaagaaacatctattaaatgccaaatagggaaagtattaataatagtgacctttgataatgccagtcaatattgatcttctccttccctccctcttctgtgacttgttggttgtacagttagtaccttagtattattgccccattttcttttttttttttttatttttttttgagatggagtttcactcttgttgtccaggctggagtgcaatggtgcgatctcggctcacagcaa

SEQ ID NO: 98769 - DNA, 1032 bp, Homo sapiens
tgggagtttctgagaacctggaggagcaaagcttgattcagatcctgtctgcctcgctgggtccttggcaggtcccctgtcctcctgggtgggagcttatggggtggtggggcagaaggactgaaggtaattcactcctagatcgcagtggctggctgcttggccaggacagtgatgccgccagggagagcttccgcttggtgaccagggacatgtcccagatggacatagaagcccctctctgcctccctgggattttttagacttttacttttgatttccctaggatggaagagtataggtgggagataagggaagtggggtgagaggagaaaggaaatgttggcatgggcctgtgtgatgtccctgaggcagaagagccggggactgatgggttcaggtgggagctgctgggtgaggcagggaacccttttcactcccattccttagctttagtctaatggagccaaggactgctgggaccttcaaccctgatcttttgtcttccagtcttctcttagtgtcctgctcctaggtttccctctcttctggttcttctcccaggtattctcttcccaggcctctctggccactgctttgtatcagggtttttcacgcttttgtagaactgaggtttcaataaacagtttcagttgcatggcctggacttttccttctgcggcagcccttgaagatttttcctccctgtatctgccttccaagcctccctgcttcctgatcctgtcatctcacaaactgttttctcagcctcatctcaggactttcctatcgtttgataggcataggcttccatttccaactttgttcctgctcccaggaccctgggccctagcactgctcaacttgggatgccatgggacacacatggtgactgtcctgtccctgagttggccttgtctgtcacttgttctgggtaagcactctccttgtggatcccaaagcacatctcgtggagaggggccaggccttgtaaccagcagagccttgtgagctcctgagggcaagccacga

SEQ ID NO: 98770 - DNA, 1026 bp, Homo sapiens
tctgggtttaacaggcttcccagtgtttcctggtgggtcctgagtggtatgagggtgccactgggctggctgcaggacagttgcatactcttgtcatttctccacttcccccagtgtggctgagcagcagggacggtggcgaggctggtacacctacacagacctgtgtgtgctgctggagcagccgacctggcagttggccctgggctccctctgccagcggctggtaaaggtgaggaggggctcggaaggatagggagcttgagcaggccggtgtgtagggtgggatggtgtgaagtgattgctgaaaagcccaggagatggggttgggaatagatgggcagagtggggtgtaaatggctatagagacctccaactggaacacagatttctagagacaaggggtgaatgtgttaaagacagattccttctttcttatctcctctcctgcagctgtcttgcctgttagctgtggcatatgtgagcagtgtggccctggctgtggcatcggtggccgtaatacatcagtctttggggctgtcctgcatccctacacctgggccgcctgaccttggactgacctcccgttgcctcctggagccctgcataccttctgtgccacaatgcctgccgtctctcgctaatgtctccagctgcctggaaggcagcatggggctgcggtcactctggggcagtcttctggcctcactgactcctccaccattgcctcccccagacccccctgcccctcccactcttcttcataactgccacctttgccagaagctccagagagactccccaacctgccatgcctgcctccaccccaaccgtacagtccccactgcgctgtccagcccctggtaccatacctatggcctggctcccccctggccttggagcccggtgctcctttcacttcctcagcctcagcaatgttcccttttcagtgtcatggagctggctcgcctcaagtctttcgttttcccaggctaggtagggctgtgaggaatgcattaagagggt

SEQ ID NO: 98771 - DNA, 1048 bp, Homo sapiens
actgaggactttgagttgctggatcagggggagctggagcagctgaatgcagagctgggcttggagccagagacaccgccaaaaccccctgatgctccacccctggggcccgacatccattctctggtacagtcagaccaagaagctcaggccgtggcagagccatgagccagccgttgaggaaggagctgcaggcacagtagggcttcctggctaggagtgttgctgtttcctcctttgcctaccactctggggtggggcagtgtgtggggaagctggctgtcggatggtagctattccaccctctgcctgcctgcctgcctgctgtcctgggcatggtgcagtacctgtgcctaggattggttttaaatttgtaaataattttccatttgggttagtggatgtgaacagggctagggaagtccttcccacagcctgcgcttgcctccctgcctcatctctattctcattccactatgccccaagccctggtggtctggccctttctttttcctcctatcctcagggacctgtgctgctctgccctcatgtcccacttggttgtttagttgaggcactttataatttttctcttgtcttgtgttcctttctgctttatttccctgctgtgtcctgtccttagcagctcaaccccatcctttgccagctcctcctatcccgtgggcactggccaagctttagggaggctcctggtctgggaagtaaagagtaaacctggggcagtgggtcaggccagtagttacactcttaggtcactgtagtctgtgtaaccttcactgcatccttgccccattcagcccggcctttcatgatgcaggagagcagggatcccgcagtacatggcgccagcactggagttggtgagcatgtgctctctcttgagattaggagcttccttactgctcctctgggtgatccaagtgtagtgggaccccctactagggtcaggaagtggacactaacatctgtgcaggtgttgacttgaaaaataaagtgttgattggctagaactgctgcctccctgact

SEQ ID NO: 98772 - DNA, 1925 bp, Homo sapiens
cgtggaggtttccagctcggcctggtcgtcagatttcccgccctgggcacgtgaccaagccggctctgcttctctaatttgcattcgttgcctgcaccattccccccgctcccccctcggagacatttggccaatgggagccgtgggtaggggctgtgggcggggctacagccgtggagcgcggtgcgagtccaacaccgagcattcccgtgggcctgcagttggcaggagggtcccgggcccagagccagcggggccgtgctgagacggcgtacgtgccctgcgtgagtgcgtggcggcggcgcgtgcgctaggggagtgggcggtgaggcctggtccacgtgcgtcccttcccgggacccccgcagcttggcgcccagcggctacgtgagccaaggcacccggatgtccgcgcccctctccgagtgaccagtcccggcctccggtcccgcagtgcccgcagcctcggccggcgtccacgcattgccatggtgactgtgggcaactactgcgaggccgaagggcccgtgggtccggcctggatgcaggatggcctgagtccctgcttcttcttcacgctcgtgccctcgacgcggatggctctggggactctggccttggtgctggctcttccctgcagacgccgggagcggcccgctggtgctgattcgctgtcttggggggccggccctcgcatctctccctacgtgctgcagctgcttctggccacacttcaggcggcgctgcccctggccggcctggctggccgggtgggcactgcccggggggccccactgccaagctatctacttctggcctccgtgctggagagtctggccggcgcctgtggcctgtggctgcttgtcgtggagcggagccaggcacggcagcgtctggcaatgggcatctggatcaagttcaggcacagccctggtctcctgctcctctggactgtggcgtttgcagctgagaacttggccctggtgtcttggaacagcccacagtggtggtgggcaagggcagacttgggccagcaggtgagggactctgtgggaagggggaagcctctgctggccgggcttgggagaaagcactgcatgtccagtcacactgcttccaggctttaggatgcctctaagcaaagggagaagggaggggctgagtcctgccgggagctgatagccagctggtggggtgtgtctttgctgagtcactgtggttttgcttttttttttttttttaagcctgtaagtgctgaatgtgttcatgacaccagtccccggccctattataagtagtaatacaatgaaattttatcctcaatgatactctctccacttatatttcattctaggttcagtttagcctgtgggtgctgcggtatgtggtctctggagggctgtttgtcctgggtctctgggcccctggacttcgtccccagtcctatacattgcaggttcatgaagaggaccaagatgtggaaaggagccaggtacacctcagtttctttttttttttggagacggagtcttgctctgtcaccaggctggagtgcagtggcgtgatctcagctcactgcaacctccacctcccgggttcaagcgattctcctgcctcagcctcctgagtagctgggactacaggtgcatgacaccacacccagctaagttttgtatttttagtagagacagggtttcacagcattggccaggatggtctcgatctcttgacctcgtgatccgcctgcctcagcctcccaaagtgctaggattacaggcgtgagccactgcgcctggcctctttttgtttttaagacggaatcttgctccgtcacccaggctggagtgtagtggcgcgatctcagctcactgcaccctctgcctcctgggttcaaacaattctcgtgcctcagcctcccaagtagc

SEQ ID NO: 98773 - DNA, 1708 bp, Homo sapiens
cagcaactcatactccagaactgactcaggcttggtctagcaaaaatacttcaggatagcagcgtctctgccaagactccttcctcgagggccacctctcctccccttctttttccccaccaggattcaggaaaatggctcccttatcaccatcctggtcattgctggtgtcttctggatccaccggcttatcaagttcatctataacatttgctgctactgggagatccactccttctacctgcacgctctgcgcatccctatggtaagactgggaagttgggcagttagcccatagtctaagacgtattgggaggtgtgggtgtattcctgggcatcagttatccttatctgtcattgacaaatcaggaactgtctcttaagctcacaacccctgaatctcacttctaatatagggcaaaggggtcgaggcaacaaccccaccttccgtaccttgtctcttccccaccccaccccgcagtctgcccttccgtattgcacgtggcaagaagtgcaggcccggatcgtgcagacgcagaaggagcaccagatctgcatccacaaacgtgagctgacagaactggacatctaccaccgcatcctccgtttccagaactacatggtggcactggttaacaaatccctcctgcctctgcgcttccgcctgcctggcctcggggaagctgtcttcttcacccgtggtctcaagtacaactttgagctgatcctcttctggggacctggctctctgtttctcaatgaatggagcctcaaggccgagtacaaacgtggggggcaacggctagagctggcccagcgcctcagcaaccgcatcctgtggattggcatcgctaacttcctgctgtgccccctcatcctcatatggcaaatcctctatgccttcttcagctatgctgaggtgctgaagcgggagccgggggccctgggagcacgctgctggtcactctatggccgctgctacctccgccacttcaacgagctggagcacgagctgcagtcccgcctcaaccgtggctacaagcccgcctccaagtacatgaattgcttcttgtcacctcttttgacactgctggccaagaatggagccttcttcgctggctccatcctggctgtgcttattgccctcaccatttatgacgaagatgtgttggctgtggaacatgtgctgaccaccgtcacactcctgggggtcaccgtgaccgtgtgcaggtgggccagggccacaggcgggagcaagccggctagcattcctgggaaaggcatacatctcaccatgatcctgatcccactaggtcctttatcccggaccagcacatggtgttctgccctgagcagctgctccgcgtgatcctcgctcacatccactacatgcctgaccactggcagggtaatgcccaccgctcgcagacccgggacgagtttgcccagctcttccagtacaaggcagtgagtggagttggagttagggcctgctagagactggctggtagctcggtggtgagggctgggctccctcctgctcgcttgtgaccttggtcccgcccttttaggtgttcattttggaagagttgctgagccccattgtcacacccctcatcctcatcttctgcctgcgcccacgggccctggagattatagacttcttccgaaacttcaccgtggaggtcgttggtgtgggagatacctg

SEQ ID NO: 98774 - DNA, 1272 bp, Homo sapiens
ccccgccggcggcgccccttcctccgttacccgccgcgagctcacttagggctccgcaggcacccctgggcaaggccagacacggggcctgggattccaataaccggtctcacgtcttacctcaggaacagcgacccgggtgattccagaggctccgccggctccgctcggctcggctcggctcggcgcgacccgcggcgctaggccgggtgtctgccactcactgtcacccgcagccaggctggccaataagcacggggggcggagacacaacggccaattctcggcttcagggacgggactaaagtctcgaggcgggtcttggacagtcagcggcccaatagtgtgctctacgtggggcggggctcaggtgcggacgccgccggttgtcctcttcgctgctccgtagtgacggggattgttgtgttgcagaaatccggcaatcgacctgaggacttgcgagccgctcagctcccgggacgtttggtgcgtcttctaagggcgtgggcgagtttacgcgggccagttgttgctggtcgcatgggtaacgaagaaagttcggctaggcaagctcagtgatttttaactctgttggactcgatttgggagccgaatgcctatttcattcttttgtgggctgagactgggggtttgagaaagtggacgggggccaaggtattcatctcacagttggtagcaggatgagagacgagaagtcttgcggtgcaggagaaaccaagtcaggcaggcaggagacgcagcagtaggatctcgtttgcaggagccctgtttcttacacgctttctactccaggagctgctgctaaataatttctgctcagccatgtcgccggctccagatgcagccccggctcctgcgtcgatctccctgtttgacctcagcgcggatgctccggtctttcagggcctgagcctggtgagccacgcgcctggggaggctctggcccgggctccgcgtacttcctgttcaggtatcctggaaggtttcgtgtgaaacgtgacagggctccttacagcgtattgcccgttcagggaacacattcttattggtattcccgagcttaggaggccaattgatttatctttctgcttgattaaattcacttaatctctgggtaatgtccagcacagcccttgttttcaaacaagtctttttgccattgcatgtatctcctcacgttaacaccattcccttcaaaaacactttaaactttgtagagataaaattctcagatgtattccacatttaacc

SEQ ID NO: 98775 - DNA, 1051 bp, Homo sapiens
tcaaccttagctgaggagaagctagcgcaggtttctctcaatgcagatgtagctgggctgcagtccaaggcttagaaaatcctctggatataccaatgagaatggaggcttaggttggagagaacaggaaggtctagggaattgggatctggagcaaaggctcaccatagacatgcaaagtggtcagcttatggagcacacgctgtagctcttggaaggtgggtctgcgggtggcgagggggatatcccaaagtcggggatcccccctttgcaggggtgctcccttgcctccaaagaacaaagaccggccagagcggggagcacgcaacagtattgtaccagcctcctccagcgccttagcccagcttggccctgccagcaggtcacgaacatcctagagaagagagtaactcagtcctgcataccttcacttgctatttataaatctccaactaaaaaaaatggcccacagaagtgcaaggggtggaaagtagaggataacacggagaaagaatagaggactaaggctcctggggaatccctcatctacctttgtctacctataatgaaaattggaaggatatgagtcaaaaacctccctacttaacagtgagttgaacagagatgcaaaaaaagtatggatcagtaccaccagatctaaaaggcttaactcaccttatatagtgtggcttcattgtagcgcctcaggttggctccagcagagtgtgatggcccacctcgggcatcccgaagcccctgggctgtgccccgcttggcccgaaccgtatagcggtgaaaagttttgtgtgtcaccacttctcttctgtagacagcacagactcagtactggagaccagctggtgctccctggctaacaggatccactccatccttacccccatgcagcaccctctcacccttgaaatatagcaccagcaaagtgcccagctgcagccatgagcaccacgcagtctctgggacctctactttgcaggttctgtagcagcagttctgcctcttctgggggatccttgatgacagagaagcatca

SEQ ID NO: 98776 - DNA, 1240 bp, Homo sapiens
tactccctagatggatttcacatgtcaggtttttccctaggttcagggtcggagggagaagatggctttcaggtagagttggagctagtggagttgactgtggggactctggatctttgtgagtctgaagtattgcccaagcggaggaggagaaaaaggaataagaaggagaaaagccgagaccaggaggctggggcacatcggactcttctccagcaaactcaagaagaggagccttccacacagtcatcccaggcagttgctgcccccttgggccctttgctggatgaggccaaagcccctggtcagccagagctctggaatgcactgcttgctgcttgccgagctggagatgttggagtgctaaagctgcagctagctcccagccctgcagaccctagagttctgtctctgctcagtgcccccttgggctccggtggctttactctcctgcatgcagcagctgcagctggaagaggctcagtggttcgtctgctgctggaagcaggtgctgaccccactgtgcagtgagtaaaggtccccatcctgagtcattttgggtatagagaggataatttggaggttaaagttggcattggctacttggcaatattcccttggtctggttgggtgatgttgggaaaggcaggaggcaagttaaacccatttttggagtttttgcacctagggactctcgggcccggccaccttatactgttgcggctgacaaatcaacacgtaatgagttccgaaggttcatggagaagaatccagatgcctacgattacaacaaggctcaggtcatctggaataggaaggacaagcagagtgggaaggcatcacagatcctggctagatcctttctacttcttgcagttttaccaaagataacttatagggtcttatatttgaaatcctccaggtgccaggaccattgacaccagaaatggaggcacggcaggctacacggaaaagggagcagaaggcagcccggcggcaacgggaggaacagcagcagaggcagcaggagcaggaggagcgtgaacgagaagagcagcggcgatttgccgccctcagtgaccgagagaaggtgaggctggaggttctcttgtccatggcaaggcttcctagaggtctaaccccttccccagcgtgcagctgtcacctcttgggtgccctactcgccactggggccttgtccttaacacaacttgtctccctcagagagctctggctgcag

SEQ ID NO: 98777 - DNA, 1018 bp, Homo sapiens
cccctttggcccacagtgggttcagctatgtggacctagtggaagggttacatgatggacacttctacgccctgaagcgaatcctgtgtcacgagcagcaggaccgggaggaggcccagcgagaagccgacatgcatcgcctcttcaatcaccccaacatccttcgcctcgtggcttactgtctgagggaacggggtgctaagcatgaggcctggctgctgctaccattcttcaaggtcagaaagactcctggttatggagggggttgcagcagagccacctactcaagggctgtgtgagcagtccagcatgttaggaagcagggaccatgtcctgggtttggccactttagattttgagtttgaggtgtgtatcatgaaagggctgataggctttgacatagggaagggatcaggcctaaggagcagaggctccaaaaacatctccaactgtagggaaacttgtgttgcagagaggtacgctgtggaatgagatagaaaggctgaaggacaaaggcaacttcctgaccgaggatcaaatcctttggctgctgctggggatctgcagaggccttgaggccattcatgccaagggttatgcccacaggtcagtgggaggaccctgtgtgcttgctggggcccagaggaagagcctcaccaggagacatgggaggtctctgttctcccaagaaacagcctgtatgattcttttgcttgctgggattccagccttcctgtccagagatgctcataggtcacttctacttctctacagagacttgaagcccaccaatatattgcttggagatgaggggcagccagttttaatggacttgggttccatgaatcaagcatgcatccatgtggagggctcccgccaggctctgaccctgcaggtaaaagagtctccaggttccttttctcacctgttccccattcccaccccttctggtgcatgtcccagtttggtcacatgaccatgacctgtgccccacttttgagctctgggatcactgttc

SEQ ID NO: 98778 - DNA, 1745 bp, Homo sapiens
caatgtggacctgacagagttccagaccaacctggtgccctaccctcgcatccacttccccctggccacctatgcaccagtcatctctgcagaaaaggcataccacgagcagctgtcggtggcagagatcaccaatgcctgctttgagcctgccaaccagatggtaaagtgtgatccccggcacggcaagtacatggcctgctgcctgctgtaccgtggagatgtggtgcccaaggatgtcaacgctgccattgccgccatcaagaccaagcgcagcattcagtttgtggactggtgccccacaggcttcaaggttggtatcaactaccagcctcccactgtggtgcctgggggtgacctggccaaggtgcagcgtgccgtgtgcatgctgagcaacacgaccgccatcgccgaggcctgggcccgcctggaccacaagttcgacctgatgtatgccaagagggcgtttgtgcactggtatgtgggtgagggcatggaggagggtgagttctccgaggcccgtgaggatatggctgccctggagaaggattatgaggaggtgggcatcgactcctatgaggacgaggatgagggagaagaataaagcagctgcctggagcctattcactatgtttattgcaaaatcctttcgaaataaacagtttccttgcacggtttcttgttccctctgagtgcttgagcttctgctgccttccccttcatgctgctgctgctctgtttgctgttcatgacccttatcccttccatcgctgaaggtgagacctgcaaaggggttcttgccaggcccaggaagcataaccccagggactttaaattgaagtcctagggttactcagtatagggaggaaatgaggaccaaaatccaggcacaaactgttgaaggatgagtcttcagctcctttccaagtaggagtataatccagtggtttctgtctttgaaagttagactgctaccctgttcttcctgctgcctctacatttaccaactctggaagcaaggcttggcccaggctcctctgtgcattatgagggtttgggagtggggctgggctggcccagagttcctgggcatggagccacgtcataagcttgggggatgggagggaacacaggcgatctcctagagttgtttgtgccactgcacctctgagcagctttgcatagcttcctgtcttgctgctttgctggagctggggctgtgccattaaaagtcaggtcatctcccctctgtttgtgatttctttctggcctcagcctctgtgctagctagtgggagactcctgctagggccctggggaaagcttcaactttgctaacaggagccccaggccccatgctgatgtcatactgtggggtagacatggttcgggggaggaggcttggatcacaaaagagcaggagatgccaaccctgcccttgcctttcctccctggtgattcagggaacagagcccttccctagggaacaggtttgaagcccagctaagacagggcccctgtttactcagcagagtaggcaggaagtggcagctggatactgccacaccacactgcctcattaatcattaaccatgtatgagcttgaacgatcagggagacacaggccaaaacagctgccgctgccacctccactcccctcgcccctaggctgaggatgggagacctgtaatctacctgtctcaaagcttcctcaggtgtctccacccagaggcccttgcctagcaa

SEQ ID NO: 98779 - DNA, 1112 bp, Homo sapiens
atttatagcccaggagcgggggccgaaacccaatccccgctttgggctgggaaataactgtaaagactccagagggagagcggatgtagggctgggctgcaggatggcgcccatcctgcccgggacaaggcgggtcacctctggggcctcaccgcaggttccacttcctttctgggtatttggaaaccgtcaccccgccatttcggtgtgggaagagcgcgcgggccctgccggactttagtgctttaggggttaatttcgggctgacagggacggagcctaaggcagtgagcgccccagtaccctcaaaccttattgctggcccctgctgtctgagcttacaagcattaccgccgctatttccgtgcgggctgacacgggagatgaaagtggtgaagacacccagggtgcgggggtggaggtggggagaggagccagatgggattgatccccagagccagatgggatttaaaggtgagggaggagggcatcctgatggcgtgtggtcagttgatgccagattggatggctgagacacctctgcagcttacaggaaagaaagagggaaagggttctatgaattctagctgttcatactcaaagcaaataattaatcaagtggggggggggcctctagctgtaaacccatacctctaggaaaccttttgtcatgtggagccacagtgctcacttgacagattccccactgagaagtgggctaagaggttggcctgcattgctgggtgcctccaggtggggagtcctgtacctgggagcccgggcaggctgctactctcttctcacctctgcccagccccaaccctccactcttgccaactgagtcatcctagctggtagatgatagggtggaagagagactcgcaaggtgaggacttgtggatgtggggctcatgctgtgtcccctctctctatccctcagcgtgaatgcatctcagtccacgtggggcaggcaggtgtccagatgggcaatgcctgctgggagctctattgcttggaacatgggattcagcctgatgggcagatgcccagtgacaagaccattggtggaggggacgactccttcaccaccttcttctgtgaaactggtgctg

SEQ ID NO: 98780 - DNA, 1087 bp, Homo sapiens
tttttatcaggagaaaaacctttccttgaagcgccctagcagacttcccccttctatctcactagcttttgcctaaaccagtcactggagggagggagttaaatggccatggatggtttggactaacctgtacacacccctaggtctgggggaaagctgtcttcctcaagcaagtgcaagggtgaatactcaaataaaatcaggaccttgctagtgaagaattgggcaggggcaggcaaggctgttgagaagctctgccaccacctacactagtatgtccttcactttactgccaacccagctacttctcaccaccccctactaccatcccgttattcctagatgccttcagcagcctctgaaccagcttcctgcctctaggcttgaaaccctaatgcagtctccacacagcagctgcagtcatctctctgaaacacaagctaggcaatgacgcttgtttcaaaccctcctgttacacttatataaaagccattctccttccaaggcccctccacctctatgatctcatcttgtagagctctctcctttcctcactctgggtttttggacacactgggctagttcctacctatgattgtttgcacttattattctgtctgtctggagaactggtttccagatcttgcctcgctgactcctcaccattcagccctcagttcaagtgtcaccttctggccgggtgtagtggctcacgcctgtaatcccagcactttgtgaggccgaggcgggcggatcatgaggtcaggagatcgagaccatcctggttaacatggtgaaaccccatctctactaaaaatacaaaaaattagcctggcgtggtggtgggcgcctgtagtcccagcaactcgggaggctgaagcaggagaatggcgtgaacccaggaggcagagcttgcagtgagctgagatcgtgccactgcactccatccagcctgggcgacagagcgagactcgagactctgtctcaaaaacaaaacaaaacaaaacaaaacaaatatcaccttcttatagagtggcttctgttcagtctaaaatagcagcccctgcatatctttctgttccattat

SEQ ID NO: 98781 - DNA, 1973 bp, Homo sapiens
tgtcagtctctggacaatcctttgaacgtcctagcctgggaggggagcccatcccagagggagggtgaaatgatctggtctctttttgcagagcacaagcgggagatttacgaccgctatggccgggaagggctgacagggacaggtaggtggagtggtgaggcccaggaatggaggtggggcagggaggagaggggcagggcagattcttgcaatggaggctctctcaggctcctggctgtgccttaggtgaggtcccccgctcagggcaggatgcatgccctaagctctctcctcatcctgcctttccaggaactggcccatctcgggcagaagctggcagtggtgggcctggcttcaccttcaccttccgcagccccgaggaggtcttccgggaattctttgggagtggagacccttttgcagagctctttggtgagtggactctggaagcctctgaatggctcaacttccccctccaggcctgtccttccatcagctgggaggccctgaggtggaaggctgagaggggacgggaatgccacggacagaagattttgtggagctgggtccagtgagagccgggacagaacctcacgtgtgccagaacccccgtaatccaacagtgacacttcacagactcaccttattaaattacaacaataatacattgttagacttctatagtaacagccatgaaagcaagactcaaagcatcttgtgacaatattgttattattacctataaaacagatagtggtattttttaatgatagatatgtgccaaatattttacatttcgtaagtctctagtgaatcctgacaggtgggcaattttctccccatttgcagatgagaaaactgaggcacagttaatagcccagagtcacataacacatggcagagctggactcctagctgtgtctgcctgtcatcgcgtcatgatgatttgcctgtactgaaagagccatctgtcctccatccctcttccccctccttccttcctttattctttattgtggacagaattaaccagtgagtgttttcgaattcaacattaaaaaggaatttataaataagcccaactaaaaagcggaaaagaaaaaccctacccagttgcttagtggtttatacttccagacttgggctcacacacttttgaggggaaatgtcattaccagatgactgctaatctgtttacttgttgcagatgacctgggccccttctcagagcttcagaaccggggttcccgacactcaggccccttctttaccttctcttcctccttccctgggcactccggtaagttctgccccttcccacgtttgcaagctccgattcctggaacccctggcttgagcttgttgcttttccaagcctgtctcctgtgttgggagccctgcctccagcagccctgcgaggcggcctggagcctcggtgaccacaacaggcagcgcagtcttcttctaaccacctctcctcctcctcccttgtcccgatgccagatttctcctcctcatctttctccttcagtcctggggctggtgcttttcgctctgtttctacatctaccacctttgtccaaggacgccgcatcaccacacgcaggtgagagctccttctggggccatagaggggtgagaggtctgctggggagctgtgttcaaatagaaagttggctccttgagggcagggcccagtctgcgctctctactgcggtggccagaactgggaccagcgcctgcaggattctgtcactgctcgttgcctgaactgtgctgtctcccacagaatcatggagaacgggcaggagcgggtggaagtggaggaggatgggcagctgaagtcagtcacaatcaatggtgaggagcagctcccctacccagcccctggcaggaagccccagccccaacctcagcagcctcctccccaaactgctgctctctgaactcacttagggcttgggagggag

SEQ ID NO: 98782 - DNA, 1168 bp, Homo sapiens
tggtggggggtggaggagcagtcctgaatatttggacatatacttggagagccaggtgtggggacatggcacacaggggcaacggggacagctgcagccacagttcatctagagaaattcctggttgccttcccctgctcctgtttgccccttctccatccccagcctcatgattacccagcctttgcagttgtttcagagactcagccatgctcaccagggaggcagatacctctgccctcagcttggccctctggtccctccccattcccacccagcccatctctcttcccctgaggtcactcagtttctaaagaggtcaggcctgctcttaaccgctgagcctgcctggccccgaatagttctgccttgcaggctctctatgccctttcccccgctccaacacacacactttgctttcctctacaggtctggcttggcacccaagagacctggtcctgctggagagctgcttttacaggacatccccactggctccgcccctgctgcccagcatcggcttccacaaccaccagtgggcaaaggtggagctggggccagctcctctctgtcccctctgcaggctgagctgctcccgcctctcttggagcacctgctgctgcccccacagcctccccacccttcactgagttacgaacctgccttgctgcagccctacctgttccaccaggtaagtccttgactctggtcccaccccaaccgcagtccctcagcccggacttctgctcttacccagatctctggttttccacagtttggctcccgtgatggctccagggtctcagagggctccccagggatggtcagtgtcggccccctgcccaaggctgaagcccctgccctcttcagcagaactgcctccaagggcatatttggggaccaccctggccactcctacggggaccttccagggccttcacctgcccagctttttcaagactctgggctgctctatctggcccaggagttgccagcacccagcagggccagggtgccaaggctgccagagcaagggagcagcagccgggcagaggactccccagagggctatgagaaggaaggactaggggatcgtggagagaagcctgcttccccagctgtgcagccaggtaacaaggtcctcagcatccacctccctgtgagggct

SEQ ID NO: 98783 - DNA, 1050 bp, Homo sapiens
tttgtaattctgttttctcttacactgaaaaccttgatatctagcatcatattttcattttcttatttttttaccataatataaagaaaatcatttcaaaatgtcagtagcaatatttttaaagacactgataccactgagtgatttttttctgtgagtgtggatattaagcaagagggtgacaaggatggatacttttaaaaatcccccttcctgctgtgtggagaatggattggaactagggtggtggcaatgcagatagaatgggaccaattcagaatatattgtcctttggggtctgccatttagcattggctttgattttatgctccgaatggaccatctcccaggccccttcccaccctgcaattctaagatggcgtcctccttggctctgataagcacacactgcatgttgctcatgggtctcctgctctccctaggatctcatggtccggaatgacaccccctgtggaaccaccattggacctatcttggcttctcggctggggctgcgggtgctggatttaggcagcccccaactggccatgcactctatccgggagatggcctgcaccacaggagtcctccagaccctcaccctcttcaaggtaacacccaccccagaccctctctggcagctgggctgcttcccctctagtgcctggattggttgctgggacaacatcgccatcacaaagtgactggcctgagtaatgggggctggttgtcatgctggggccatgtaggaaaacaagggtcctggccaaccacagtggctcatgctataatgacaacacttggggaggtgggaggattgcttgaggccaggagtttgagaccagcctgagcaacatggcaagtccatgtctctacaaaagagaaaaaagagataaaacaacggtccttattcttctcaaggctcaggggccctgacccaaagaaatggaaaatgaggggatgggaagaggggatcagggctgagaagactggggtggctgtcaagaacagatgaaacctcggtgcttctcttgctggaacatatgttgg

SEQ ID NO: 98784 - DNA, 1047 bp, Homo sapiens
agggtcacctctgcggagtcttccacagccaacttgttgtgccaggcatccaccgtgagccagggctcttctgggggccccaagacaggggagatgctgcctgtgcctccttagcacttggtgtctcctctgactcaacatagatctgcttattcgagggtgaccgtctctcctgtatctctctttgtgccacatggtgagcttcttcctttaggacagggactctacccagcccatcctcgtagccccagggctcagcacagagtaggtcctcatgatgcctgcgtgtgtgaggctgcagtctcagctgcataacagagcttgaacagctagtgctctctcatgtaacaacccaggtcagagttagcagtttaggaggggtccctgccgtcctgaacacatgacttccatttcaggattcagggtggccgttccagctctggccatcatgtctacactgagttagtaggaagggaagagagggcaaaggggcagtagacaccccctggctttaagggcatgatccagaagtgacattcatcactgcttacattccacagaacttagctgcaggggagcctggaaatgtcatctctagctgggtagttaagtgcttagctacaacttgggtgttctaaaagatatcatggacagttagcagtctctgtcatacacataaaagaaaattgaccagtgtggtggggcacctgtgctgagccccagatgtgagggtcacgagaggaggaaggggagcagtgcaggaaacccaccagtactgttaagaatgtgagttagtttggtctcagcccactgtctggtgttcagtgacgaccccaggttaggggtgttgctaagaacacccagtgactcagtggggttttgggccagttgggcaatgggcccctctcactggcttccaagatcaggcccctaagcccagattcccagagtcaggactctactgtcgccaggtggggtctgagagtgcacagggagcacagtcactgctgacagagctggtgctgcggcggatctcagcctcgtgcc

SEQ ID NO: 98785 - DNA, 1106 bp, Homo sapiens
tgtagcccctgctttctaagtccaccctgggctggggaaaggaaagtaagagaccacggggacaatttcaagccccccagtctccacaggggctagtccccctggctacctgcctggctttctctctcctgggctaggggctggggaggtctgcggggctcagtcctggccctgcagtatcccaacaccctgctctggggctgtctccagagccaaaggctagtgcctgaggtcacagaggtgggagggacagggccaccgctcccgcctgggctccatccagcacaagagccaggctcactcactgccaacagccaaggctcacagctggggtccgcagaggtggccggggcatgccctgtgaccaggcagggatgggctatgtcgctgttggggaccacgagggatggccagtgaggaggggtcagaggctgtgaggggaggactgaggctgggtgtggtgtcctgggatggaagaaggctggcttcagggagcagtgaggacaggggtgaggacggtctctggtggcagagggtctctgtctttagagcacttcatgctgctgctgtgtggcctcactgacgacctggggaggaagagaagcccagtccaaccatgtgctagccagagaatggagcctcagccctgagccatccccaccccagggccgcaggatctctcttgccccactagccagggacctagaccagcacagctgggtggaagacagtccccccagacacatccatagcccccaccaagggtaaggagcccagacagaccacttacctccccatcccgtgtctcgatggtcttgatcatcaccgtcttcttggtatggacctcagaacccctttgctcagggctggtttctgtaacagggtccatcgcacactcagcctgaccaagtccaggctgggctataccaggggctgggagtccatctggggccacattgggcagagccctagcagaccccaacccccctcaagacaggcttgttacttcttcaagactttaacacctttccttcagcccagcacccagcaggtggttctgcagtccccagcgcctgtcccatagtttagatggtctcaggagccaa

SEQ ID NO: 98786 - DNA, 1003 bp, Homo sapiens
tactcccaggaaccttttctcctaacctaaccactgggcatttttgaggacgattcaacagtagaagggagggaccttgaggaaggtgcctgtcacatcatgatgcagacagataaggggttggtttgcaaagaggggtcaaagcacaatgcaaatattgtaatagagggtgggcctgactcctaatgggaggcccaggtctgcggctggactggacacaagcaggtgtgtgtgtgtgtgtgtgcatgtgtgtgtgtggccagtggcagcaccagtaagtgccaaggataccagaaccactggggcagctggaataacaagcccaagtatgggggtccccagtgctgggcacatcccaggtatctccctccccacccattgccacaggacacctctggggactgggtgcctcacgccccttctgtcttgactgccctccatgccctgccccacaaacgctctgataacagtctgtccctgtctctctcctgctgctcctatggaagcgaagttttccgctcctgcagaaagcaaagttacggtaggaaactggctcctgctctagccccccgcatccccccctttcccacccggccccggcctctcctcaccctgcctcagctgcacccgatgccttgcagctggtttggggtagaggacaggctggccccgcggttggtcgagtgccctggcagtacgactctgaggtgactcctctttgttcctggggtactggaacccagactttagagccttggaacctaggacctgatgattttggggctgcacaggggcttaagctttcactgacaaggggaggagggagaagggaggaggctctgataatccattaagatattggcaggcggggagggggtggcagtttggagggccctacggaggtaaacgtgagtaaccaggggcccagagatggagccagggcactggcatgggaggggttatcctgagcagcccaggctgggcaggggatgtggggagcaaa

SEQ ID NO: 98787 - DNA, 1030 bp, Homo sapiens
gccacggccagggggaggctcccttggcttatcttcttggccttacccggtgttcctgtgccctggacttgcctttcccttcctgcctttctttaccaggccccagccagagcctggagttgctatggcaacttcggaggaacccatttccttagtgatgtctatggtacagagactggcctggagctcagagctgccggcaagaggcctcctctgctgtcctcaatttctctccaggcctcacccacttcccagaggctcttccctggggactctgcggcccttcccccagagaagacacttcctccctgcaggtggctggctggggtttctgtctctcaggccactctgcattgccaccaccccttttagccccagtcagaggtgggtctgtcatgtgggtggctgactcaggtaggctaaaacatccttaactcgggacccctagaactgctcatggctggcaccctactacttgtcctcccttctgtgcccctggaaacccagacactttggaggaaataagggctcaggattctgactgcctgggtttcaatcctagcaccaatcatttcccagctgtgtcaccttggtaaggcatttaatcttttttatgcctcagtttcttcatctgtaaatgggggtgatcacagttcttacctcacagggctgttgtgagtattaaatgactcaatgcattttaagcacttggtacaagcctggcactcaggaaatattcaatgagccattttacagatttttattaagctctctctgatgtgtcaggtatgataatacatttaattccttttttttttttttttgcttatctttatgtgtgatgtgccccctcacccaccccctcctccccgcaagggtccagatggggaaaactgagacccagctcttgggcaccaaagctctgttaagtgaaagggatactctggggtgaccggctccttccctcctccttttctcccacactccctattcaggcccacttagtagctatttctgagctgagttattt

SEQ ID NO: 98788 - DNA, 1036 bp, Homo sapiens
agagtctggtggctggacccgttcggaggggcccttggggtggcttaggcttggagcatcacagggaccctagggtgccagggtgagcacagctgtgacgtgtgaagaggcctgggcccccagagcctggggcatatgtgcaggggccctctcaggcagcagaaatgccaggccctggctagggggccctcgagggccatgggttttcctccccaaaggccacaaccgtttatcttgccttccacctcacccttcgcctcaatggctcctcgcttcctctcctcgcttctcactcagcccccagcccctgaccttccccaaggctcagagctcagaccctgacagtcatggtccctctgctggcccccctgcctcagttcccctcctctgtgcctgccgttcctgtagttgccacttccttggtctccagattcttcagccctcctccccggcctgctttctctccagggcctggctctgcctcgcttctctgtattaacccatgtcttggtgcttctttctcttggggattccttccgacacccccaggctttggggtgctcctgatcccatgaatgcctggttgcccggggtctctgcctgcccaggaaccccgaggaaccagtctctggctagctgccggccctcgcagcccagagctgtccttgggggagccaagagtggcagtgctgccctgacggtgtgagaggcagccctctatgcagaagggccctagccaggtctgcgtgcctgtgcgtgcatgtgtgcgtgtgcgtgcgcatgcgtgcgtgtatgtgcatgcatgtgtgtgcatgtgtgtgcgtgtgtgcgtgcgtgtgcatgtgtgcgtatgggtgtgtgcatgcgtgtgtgtgtgcgcgcgtgtgcgtgcacgtgtgcgtgcatgtgtgcgtgtgcatgcgtgtgtgtgcatgtgtgtgtgtgcgcgtgcgtgcgcgtatgctgcactaacctgccgcttgctgactgaggtttttgtctgtacacaggcgagtgagctcagggggccacctgt

SEQ ID NO: 98789 - DNA, 1049 bp, Homo sapiens
gcccaggctgaaggtgagaccccactctgcaggacgaggtgctgctgaccgagagcagccatgtgagcttcgtgtacgaggagaatgagtgctccctggtggtgctcagcacgggggcccaggatggaggcgtctacacctgcaccgcccagaacctggcgggtgaggtctcctgcaaagcagagttggctgtgcattcaggtaggcaggagttccggagaaaggtaaagcgcacaccccctggaatctgatgtgaccctccatgctctgcccaggaagcagccagccctggactcgagccaccacacccccagcccagcaccccgccttgagcccccaacattcttgcacctcttctctcttcttcttctgtccacctgtcccagtctctggcctgcttgctttcttcccctcccacctaacaccatgacatctctgccccagctcagacagctatggaggtcgagggggtcggggaggatgaggaccatcgaggaaggagactcagcgacttttatgacatccaccaggagatcggcaggtgtggggctaggagggaagccagtgggggccgagagaggctgctgggtctgagggttgggaggggtggagagggccacagtgatggctgatctctgaccccctccctgtgtcaaccaggggtgctttctcctacttgcggcgcatagtggagcgtagctccggcctggagtttgcggccaagttcatccccagccaggccaagccaaaggcatcagcgcgtcgggaggcccggctgctggccaggctccagcacgactgtgtcctctacttccatgaggccttcgagaggcgccggggactggtcattgtcaccgagctgtatcctgggacaggctgggggctagggggatccatgcctaaatgactggtccttgtaacatccaataggcaacatgttttacagtttacaaagtagtcccaattgacaattgggagggatacatctggagacttctatgaaaaccaacagttttaagcccattgttagcttaaattttcatagcatt

SEQ ID NO: 98790 - DNA, 1089 bp, Homo sapiens
caccagtttcctgcctctcccctggggggttcaggggatttgtctttaggtgtgcatcttggctgtaggcattgtcctgacagacccagggggaaggggacccccaggagcccagactcagtgctgctcgatccactctctcctgccaccccgccccatggactttgtctctctgttgccaaacctggagggtctaggttgacagctttccctcaagccctctttcctgggtttgcagactcaggcaaagggcgcagaggtgagcacggatcacctgaagctattcctctcccggcggaggtggcaggtaagtgtggcaggccagcctctgtgctttccaccttctccttttctctagcactgccttccccctcccgtgggccttcatctcctgctcctgtcttctcgctttcactggctccatgcctagcttcctgcctgttccctgaccctctgcatgctcaggcctcttccccagggctgaggtgggcctgggggggacaatcctgccccaggggtccctcaggtctgactccagtaccctgtctccagcgctcccagatcagctacaaatgccacctggtgctgcgccccatccccgagctgctgcgggcccccccagagcgggtgtgggtgaccatgcccagaaggccaccccccagtggggggctctcatcctcctcggattctgaagaggaagagctggaagagctgccctcagtgccccgcccactgcagcccgagttctctggctcccgggtgtccctcacagacattcccactgaggatgaggccctggggaccccagagactggggctgccacccccatggactggcaggagcagggaagggctccctctcaggaccaggaggctcccagcccagaggccctcccctccccaggccaggagcccgcagctggggctagccccaggcggggagagctccgcaggggcagctcggctgagagcgccctgccccgggccgggccgcgggagctgggccggggcctgcacaaggcggcgtctgtggagctgccgcagcgccggagccccagcccgggagccacccgcctggcccggggaggc

SEQ ID NO: 98791 - DNA, 1035 bp, Homo sapiens
tgcaaagatgggcggcagctgctcagcatcccccgggcgggcaagcggcacgccggtctctatgagtgctcggccaccaacgtactgggcagcatcaccagctcctgtaccgtggctgtggcccgtgagcctggggcagggccccaggggggtagtgatggggatggtgggacagggcttgaggggttcttagctagggtataggggctcactgggactcttctttctcttgccaggagtcccaggaaagctagctcctccagaggtaccccagacctaccaggacacggcgctggtgctgtggaagccgggagacagccgggcaccttgcacgtatacgctggagcggcgagtggatggtgaggatggggcagctggagggttgggggagcggcagggggagggtagaggagtctggtaaggccagtgccctcccaggctccacagatagcaccgtgggagctggggccaccgcttctgtgacctcagcccctcccccatactgcctataggggagtctgtgtggcaccctgtgagctcaggcatccccgactgttactacaacgtgacccacctgccagttggcgtgactgtgaggttccgtgtggcctgtgccaaccgtgctgggcaggggcccttcagcaactcttctgagaaggtctttgtcaggggtactcaaggtcagtgcaatggtatggggtgggaggaggaagggggctctgagcctagggttcttgtggagcaccatggccttgccccaaggcaccacggtgatgattttctctctctcttagattcttcagctgtgccatctgctgcccaccaagaggcccctgtcacctcaaggccagccagggcccggcctcctgactctcctacctcactggccccacccctagctcctgctgcccccacacccccgtcagtcactgtcagcccctcatctccccccacacctcctagccaggccttgtcctcgctcaaggctgtgggtccaccaccccaaacccctccacgaagacacaggggcctgca

SEQ ID NO: 98792 - DNA, 1036 bp, Homo sapiens
gcgggtggcagcctcagcccggcgccgccgctgctcgcccaggaactccttgagccggttggtggtgaaggtgagcgtctggcggcgcagcttcatcaggtaggcgtcctgcaaccatgggtgggccaggcagtcctgcagggagggccggctcctgccaggcagagccagggatgatgaacctggaaggaagctctgggagctgccggggctctgtcctcccgcagacccatgtcccagtcctggatcccacccctacatgtgtgatcttgggcagctcaagagctcagttccccagtctccggaatggggacagtgagtctgccttgcacggggctgcctcaggctttaaatggtgggtagtatgaccatttagtagaagcagcagacttcttcctaggagcaggggaggagctgggagatctctggcacaggccaggccaggggcaggtaacactgggggatagcaggtgtggggctcactcaccagggatgtacagagagaacctttcgcaagaagagggtggcgctctgggatgtattggggtacagctggaaggcatcaaagcggccccccacaatccgagcctccgtttcctgggggtctggctcatagaacggggagcgtccactgagcctgttggggaagatagcttgattgacgtatgcagaccggaggccaacacccagacccagaaggacattagtgtcaggtgcacagtgctcagggccatgctactgtgcacctgagtgtgagtgtgcagtgtggatgtgtgtacaggggaggtggggcacgggggagagggtgttggcagaaggtgagtccgggagctcactgtatgggcagagagggctgcggtggggtaggggacactcacataatgtaagtgagcacacccgctccccagatgtccgtggcagagccgatgggttctcccttcaccatctccggagctgacaggagacagaggccaagctgacccagcttcctggtggcagggaagtgggggcgggggaggtccctgggtgcttgagc

SEQ ID NO: 98793 - DNA, 1050 bp, Homo sapiens
agcactggtcccagccccagggagggaagggtggtggtcggatggatggagggtgcccacgctgcctgagttctgggtgccggtttcttcactttgtcacagcctattgtgtgtcctcgagcaggtcacttatgccttatctgttctagaagggagttgggtttggggatcctccaagtccctccagggcttatggtgtgtgcttctctccacagctgggccccaacgtctccatcgggaagggggtgaccgtgggtgagggtgtgcggctccgggagagcatcgtcctccatggagccactttgcaggtaggtaccagcatacacagcagcatgtgacaccccaagaggctgcggggagggcccaggcatccccccaagaacagagaagggtgaacgccgtgggctctgcatctggccacacctcacaccctccggttcctgctgcctcctgcctcttccccttacctttcactgtcctctttggcaggagcacacgtgtgttctgcatagcatcgtgggctgggggagcaccgtgggacgctgggcccgcgtggagggtacccccagtgaccctaaccccaacgatccccgagcccgcatggacagtgagagcctcttcaaggacgggaagctgctgcctgctatcaccatcctgggtatggcttcctgggggccagggctgggggaacccctcagctgatggccagtggccccggggagcattcgttcctctgtgtgcacgcgtgtttcttcttttagcaaacagttaccaagggcctgctgtgtgccaggccctgtgtgagtcaccgggggcatgagaccaggggcacagatgggcaggagggctccctccctgctggcagtggcccccagctccctgcccctgtctcccctcccatgacctcccctggtgccctcatccatgctgcaggctgccgagtccggatccctgccgaggtgctcatcctgaactcgattgttctgccacacaaggagctgagccgaagcttcaccaaccagatcatcctctgagtagggctgccagaag

SEQ ID NO: 98794 - DNA, 1071 bp, Homo sapiens
ttttttttttttttttttttttttttgagacagggtaactctgtagctcagactagagtgcaatggtgtgatcccagctcaccgcagcctcaacctcccaggctcaagcctatcctcttgcctcagcctcccgaataggtgggactatagatgtgcaccaccacacccagttcacttttttattttttgcagagacagggtctcaccatgttgcccaggctggtcttgaactactgggctcaagtgatccacagaccctggcctcccaaagtgctgggtctacacttgtgagccaccgtgcctggcctccctcctctactctttctactccctcccctgttctctgccctgcagccacacagacctttcagtgccccggacacagcatgctctttctggccacaggtcttcagtgtatgtccccctttgcacctgactcttatacacccatcaagcctcagctaatgtgtcccttcctctaggaatcctccctaccttcccaggctagggctgcacacccctccttggggccttgcagcacacccgaggctcccctctccaggagttgacgggctgtgtgggaatggctgtccacagccctgccggggtgtaagctctccaagggcagggctgtcgcccccactctcacctccagtacccagcacaggctgtaaaggtctggagaatgcgcgaatcgatgaatggatggatagatggatgaactgcagatcaggcaagatctgtggacagatggggtttgccttacccacaccgatagccagcaatgcatttttcctgagaccaagagagaagtcatttcactttctcaaagtgggtgagctcattggctgaaccaagatgagaagcccagaccttcactcccagtcctggcttctctgcaaccccccaccctgctgcctccacttacccaagtgtctgtacctgcagaggtccgcagacctctccccaaccccactgaagtatgggctaaggctcaacccccaggaagaaccctccaggaagagattgggaggggaggatccaagacagtgaggagaagagtggacagag

SEQ ID NO: 98795 - DNA, 1042 bp, Homo sapiens
accacggggcgctgggagctcggaggccgcccgctgagacccggagcccgcgtccgcatccgacaggaaggtctgcccgcctggttaccctttcgggcccctcgctgccccgcccaggctcgaacagatcccgccccaccgggacaagccccgcccctggctccgacgggccccgccccacggccctgtgagcctcgtccctgttctttcccccgcccccagcccctagtcccggacctctaggcttcccgctccgcatccctgttccgcccaccctagcatacactaacggcgtccgaaccgacccaggggcctgctgggcccccaccttcgtccccaacgctcctcagaggtggctccggcctcgctagcgaccccctcacccccagggaagaaacacattctggtgcttagcgagctgcgcgccgaggacgccggtgaagtccgcttccaggcggggcccgcccagtccctggctctactggaagtggagggtaagcacctggggtgggagcgacagagagtgtacatcctgtctctcctgccatgggactgacggacttggggctggccccaagaacgctgcctctctcttcccttccccccgaggggctctcctgggccgggtcacagagggcagcgcgtttccccggcaagaggagactttgggtctgaggtgcaagggaacggactggtggcatagagggctaaggccaggagtggagacttcagggagggaagatgcatctctcctcctgggggccatgcgtgtccctattaacttaagcccccgccccctacccccagcattgcctctccagatgtgccgccacccccctcgcgagaagaccgttctggtgggccgccgggcggtgctggaggtgactgtgtcccgctcggggggccacgtgtgctggctgcgggagggggccgagctgtgcccgggagataagtatgagatgcgcagccacggccccacccacagcctggtcatccatgacgttcgacctgaggaccaaggcacttactgctgccaggccgg

SEQ ID NO: 98796 - DNA, 1060 bp, Homo sapiens
gccctgcagctgggtgccgaggggcccacccgcaccctgaccctgccccacgcccagcctgaggacgccggggagtatgtgtgtgagacccggcatgaggccatcaccttcaatgtcatcctggctggtgggtgctcctggccaacccagggcagggaggcaagggcaagcatgggatgacaccttcctctcttctccagagcctccagtgcagttccttgctctagagacaactccaagcccgctctgtgtggcccctggggagccagtggtgctgagctgtgaactgtcccgggctggcgcccccgtggtctggagccacaatgggaggcccgtgcaggagggcgagggcctagagctccatgccgagggcccccgccgagtcctctgcatccaggctgcaggcccagcccatgcagggctctacacctgccagtctggagcagcccccggagccccaagcctcagcttcaccgtccaggtggctggtgagtacagcctgggcattaagcctgagagtggcaccaagcctgagagtggcaccccaaactctgcgggattcctgcttttccagcatgccttgcccatccctggccccacttctctcagtaccttccccgtcatgcctccccgtgccctcctcaaagccctgagcctctccctcccagtgacctccagctctgactccacagagccccctgtgcgggtggtagctcccgaggcagcccagacgagggttcggagcaccccaggcggggacctagagctggtggtgcacctctccgggccagggggccctgtacgctggtacaaggacggggagcgactggcaagccaggggcgggtgcagctggagcaggccggggccaggcaggtgctgcgggtgcagggggcacggagcggggacgctggggagtacctgtgcgatgcgccccaggacagccgcatcttccttgtcagcgtggaaggtaacagtgtacccctcacaccctgtgggctgtggcaccccaaggaccatctgccactttctagggcccccttactcctccacccccgcttt

SEQ ID NO: 98797 - DNA, 1016 bp, Homo sapiens
ggcccagcccagctccccggggtcacagagacagccctgagccctggaggagctggccacatagccccagctagcaccccggggaggagggaggtgtgggctgcaggtgcatgtgccagggttcttgctgagatgagcccagggcccctattcaaggaaacaagcccctccccggtgcccaaggccaggcctagctctgctccacagctcatttactgagcactttccctgaatcaggcactgggagtagcaggtgagtaatgcaaatacggtccctattctgaatgagctgccaggctaggtgaggaggcagctgttaaccaggggtcgcaaacgggtagtcctggggccctgcgcattccacacatgtgctttgtttggtctgcagagtcttaccaaagtcaggacagttcaaataacaatccggagttatgcgtcctcttgaaaaagccgaagacccggcggctctggtcccgcttccccccatggcgacgaacagctggcactgagtagcagctgcccccatagtttggggcccacattcctctgtcccacctccctgccattgctttttgcctctccccagactgcttcagccgctaacctaacctggcccctgtgggcatttgagtttgcgacccctgtgttaaaccaataaacatgcaaataaatgtacagtgacacctggtgataagtactgtgagggccaagggcagagggctcaagagcacagagcaggagggtcagggaggcctgggagaaagtcacccttccacacacgggagccagcagcacgcagacacggccgcttccctctaggactgcacagcctggcaggaaagccagacgcattccaggatcttagagcatgggttgttgagggccagtctagggaccctggggctgggagccaccaccctggccaggcaacaggaagtgctttcaaagctgatactggagctaagtggggtggggtgtgggggaatattcaaagcgggagaagcacaggacaactg

SEQ ID NO: 98798 - DNA, 1120 bp, Homo sapiens
caggttggtgctgatctggacctccatcaggaaagaaaagcccggagggaaggctagaggagcttccccgagttgcatacacacacgcacacaaaaacttgcttctccagcagccctagttaatcctctgatttccaacatcctgttttcttttcttttctttttttttttttgaaatacacttttgaaaagggttaaaatagctaggcacagtggctcaccctgtaatcccagcactttgggagactaaggtgggcggatcatttgaggtcaggagttcgagaacagcctggccaacatggcaaaaccccatctctactaaaaatacaaaatcattagccaggcgtggtggcgcctgcctgtaatcccagctctacttgagaggctgaggcaccagaattgcttgaacccaggaggtggaggttgcagtgagccgagattgcgcgactgcactccagcctgggcaacagagcgagactccatctcaaaaaaaaaaagagttaaaatattttaaattctactcagacccttgcagaatatgtgaaatgactggggcggggggagccagggaacagtttggaaatcaccaatctagggcctggaggaccccagggaacagtttggaaatcatcaatctggtccaaccccttctctccctttccccattttacaagtaaggagactgaggcccagaagcattgaaatggacttgcttaaggtgatgtggctagtgtcagggctggatgagaactcaggtcatcttaggaaccaccacttcccttctggtagttttctgtgattccacagtgcccgctggctctgcatgaagagcacacagcatgagctaatgcgcttctaggtatcctactcctagtctgggccttctccagagccctctcttgtctctctctcccctctccacagagccccgcctccggttcacacggcccctgcaggacgtggagggccgtgagcacgggattgccgtgctggaatgtaaagtacccaactcccgcatccccacggcctggttccgtgaggaccagcggctgctgccctgccgcaagtacgagcagatcgaagagggcactgtccggcgcctcatcatccacaggctgaa

SEQ ID NO: 98799 - DNA, 1005 bp, Homo sapiens
taagtgagaggctgtacctagagtgcatggcaggtgggaggcatttgggaagtatgcgctgggagaccgggggtctctaaagatggagatatttgggcttgagccccttcctgccacctttcctcctatctctgcctctgctcgctgctccaaaccctgtttctttactcccaggtagctgacactgagaagctatcagagatacaggcaaaagattagttgggaaacttttctggaaaactagtctatcttctcttgagttcctgtctcaacatatatgtgcccccttgttccactgactgaatggataagccctcctgtgggtgggctttcttgtcatctggtccacctttctcttagagaggacccctgcctccctcacttcagtccgttcgcagcacagtggggagaaggatggctttgggatcaggcaaaatccaagcctggccacttagtcgttgaacgtcatttcacctctctaagcctcagtttccttatctgcaaaatggaccaattgtgactagataatgagagaagccatgtaacagtatagttccaattgccagtccatgaacgagtgctgctccaggatgattagtatagtctatgagtgtgtcagtgtgaggatgctaactacacattcttgaaaggactgccctctgttctgagttacagccctcctccttctcttccccctcttccttgttctccattttcttccctttcccacttgcctttccctccttcttcttttttttttttttttggtgtaaacctgtcttttaaaaatggaattattttaaagaatttatcctacaatattcctgacatgccaaagatataaagagtaatataggccgggcgcggtggctcacgtctgtactcccagcactttgggaggccaaggcaggaggatcacaaggtcaagagatcgagactatcctggctaacatggtgaaccccgtctctactaaaaatacaaaaaattagccaggcatggtggca

SEQ ID NO: 98800 - DNA, 2844 bp, Homo sapiens
ttgatattgtactatagctatataaaatgtaaccattagggaaaactgggtaaaggatacaggggacctttctgtattatttctgcagcattctttgactccatacttattatattttttaagccaaaaaagcattccttcatgcctagcttgtagctgcacttttttaggtgcagtgatgaataccagagtgatcaaaagatgccctcaaggatgaaagtctcattagagagagcagttttaacagacagcaataacaatgccttagtgctataatgaatagttattctatgacatactttttagtattgtttgaaagtttctacagatgtgctttgcaatcagaaaaagaaagaaagataaaacttccaattaacttttgtgtaataatgagtgactgcaatatgaaaattcagcagtattacttcttgaggcggcttcctggaggaggctggtctcaagctgggcggtggaagggggtgtctcataacaagagagaactgtgaaccaagctggctgtatttccagcactgtcagtagatgaggctcttttgagcagaaggtgaaagaaaatttggaagagttggttggagttgtgtagccaagcagtctcatcaggctgaatgaaatgttaggactttttttgaagatgaggggagccattgaatgcttttgagctgagaaggagatagaaaatttgatcctgcaatagaagatctacaatatggattggagtgggtatattttggcatcatagagccttagaataaagagaaaaatcttttcactgtgtcttccctcctgtttgcccctttttctgcaggggatgtggtcctgtctggctgtagcaccctgagcctgctgactcccacactgcaacagctgaaccacgtatttgagctgcacctggggccatggggccctggccagacaggctttgtggctctgccctcccatcctgccgactcccctgttattcttcagcttcagtttctcttcgatgtgctgcagaaaacactttcactcaaggttctgggtgtggggaagaggcaggatgtgcaaggagcccaagagaatgatggaagttggggatagggtaggggtgcagaagtctgcagtgccaggatccagagggtgtcagaggtaccagtggttgtgctaaggaaggaatgttgagggcaggaagatctgctgtgcctcagtaaattgagtttttttttttttttcagctggtccatgttgctggtcctggccccacagggcccatcaagattttccccttcaaatcccttcggcacctggaggtatggggacacggggggatgttggtgcacagcacccaacttgaggcagccccttggggatgggaaagagaagagcctctttggtgaggaggccaggcctgagtatacccattgctctgcagtcatgtgatatccactgtctttccatttactgcttccctaaatcatagctgggctttgtggtcttctccctcctcccaactaggggatggggatgaggtctttgtcttctgtggggttctgccttcctccctcctctttccttgtcccagctccgaggtgttcccctccactgtctgcatggcctccgaggcatctactcccagctggagaccctgatttgcagcaggagcctccaggcattagaggtaaggagagtgaggggtgagctcagacacctcaacttgagagatgtagaagaccaagctctgatgttctcccctctctgcagctctccctgcctcctgcttccctctagacagtgtcctcactccctctctgtgttcccgcagcactctgtaactgcctgtatatttatagtcgtacctaccatattatattacatattctagtgtctaccttcccactgtccctacagtgagttcttgggtcagggacctgggctttaagcctgtatcttcagatggagttcagtgtataaaaaatgaatgagtgactgggtggtagagcttggccttggcatagggaggaaggggagggtggggtaatgaagcacccatctgtctgctcaggagctcctctcagcctgcggcggcgacttctgctctgccctcccttggctggctctgctttctgccaacttcagctacaatgcactgaccgccttagacagctccctggtgagtgcctcagagggaagagggtttcgaggaagggcaaggccaggcctttggggaggagggccagctggttgaccagatagtattgtagtgaacatcgattctctgcctcctccccgtctctctcagcgcctcttgtcagctctgcgtttcttgaacctaagccacaatcaagtccaggactgtcagggattcctgatggtgagtatgggcagtttggcagctggcacaccatgggtctttgattgctctgctctcactctctctccttgaccagcttttactcccaccttgctcttgccatgagggtggagctgcattctgggagatagcactgcttagacactagcatcagacaaaccagagttcatatctcaacttctaatacctgtgcaactttgagcaagttagttacctcttggtttctttacctgtaaagtagaaatcacaagagtacctggtttttttttttttttttttttttgagatggagtctcgctctgtcacccaggctggagtgcagtggcgcaatctcagctcactgcaacctctgcctcccaggttcaagcaattctcctgcttcagcctcccaagtagctgggattacaggcacgtgtcaacacacctggctaatttttgtatttttagtagagatggggtttcaccatgttggtcaggct

SEQ ID NO: 98801 - DNA, 1019 bp, Homo sapiens
gtgggctggggcgagctgaggccaggggcccttgggatgtttgtgagtggtggggcctggcgggtggagggccagttcgggggagggcagagtgtgggtactttccctccctgcaggccttttctcttggtctctccacagcggaactctgtcgccccttgttggtgtgtcccctggaggggcctgagggcgtacggggcagggaatgctttctcagggtcacttctgcccacctgtttgaggtggaactccaagcagctcgcaccttggagcgactggagctccagagtctggaggcagctgagatagagccggaggcccaggcccagaggtcgcccaggcccacggtgagtggggcgtggcagggtctctggaggagccagttatgggaacatggctgttgtgtgccctgcactgggctgggcatttctttcagtctctccttggcactaggagccgaggaggggagcctcagaggttgcaagcactcgggaagctgggctgaggagcagggattctgtgctggagcttggacgtcagtacaggcctttgacaggcttcagaggtcctgccatcctccatgctctcagcatcccctcatccctctgatcaccgcccctgctgtttttcacccggtccccctcttgctgcgcagggctcagatctgctccctggagcccccatcctcagtctgcgcttctcctacatctgccctgaccggcagttgcgtcgctatttggtgctggagcctgatgcccacgcagctgtccaggtgatggcgcccagagtgggggcccaggaggctgtggggattaagagagccagagggaagtggcagcaggcctgagggccgggggcctgtgggaggtgtccgtctggggtccgcctgctcacagctgcctctgatccaccctctgtcaggagctgcttgccgtgttgaccccagtcaccaatgtggctcgggaacagcttggggaggccagggacctcctgctgggtagattccagtgtctacgctg

SEQ ID NO: 98802 - DNA, 1041 bp, Homo sapiens
catgtgtaaatgatttaatattttctttcttctttgcaaaatgggatagggagagtttctctggtgatgaaatgcgatcatagtggcataggaggtagcgcatgcccatcacggtgtagctgctcagagtgctgcctctctcattgctgatccatgtcctgattccttcccagcttcctgacactaaggatgagtataagatagatgctattgtcatccctgttttatagacgaggaaccaggctcacagagcttagatgacttgcccatgattacagagccattaattgatggagcctggaattggaccgaaatttggcaacagagttctctgcctttccagacctgttgattttggtctttcagacgttgctaggagagccctgaagtacttgatcagcccaagtctgtaagagggcataagagcaggtcctggttgtgtttggcccagtctgagagggcctagagttagaaggtagagtgcactttgaggagtttgtgggccagggttagctcatccctccctggggtggggagtgatcagttggcagctgtgccgggagagggagctggtggcctggggcgcggtggttgtgtatgaagctggaggcttgggctcaggggagacctgagcatggggaaggagcatcgtgagcatggtgggagttgtggcactgtggggggggctcatggggaccgtgtccatcctccctccagaatctcctgctgtgtgtcctaactgtggtagtgaccacgtggttctcctcgctgtgtctcggggaacccccaacagggagcggaaacagggagagcagtctctggctccttctccgtctgccagccctgtctgccaccctcctggccatggtgaccaccttgacagggccaagaacagcccacctcaggcaccgagcacccgtgaccatggtagttggagcctcagtccccgtgagtataggcaaaacaagacatagatgagtttggggaagggaaggggcactgatggggaggtggagatggagcccaggggctgccatgggc

SEQ ID NO: 98803 - DNA, 1047 bp, Homo sapiens
ttttgggcactccgtgtggtgtgtcaggagcagctgacagccctgcttgcctggatccgggaaccatgggaggagctgttttccatcggactccggacagtgatccaagaggcgctggcccttgaccgatgagggtcccacgctgaccttggccctgacctcaggagccacgctgtagacattccctctcctggtctctgggtctggcttccaggctctggctgtggatgtcttcagcctctgggtgctggccagtgaggtcccaaatgacccagggcttaagggagaggcgagagaatgatctggcctcaggggacaggccacctggtcaggaggaatatttttcctgcactttttctcaggtatcaataaagttgtttccaactcataggtcatgtgtggtacttagagtcactcataaggcctgcagttcccctaacctcttctgacagaagctatcccacccatcacctttcctgaatgggcagctccaagcagccttgtttgtgccatgagaccccatctccaacccaactgtggtcccagcatgggagatcaagtagagctcctgacccacaggcacacagccccaagctggcagtgacttgtcatgtggcccggcatggaattgctgccaaacaagtagctgggccagatacggtcctgctctcttgaactttacatggaaagtagtgaggacttcaggccatcgcagagggtgtctggggagagggtgtgtggagttgagtggtgacctctggtgcttcctgccattgccttctcagcaccgcctcactcagcctggaggcctggatggtcagccccactccctcacctcttgtctccaagtctggccccagtgattggttcaggaatcctcatgtgaattcgtttggcttatgaagccccagcgcaggcatttgactagagcaaccaagaaggaggcaagtttcctctcagggttgctgtgaggataagcctggagctgctggctgtggggaggcgctttcctaaagtggaaccatgagagagaggaagatggcccag

SEQ ID NO: 98804 - DNA, 1146 bp, Homo sapiens
cacttagtgaaaaagccctcccggacgcagggcgggaggggcagtcccagcggcctggcccccatccttcgcaggaagaagaagaagaaaaagctggaccggaggcctcatgaggtcaggatgctgactgggtgggcctgtggcttcctcatgcccctcggccccggagccctcctctctttgcccccctgccttgccccatcacggtgttccccacacctgttggcccctgggccctcacctttggcacgccccccaggtgttcgtggagctgaacgagctgatgctggaccgcagccaggagccccactggcgggagacggcccgctggatcaagtttgaggaggacgtggaggaggagacggagcgctgggggaagccccatgttgcctcgctctccttccgtagccttctggagctcaggaggaccatcgcccatggtagggacccccaggcctggcccgaggctgcaagccctcttcagtctgtgccaggctgctcagttcccaggaacactctctagagtcctgggcacaggcaagatccaactgccacctgggaccgtgggggtccatttgcctgggcagcccgtgagccccgaggggcagggctgtatctggtgcatgcagtcagtcaacaaatggcttccccttccttggtggggaggggccgtgccctcgtttccatgctccattttcacggcccctctctgactggcctgtggcaatatggagctgtgtatccatctgggtacattgggcgctttgcccttccagcacattcgcatgcttttggggggcaaggcagagtgggaggagatttttcctgtctgatgggactgtgccctctctgtgcctgactgtccccctaggagctgccctcctggacctggagcaaaccaccctgccaggcattgcacacctcgtggtggagaccatgattgtgtctgaccagatccggccggaggacagggccagcgtcctacgtaccctgctactgaagcacaggtgccggggtgggtccctgggaggggcctgtccagctcagctgcccttccaggagcacatcctcttccaagtggctcccagcctctgcttgaatgccacaagtgacagagagctcatttctatcttttgacactttcaa

SEQ ID NO: 98805 - DNA, 1027 bp, Homo sapiens
gccaaggaaagaaattccattctgttacgagtaattgatcctcatttttaggaaaagggaaggctattgctataaacagagggtgaggaagaaaatatttgactcctatgtgatttgctgggataacttacttggctttaattaaaaaaataataacaaaagtgaagccactactgcctgagaatgacatgagaatcaggagctaggaacccccagaaagaaaggtctgggtcatcccaccagatacaccatttggactaacagaagttctagccaagagtgaaaggaatctagaataaatgtggtggaagagaatgataagtatcggttgcagccttgagaccaactgtaacagcaagaattttcttttgtaagtctttgtcttataagtttttttttttttttttttctgaaaacaagatcaaccagaatattggaaaaactgttcctatgatgggggcaggctttgctataaaaagcgagtggatctgaatttgtaaggggtaggctgcaactgatactgttctgctccattcagatccctctttagaatagatggatccattcctagctcctgggaatatttgctgataatggctcacggctctgtccctcagtggaaattgctttgcagttccagagagctgcctcatccaaggtgtgcaccccttcctacaagacagctgatggccaatagctggctaatgtgggtataaaaggcctggcctcttatctcaatttgggacaactctcaggggccatcccagcatcagagtctcccactggatagtctgaaatctgtgttgcaaccacattgtgggtcagttttttcctctgcatgatcctgccttcctcacttccctacatcctgacagcactccccagtaaaccttcagaagacaactttccatctcagggcctatttccaagaaccccagtttaagacacaatagaagtggaaacataaaccaattctttggtgcttgtccttgaagccaaggcctagaaccttgattggatggaaagt

SEQ ID NO: 98806 - DNA, 1024 bp, Homo sapiens
tttgattcaaaataaaaggttggagacatttatatgtctgtgtacgtgtttattttctgtttctctaatatcctgcttcaagagacaaactggtattcatcaaaacgagctagttttatggaaaatcagtgcaattcagcatcctttcccaaattggagtaatttagatagaaataaatcataatggtgcttatttcaggcttcttagcatgtgcaaaaaagtgttcattagctgtccctatagaggttcaggacactaagaaccactgtatctggatagtggcacacagccatagcaccaccacaagcagcattggtcgataagatcactcatattttcaagaccaagaaaactaaataacataaatcatttcagttatgtatgaatgtgctaaaaaatgagaagataacttttttcctaatggcttcatttacactgaatttggatttgtgtgttgttattttaaaaaaggaagaaaaggtgaaacactggaaatcatggtctgtgtctaggaagtagatgaaaaaccaacagctgagtgaataaattcaaattctagaggatatttctgtaattcataggctatcacaagtgataaatgaaagcaatgttctaattcctccagttagccaatttttttgaaatgtaaatctttggtggcttttcttggtttatttcttggtttatgtttttactgtaagcactttatatcactaaacttgaggaaagatcaattgaatttaaaaagtctgaaaaacagagaaaaataaactaaaatacatgaggacctgtggaataatagcagaagatccagcatttgtattattgtagccaataatacaaattgactatttctgtagactactattattgtagtcaaagaagggcaggaagaagagtgaggagctaaaacagcgtttgaagaaatagtgggtgagaactttccaaatttagtgaaagatgcaaacctacagattcaagaaactgaataaaattcgcatatttacatattttttatttcca

SEQ ID NO: 98807 - DNA, 2712 bp, Homo sapiens
agcccttcctgttgattacaaagcccgtggaagaaaacagaacacaccctcctcagttccgtctaaatgtgtttcttctgcttcaattacaccagttctggggcaaagacactgatgaaacaacacccatacctgaaaagaataaatgtgtgactttcaaatcccctttcgcagtgaaagaaacagcaaacacttaagattcagcatctgttctccagttgcactgaggaatgcactgtctcgcagcaccagctctgcagagcccttgccccagactctttgcggttttatttatatgtatttccatatttcattcctgtgtgtcactgctgcattggtgtggcagcaagtgaccaaatgctacaggtcttactatggacaccaggtcaggtgcaaccacacaaaacaaagccagttccatgagctgcctatgatatgcattgcggaagtaacattttacccagggtgtgccattgcagtgatataaatatatttttttcttagactaaatatgagctgactatctcttttgatgtgtgtacataggtgtgagtgtgtctgtatgcgtgcctgtctgtgtgcgggtgtgtgtatgtgcgtagcctcatgcttaggactacccatgaatgttgtggaatgctacacctggagagttctggttttccaccagtttcaagatgaagaactacatgatacagtggacctggagaccatccccttggaaagacaacccagagatgttcagcatcctgtatctacacgcatcctgtatctacacgtgtattttgtagctgtcacactaaccttaataagaattctacagctttggacagaggcattttcaccttaatggtgaagtaatttaaaatataaatccattcaggtgacaacccatcatcaaaattacaaattttctgattgaactcatctgaatcatcagttccttgatggagagagagaaggagatggaatgtgtctggtaaccccaaatggagtacaagtagcctttgttttcctgcataaatggacttgttgaatgcgaacgaatatatgcaattcatatacttttggagatgaacgtagatatgtgtgtcagctttgagatggtgtgtcctggattaatactttgtctcccaatatcacagaaaaatacatgccagtgactcttgaggttaaggtagttgggatgaaatggcctcaggcaatttcacattccctaattacctggaaagttctacagtaattaatatgcagctaactcctgttgccctcacaagagcatcagccttctagaatcggagctccggagtgtgaagattcagtattgatatgatatgtataccaaactccagccaacttactgccatttttcataatctgagtggctgccttgcttatcctaagctgtggttgcagaaaccgtggccatttatataagctataacatcaaatcagggaaaaatgaggaaaaaaaatagattctgaaccatttattgttgaataagtagagaaaatcatcaataaatatttattacattctgacagggtgtgtggcattgtgttctatgccagagtgacaaagttgattcacccctttttggggaccttaatatattttttaagggatgtgcctatgcattgatgcctgaaaaatatgtataaagaaatgaggttgactcttctgagcagttcatcttttccagaggtaagggtaggaggccaacttcagggtctgggtctgagcccgtgggcaagccctggccgagtgagctccaatgctaactcatgtgccgatctctagagcagtgggaaactaccccgctgcaccaaatcaagtagcttcaccttgtgtatgcaggccccaagttattttttagcaatcttacgagtgaaatgttctggtgggttgaaaaacgttcttattttaaagaaaggttgtgctcgctacactgctggtgtgtgcattctgagacctcttgtattcaatctgtgaaggatatgtgtattaatccgtacacccgtatagcctcaatatttgtctgaagacacttaaattctgacccataaaggaaagttctagaagcaatattttcacttatttaacattctccaaacaacatcaagcattgatacacactgaagagtgcgtttattttttgtatcactctaagtatgttggaatatgcaaggactgtggttcaaattagaatgtataaggcatattataatttagttcatactgaataagaaattaacagaacattgttcggttcacacgttccaaactttgagtgatttctggagttagacatagattttctattttgttttaatttgtcaaggtatttttcttcccttcatgaactttaggtacacataacttatgtcatttatttatggtcttttatacctagtttgtaaaattgtaaaatagcaaactaaatgcaaagagtttgcatttgaaaataataaagtagttgccgtatacaaccctgcaatctggttgtctctttcaataacttttgctatatatatggtgtgcctaaatgaattaattatttgttgtcatttaattaaaacaaaaaatcttaaattccaactgagcatacttagaggttaaaaaattattatcttctaaagattcttcacccttcagaacaatgcatttgaaaaatctgacttagaccatcgtaattaagactgtagactatg

SEQ ID NO: 98808 - DNA, 3076 bp, Homo sapiens
aaggtagtataaaataaccccatgaaggcctgctctatggttattcagcaattgggtgatgaagataactaactataattctcttaatagtttttattagtaaatgattttttatatgtcaatatcattaggaaaggcagaattccagcctgtaattgcttgtgacagtgacctaatagaaaacacctggcctaagaaatgagtaaactaataaataagttaataagaagtgctttgaatttgttgaaatcattattcaggaaccccagcaagggaatacgagaagcacattccacaatccaaacagtgatcaaagtggccgttcttctgccagccttggcactcgtgctggtcaggcatggattgattaaagaggggattaactccctgctgtcccaagtttgtttgaatgccccaagcctgcctgtagactaggctggaagcatgctggacttgaattcttgctgttttctctgcttccatccagtctggcaggtggcaagctcgcagttttccttactcatccttcactagggtttccatagttgctgaacgaaagtctgtaatattcagtactggcagagactggactctttctgcaaagattgaacaggtttcggccatgagggctctcccagtcttcaccccaggctagggtgttaaaagacctgctatgagcatgaatgccctcagagggccacataaaacaagcgcaggaaatagaattaagaaaaaataggatgattgatacatgctttagcagctttgtgaagttaagagcaaaatattgcatagttacatttaacaacaattgttccatttaaaaccttcccttagcttttcagttctccttgcctatttgaggcaatcagatttctgagtcttcttgtctcactggtagctccgttctgcttatattttcttgttctctttctagacctaacactgccttgttggatccaagctcccctgaattctctgctgtggtatcagtgggcgattggctccaggccattaaaatggaccggtataaggataacttcacagctgctggttataccacactagaggctgtggtgcacgtgaaccaggagtaagtactcaacgatgtaacacgaaagggtaaatctagatttaatagtattttctttttttgctttgagctgcgtaatcatcctactcatttaaaaaaaatctggaatgcctctcattttgattgagtataattttacacagcctctataaagtatctacattcttgcattaaattgcttaatgaaacattttaatacacctgccttgttgtgctgtattaattgtggctgattcaaacgtgtgtctgcatgaagcccaagaaaagagattgtcagtccctgtgacttcttctgtcccttttttgtcgccctatgtacagggacctggcaagaattggtatcacagccatcacgcaccagaataagattttgagcagtgtccaggcaatgcgaacccaaatgcagcagatgcacggcagaatggttcccgtctgagccagtactgaataaactcaaaactcttgaaattagtttacctcatccatgcactttaattgaagaactgcactttttttacttcgtcttcgccctctgaaattaaagaaatgaaaaaaaaaaacaatatctgcagcgttgcttggtgcacagattgctgaaactgtggggcttacagaaatgactgccggtcatttgaatgagacctggaacaaatcgtttctcagaagtacttttctgttcatcaccagtctgtaaaatacatgtacctatagaaatagaacactgcctctgagttttgatgctgtatttgctgccagacactgagcttctgagacatccctgattctctctccatttggaattacaaccattgtattttgtttgtggcataaattacagtcatctgtctttcactggaatgaagaccatgcctaggaacattttttaaggactcagctgtggcttttagggcttggttcataccatgggggaaaaaaaagtcctaggagaaagcgacgtggctcattagtgttgcctcttcagtgctcaagccgcctggtggattcctatgacacagggggcctggaaagaaagggaaagtggatttaaaatatatatatacgtaacccaagccccataacccctaactggacaaatgaggtctgtttctttgggcctgaggctgtgccatataaagtcttattttgggactttacaaacttgtcctaactatcttgtggatagtgggctgtgacaatctggaatagagaacgttcacacttcgctcctttaaagaagcgaccccagatctgcaaggtaagtccaacaaccaagaatgattttttctccagtgaaaactccttttgtgctttaaacttgatctcattcgaaatactgaaaacagaaaaatactctctcatgtctctcaggttgtgttgatgtttttcaggatttcagtccttttttgacagcgaaagaggagaccaaacacagtgtggtttccctgctattcttccggggagaagtgacatatgacccagatgaggtcaggctctgagggatggtcctagatgctcactggctgttggctgtgtgctttccatcacgaagggctcctcctgtcctttggtgccattcattcatggtacacatatttattatcttctgggcaccaggcagcaagcacaggaggctttctctctaaccttgttaggtcatgggtcccgtcctttggagagtttacctcaatggagaagtactggcgagacttttccattagcctcattttctgtcctgctccaggaaactccatccccaaacagggccaaagaggattcaccaagatgccagtggtgagacttggaactcgcctcggctttctcatgatcagaaagttgaactactgaaaaatgcactgctcatccataaacctattagctttcaatgcttctatttttatataccagcattgagtttgttcattcctagaaacaaaggacataactttggactggacacattttaacttttcattcttttttttt

SEQ ID NO: 98809 - DNA, 1055 bp, Homo sapiens
aaaagagaactgtggaatagatagtagagataccctatattctccaccaggttttcaaatccctgtcattagccactacacaaaatgctcaatggtctatccagctcttttcaaataacactgaaaagggctgaattaacatttcacctctgccacttggtcactatgtgaactaaaaaaaattaaaagtctcctactattgtgaggctatttcttgttcttctgttctccaggagggtgaaatagatgactataaggcctcctttccagatctagctgacttctcttccaccttttagatcttcagcaccagagcccatgtattttgtctgagggtccattcaaggccagttttttggtgtttggtacttcttctgttagcataagtcattcaaccactactatcacatagcatctgctttgccccaaggtacagaacaagttgaggtattagatacactattatcagttctaaattctttttgctgatggtacttaaatagctttgaagcttattatggcttacctataatgagatgtagtataacatggtatgtgattcagcacaaaattaggctaacatcatggtgtgctaccaagagcacagaggcttccagaacaagcttaagaaccacccttaaagttaattgacatcgagtgaagatattttcattgtaaggtcattttgaccttgtcggtgctcagagcctacatcttcctcattaatgcttttggcttaaagtcagaagtaaatgcaaactattggcttttgtctaataacaaatattattgctatatatccacactcaattaaatgtccaaaattctatgtggtaacatttgttgttgactcaaaattgaaagaataattatatcttgattatttttgctgtaaacatttacagaattgtacttagaaaatcaaacttatattgaaataatggacacaaaagacaggttacaatggcaaggtattatttggacacaaaactgactgataaaacaaatctttgttaaaatatttatataaaaaagaaataatacaagtcaagtca

SEQ ID NO: 98810 - DNA, 1046 bp, Homo sapiens
aagtcagagtctcttttgcgaagagtgtttaggtgtgctaatagcagaatggagcggggcaggggactggaggcagggggcagggggcagggccacatgatctctgagggccgtcaccaaaactgacaccacattgtggatttgactgggctctagccacttgagaacattgatgcatcttccctttagagtacacctcagtgcaacagctggcttccctctcctgttgccagtgatactcaggtctagctttggctcatgtgaaggagttggagctgttcccaggctccagcttgctggcagcttcatgcacaagaaacatgccagtcggaagggtgaaccttgaacagcagcttgcctggcagcttaacataccatcctgttgtcttccataggtgattaaagccattgaggaaggctatcggttaccccctccaatggactgccccattgcgctccaccagctgatgctagactgctggcagaaggagaggagcgacaggcctaaatttgggcagattgtcaacatgttggacaaactcatccgcaaccccaacagcttgaagaggacagggacggagagctccaggtcagccatgcttacttaatagtgatgtatgaaagaacacattagaggaggcaggcaagtggtgactcacttaaattcctgccttttcatcagaggccacttcatggctctctgcaacctgggtggcttctttctcaattagtagagtatttcaggtagttctattcagcattttgaataactaatacctgtcaggcatcaaatagttataaggaaaaaactttaaaaaataataatagtaggaaagaaataactgaagtgcctattttaggatgccaggcctgaaatttaggaagaggggtgaaatgtacttttagaagacgttcagatcagtaggtgctatattttgaaatggggcaggaacactggaatagtaagaaataaagattagaaaacaggtctttaagcacggcaattttaagttgatttataaagtgttaattgtaagaaagagatt

SEQ ID NO: 98811 - DNA, 1009 bp, Homo sapiens
tggcatatggtaaatggagtgaaagtaactgttgaaaatatgtcaaacttagcaagttttttgtttagtttaatcctctgccccccaaaatatttagtagtaaactgagaaaatatgctttgctaacctatgagccatcttccaagctggcagtggatagggagcttatgaaagagcattaatcagtctgaggggttataacaatttatgttccgctggcatcagcccagtgttgctttcattctcctcaattcagtgcaaaatgttctcatcaagtctagagtcaacacgatgcacctgggaagataaaagaaacccaggtgatcaaactgacgtagtgtaattgctagaaacaaatagaataaggttcaataagacagcatagagaagtctgctttacaaagaaaagtaggtgatactgatacatgatattggcaaaatacataggagaaaaaggatcagagggcttaataaatcacaagatgatttgttaaactgaaacggtgctcttattaaaaagatcacagtcatactaatccatggaccctggacccaacagactcttttctttcgaaggccaatttctgagcagtcaatagacccaccacagggtgagtccagtgaagtcattgggatggctcaaccactgcttatttctctggcagctatcatgttgatagaaagaaaaataaatggagtgatttaaagcaaataaaacttttagactcccaaacaaataaaagcacctccagaatctcagaggatatccataaacaaaggtaatgagtagccaaaaaactgtgaagtagttctcctctataaatttggcatgtcctaccatattattttcttggaatttataccccaaagcagggggaggatgttagagaaaaggctataagaaaataatttaatgcctgtgaagacagattagaaaaattagaattagcaaagagactgttgaatgagttatttatgacttactaggcaaggagaccactctgggcac

SEQ ID NO: 98812 - DNA, 1018 bp, Homo sapiens
tttgaaatgatacattaaactcaaatttcttaatacagatatatctagcaagctagttcaacattacaaccaatgactattgatttcaaggacaagaattaaatggcctacatggtacagtatgggagatagatacatacgcacatagattcatggataaaaaatatgggatagtatttttacttggtgaactttcaaaaccagagtaaaacaaaattaaactttgacttttaagaaaatgcaaagattatgaaaaaataaatttcacatatgataaaacggacatgaaaggcttattgaaagaaaactagtgaatattttaaagctggcatcgttgtaattagagctcaccccttgaggactctaaaataaagcttcactcaatgacccttggtaaattatgcacatccctttaaatgtaccatctggactacttcgtaagggagtatccacaatgactgcaatttcagaaaaggattcaataatgacactaataagattccagagtaatagaatttaattacaaacatctccagtgagaaagaaagaaaaaaaaataaaagaaagcattgatcaaggggtcttcctagaacacgttttagctaattctggaaaagtttacattagttctggtaagattgggaatcatattaaaattaaatggccacctatacttttcgaactttcctaattttttatgtatgtggtagtccattatcagagagtgtttacaaatgcaaggtattcagtttatcagttataattatattttggaaacttcttttcaaaaattctctctgtggtggaatgttacctatccatctgccttgtcttcctccaacaacaggcagttgcacagccttgacagttagagccacgtgcacttaagaaatgggatgcaggttgccttatcaattaaagaatgttcaatgcaggccgggccctgtggctcacgcctgtaatcccagcactttgggaggccgaggcgggtggatcacaaggtcaggagttcgagacc

SEQ ID NO: 98813 - DNA, 1589 bp, Homo sapiens
aggcctggaaataatgttgagtttcattgcataccggatacagatacccaaaaagattcaagtaataaatgcttggtgagaattaacttggcctaatgctaatgagattgttcctcactccttttctatgcagaaaaatgatggcagatttacagtcattcagctggtgggcatgcttcgtggcattgggtctgggatgaagtatttatctgatatgagctatgtgcatcgtgatctggccgcacggaacatcctggtgaacagcaacttggtctgcaaagtgtctgattttggcatgtcccgagtgcttgaggatgatccggaagcagcttacaccaccagggtaagaaagatcggtgacatctgggctttcactctggtgaaactgttcctctcttctcactttgagattgaagccctttgtaatttttttattttttaagttttctcatcccttgaagcctcctcatattcctgcatccatttttaaaccatgtttccaataaaagagggattttgaagctgactgtagatgtatgaccatattaacagccacaaactagaagcaaaatgaattatctttccctctatgtttttttttgggagggcagggggaagaaagtgctaatgaacaataagacggtgtcttaaataaaaatgagctgagaagcaagcattaaggatcagtttacacaacaaatgatcaattactgagaaaatcaggaggtagcttcacttatttatttttttgcacttgtatttgcctgcctgtcttcctgcctctttcttcctttttttttttttgttgttgttttaggttttgtatttgccttttttctattctttaaaaaaaatccttattctaaatgagacaaagcaatgtttctagttggttggctaccaaatctcagaatgtatatacaggatttataaaacatttataccatgcaaggttttccagtatctaatggccttcattttaccactggtagataagcggggattaggacacagtgaagagttttaagtacacagttaatggctgtgctatcttagctcgactatctgaatataaaatactaatggaataaacacagaatcataaaacagttattggccattaacactgacactgttaaaatcaacacgaagctgacagttaccagccattttccccttttaacactcttcattttgcatctgcaatcccaagcaatgggggttttttgttgttggttggttggctgagctttttttggaggggggcaggggggtatagtattctatttctttggctccagttttgattcttatgcttgtcctcttttgaattccaagtccattcgtttagaaaagaatagatctttgtgaatgttgaagatcttttattttttcccagtagttggagaaagaaaagttaaaggaggcttctagaatgatacatttacatagataaaaccttagccaaatatttaagcaggggggaatgcagtacaagtgtccttctgtgcgtaacaaggatgaatgcaatacactgggttttcagagtttactgcaatgtatcaaagcaatttccagtacaatttatt

SEQ ID NO: 98814 - DNA, 1057 bp, Homo sapiens
ataaatgcttttgtgagtatattatatgtgtgtatatacatgaaatttccttttttgagtataaaatatcatgtgttataaagaactctagtacaaattttgattttattcttagagagaaacttaatgcaatctgaaatcagattgattgcattcaaaagatttactctgtttcttactaactaagattttgtgtaggttttttgcattaagccttagttttctctaataaaatggggctaatagtagcatctacttcagggttgcatggaggattttgtgaaataatctatgcaaagcactagcaaacagcctggcgtgtaacaagcactcaaggaatgttagctgttattctttcatcttgaatgtgtttctggtccatcgtagattctttttctctctcaaaggtgaatttggtgaggtatgcagtgggcgtctcaaagtgcctggcaagagagagatctgtgtggctatcaagactctgaaagctggttatacagacaaacagaggagagacttcctgagtgaggccagcatcatgggacagtttgaccatccgaacatcattcacttggaaggcgtggtcactaaatgtacgtgggtcaccccctttacaaagccaagctagaagttactgggaaattaaacacacattttctttccagggaaatgacagatggcgcagacccactgattgctaataggaggaaatcagtgcaggacaagtcattaatcttgtagtcagctctaaatgggtctttggttttggctggataccctatctccaaggcagcttgtgtgagattttagagaaattaatattgcagatttgtggtatgccatgccatccttcagatatttgctaggccaaactgattgtcatagggtgggctcaagcagatggtaagcaaaataaaatttaagtacttttcctataaagcacaacaaaacctggccacaccttgtgctggaatctttggttccagatgcagagagtgaagcttgggaatcttgaatatattgcgggatttgcttgtctgctctgcctgatttatgg

SEQ ID NO: 98815 - DNA, 1100 bp, Homo sapiens
gcctatgtgggcggattacttgaggtcaagagtttgagaccagcttggccaacatggtgaaaccctggctctactaaaaatacaaaattagccgagcatgggtggcgggtgcctataatcccagctactcaggaggctgaggcaggaggatcgcttgagccctagaggtggaggttgcagtgagctgagatcatagcactgcactccggcctgagcaacagagtgacactctgtctcaaaaaataataaattaaataaataaataaataaataaaaatagaccctttgaaaagttaaatgcaaaggaaaatgcaagcttatgatttgggactgaaatactgtacttcacagttagctgtagtcattggggtctctgttttgctaagttggttcctgctttgcaaacagttagggaaggagataatatatgagatgagagcactttgaaaagttaaatgcagtgtaaaagtgcaaggttttattatttgccagggaattatccccacggagaaacatctgtaggctctgagggtctgattgctgagctggttcttgcgctgctgacaattaggagaggaatgtgggagggaaggttggagcatgtgaccgggatccgctgcctctctggttgcactgcctggctcctttaggttctctgttattctctctttttcgtaatcatctgcctttctacctgttcaaagtttaagagttcagggtataggattttgacaggaccacactgccaagacacctggctttgcgggaatttttacttatctcagaccgtgtttctttttctgtaagagtcttgccttaccttgtctttgaagctctaagaaaacatagaatgtaaattccagtgtaaattgtacctttctgacagaaacataaatgtatacattttatttactaatttggtctcaacttcccaagctttagacagctgtgatatcaacggagttgactttctgattcctttaagtgatatatattctcctgactcactatgtatatatattcaagatttttgatttgcaaggcttgagttgattttccagtttgtataagagagatatatacatttctgattgaatatt

SEQ ID NO: 98816 - DNA, 1063 bp, Homo sapiens
ttgtttgttatattgaatagtcaaggtgccaggaacagcacgttggttgagagggctcacgctgttctgcaacaatgtctgctaatacccttattaccatgtcccttggactgcaggagggcttagttcacactctttcaaagtttcacctgcaatgtgggctcttttctccaactcctgcggctgaaagggtccatgtttccttctggagcattcactaacaaaacactccactccttcccagttttaatcagcttgtccacatctctgtaattagaaaaccttcaacaaagttttccttctgtcattcaagtgatcagcctgagatgtcagttttgagttaggacttcttcaggcagtgtggcttcctgcaggctggctgccccagtggtgaacttcaatgggctttctttcctgggatgataatgggccacactgtcctacactgagccaaggcaaaagggccatcaggtgttaaaggtagaacaggacacaggcatttttgttttccaggtatttctaaaaagcaaacagactactattagcctttcaacagtaatccttgtggttttttttcagccatttcctgcagtcttaagggtcctctcctccaaataacactccacgtaaaaaaatctcatttaaaaacacaccttcaccactaatttaattcctccttctatgtttagaagtctgaggaagggatgggcgtgtcaaccttataattaatgacccctgtcattttgtatttcctctggctttgcacatatttaatgaatgtgcttgatgtaaaacagataaacgctttcccgggcagcttcaggccatgggtttctatggtatattccaggtttttgtttcattgacaattttaagttggtaccaaagctttctcactctatgcatttgtttttccttcttcaaaggaaagaaattcaaatcagtgttcgagatcttaagtggtttaaaagagatacttgtaattttagataatgcttttaggagctctgataagacacaatgtttcaggctggcaggaccctatcactcccttgggaccaat

SEQ ID NO: 98817 - DNA, 1737 bp, Homo sapiens
cgagatctacttttttcttttggccaaatggaacatgtaagcatttagggatcgcggtgaaagaatcaaactactaaatttataaaatacctaaaatgagatgttatactaggcacattgatttagctatattgtatatttttaccacccacatttatgttaagcaacttaattttatattttctgtaggcatctttgatctgtgtctttctcatcactcaagatataatttcagaattctttcagctttccagagcacataattgtacttgttatctaggttagtttaaggcagaacacttcttgtacctatatgatgctgtccctataaattttatttcaaaccacaaacaaatctctatttgtacattctctccagcaaatcaacatttccacatgtatatatttatatatttgtgatctccacaacataaccacttttctatattgtttttttaaaatgatctttaaaaggactgttcacagtgacatcctaaaatacaattataaggtcataacctccaagactaatgactgaatctatgctaattttctctgacaccctcttcccttttatagtaatgatttcatcaggttatctccaaaagcatcacaaactagtattaattcagattattttagggcagtgttttttccaaaacagtattaccgtattgattgattgattgagacagagtctcactctgttgcccaggctggcatgcaataactcagtctcagctcactgagacctccgcctcatgggttcaagtgattctcatgcctcagcctcacaagtagctgggattacaggcatgtactaccacacccagctaatttttgtatgtgtagtagagacagggtttcaccatgttggccaggctggtctcaaacccctgacctcaagtgaactgcccacctcggcctcccagagtgctgggattacaggcgtgagctaccacacccggccccaaaacagtattttattattcaaatgtgaaaaacaattttaagaaaagtctagaatacaagaatagcccctatttcttaaaggataacttggtagtgagggaaagtattactgataaccaggcacatgctgtttttatacgaaccttctaatgattgctagtgacagtgggtttccatttatgttagggttataaagtaccccttttacctggataaggaaaaagaagtgaattgattttaagaaaaaaatgaagtggttatggcaaaatttatatatatatattaggtactggaggcctaaagagattaaacaaataaacgaaggtcacatggtgagttagttgctgatcaggacaggaattcagctctcctgacttccaatactgggatagatatattattttaatatcttcttaactgacaaagttgacctacataaaaaagctgacattggcagttctatggaaccaaagcttcaagactctgctagtgatgttggtaagatttgtaatctgtgaattaatatgcaaatctgttgcacaatataaagtcagagtttgcaagttaattttctcctcctattgaaggttaagatattccactttggagctaagagttcacacaatgctgaaacagttatggttcagcctgtgctaccacacctggttaatttttgtatttttaatagagatggggtttcaccatgttggccaggctggtcgcgaacccctgacctcaggtggtccgcctgggccctaatttcct

SEQ ID NO: 98818 - DNA, 1084 bp, Homo sapiens
ttttaaagataatcacttattggcttccttattaaaagtagaaaagggacaggattttcccattgaaaccatgttacaacacattttacattttctagacagaaaatagaaaaagataagggaccttctcacagttatttcttttaaattgctgggtgtggaactagaaaagccaccaaccatcatttaatgttcctttcaaaaaaaaagagtaggaggaaagatctggatatggtcagcgtcaataacaatcatacctgaatttgcatttctttcaacaagtaagaagtaacaatagtacttataacatccaagagaatacaggctccagagagtttattcatctccatttactttcagtttctgagttgactggcttgactcctttaatattgcacctagtaagtaagcaggagatttattttgccaccttccccaattttatcttgccatgatgtaggatcagaatgagcgaagctatcgtatagttcggacagctgccaggaacacagatatcaaaggcctgaaccctctcacttcctatgttttccacgtgcgagccaggacagcagctggctatggagacttcagtgagcccttggaggttacaaccaacacaggtaacaaggaccacccagactcagtcacttctgaggctatttttataatacagctgaatcccattacagtgaaatctaaggagttgtctgtaatttttggttcagcagacattttgctgcaatgaatatgtcttgaaataagttagccaatgtctgtaacttagaaaacttcatgtgatttagagaaaagcattttcgaaatactgatttgtcttttcctatgaatgaaaaatgttgcctatttttctcttgttttgagccttctagaaagcatgaaaaatgggattactaaactgacaaattgagggttacatagctaccctacattaatatagggaattttctccctgagaagattaaagaaggcgccaaaaatattttttacctacttatttttaagaatcatttaaatcaagttacataagcttttttttttttttaaagaccctttggacaaacatatc

SEQ ID NO: 98819 - DNA, 1045 bp, Homo sapiens
ttgcatgaaattaaagtccagtaagatggcactcataatactgggaggtaggattagatgtagctttactgagcttaaaatgaggtcttccaaaggctgttatggcttacaaaaggttaaaaaccagacagccttctctgtacctacagccttttatgagaaatgtctctacgtgctgtggaaatggtactacaggcctgtgagcccactaggcttttacttcagagattctctttttaagacaaacacatgcaaaaatatactggagagaaggatgaaaatgatatgcttctatactgaagagtaaaatggtcaagggggagacaagacaatctttcacacttttcttaaataagatgaaattatttctggctaccaccaaaaccatttattttcctaaagaaaatatcttttgtcttttgtttttttctaacagcaccatcatccattgctttggtccaggctaaagaagtcacaagatacagtgtggcactggcttggctggaaccagatcggcccaatggggtaatcctggaatatgaagtcaagtattatgagaaggtattacttgagtgaacaacactcctttcctttcttccttccttccttccttctttgttttcttctttcctttctccttccctccctccctccctctcttcttttcttccttctttcctcgactccttcccatcctcctttgctccctcccttctgtttaagggttagccagttgtaagtcatggaataccagtgaatcctcaaatcaaatgcattttgcttcccaattaagtatgattatgaaatttatcatttacttagttatcctgaaaagtagaaaataacaataatgataatacattgtattgtaatataactatatctttactttctagtaatggaaatcaagatagctaagaagttctaatctatgaaccttctatcagggagagtgactcataacagttgaaataatgatctgtttaagtagatcactgctattcagaataaagatgtgggttttgatgacttttaatagaaagtc

SEQ ID NO: 98820 - DNA, 2139 bp, Homo sapiens
ggactcaagaaaacaattttctagctcaggaaccatgtgaagctttcctctctttcttttctccgtatctcctcttctcttctccatcccatttgggtgtcacaaggaccaaactgctgcagtaaaatgacttgtaggtgtttaatggcaagtcattgaggaagtgaataaaagaaaattgcagcattcacgtcagtggggagcaaggagaactgctgagctttgaaccaaagaaagttaaatttaccattttcttaaagggagccacctctgtttgacatcaaagcatctcctgtaatttctccttgtgaaatgcaccactgttagagagtcatgatagagccccctaatctgtgctgtttctgtttatcaaaaacacacacagagagaaaacccacatgtaccttctcagtgcattgtggtctgctctcaaaccaaatgtaaccacaggtacatagcaaatggggattctatttcgaaagcattctcagtttctcagggatttgtagaactgggaatacaacattctttgggagtgaaatttatcttggacctctattggaaagctcagatcattcaactggaaagctttggtgaattttttcctttcctcctcttttggtttttgcttcatcgttttttaaaaatggtattttgctacaatttcacttgtgtccatttggtatgtggaaaaacagagtctgttcctaataatgctgctcgcccacactatgactgcaaagggctctccaccctattacccccatgtttcaagtttatgtccattggtggctgttgcatatgtagtaactaatggcttctgctggcagtgactggctttgccctagtccatctttggaggcttaggatcctttctggatttatcattatgacttgggagtctcaccatcactccaccttggcagttaagaagtcaggagaactatttgcatatgccctacagatacagaggagaaatgcagagcaaattgtcaacaccttcatcagcctaaagagcagaagctcaaaatgctgtctgtaacaggtgcagtgatgcctagttttaatgttaacttacatttgaatgacattttacagcctgtgtttgaaaaatgttcagaagcatcacacagaccttagaaacagagactccatttataattagagttgtcatttgcttcaccccaattgtcaatatctcagttaacctaaatagtaaaaccaaccccacaaaaggtcctttgaaacaggtgcagatggaaagttgttttaaggatggcttacttctggtactttatgtttagaaaatgtttgatatctacagtaaagattttttagataaattttaatatgtaaaaacttttattcatttgacataattattgagcaccactgaatgcatgtgtcaccatgatttgtaggttaaaaagaagaagaaatgagagacaagttttgggttaaaaactgctgaaatctccttaggggtaataaaaaatgatggtctcggggataggcaccttagaccaggaaaattgacatctatgagtcattggagattttgctgtaaaggtttgaaaattaaggactccattgaattaaatcacacatcttttttaaagagctaccctttaggagtgcttgccttatgatttttacatagtcatctttctttaaccatgctactgtcaactagcatgaccagctctcattgctatgtgtcatgtctgaattctagccattaaagaatgcctgcatttgtctggaggcacaaaactgtccttaaaacaagtatctcctctatgaaagaagtccgtgggtagataggaatgcttttcaatctatgatgcatctctttcttgtagtaagaatgtaaaaaaaaaaaaaaaagaatgtgttcatcagccccccagcttcttcctggctttgcttctgacactcagcaggtgtattgagtgtctacagatagaatgtgtgagaaagtgccctctacttactcctccccatcacccatgagagaacttgaattagaagaggggcagtaggaatcgtctcctcttaaattctagaaaaatgggccctctgacttgacattagaaagtgttttttctttaagactactataaaaatttcccaatagtt

SEQ ID NO: 98821 - DNA, 1025 bp, Homo sapiens
atacccctgtacctaacagagcagactttagaaagatttacgttgttgctgctgccgctactgctgtgggaaaacagtcacttaaaccttcaagtctcctatttcttaccatggaaaggaggggcagagatcagccgctttctgtagatcagtggttgagaatgagggctctaggaccagatttttgaattatgaccacatataagctataacttggagcaagttattcaaactctctgtaccttatcttcttgatctataaaaatgaggataataatagtacctgtctcatagagtttttgtgaggtttacatgaattaagtcctgcaagagatttagaacaatgctcagcacatcataattactcaataaatgctagtttcgtgtgtatgttgttacagacatgtggcatagagggaggatcacatacttttgagccaggtggacttgagttttaaatctcattttatggctttggtcaaattatttaatttctttgtacctgagtttccaagtctgaaatgtaagggtgatcattataactacttcagagagttatagggatgaaatgatgtcaggtgtgcgtgtatgtgcaagtgccttgcccaggagtttactggcatctgatttgctcctttccccattctttgttttgtggcaattcacagggcctcagttttcatctgcttaagcagttaataattcagtgaaaactaaattaactcttttctacaaagaaaactcaaccaaaccattttgagaaccccaatgtgttttcccatttagcattagcataagatcagctgaatcttttggctcagtgttttgcgattctgccgatttcattcactgttagaagactagtggccgtgattgtggccgtgattttgtccgtgggaagccacgcggcctctgtcactggctttgctgacctcagggcagcgcattccagtttctcacaaatgggtggatatctgctcatcgtgcatgaccagctggagtttccgggagggaacccaaaggcc

SEQ ID NO: 98822 - DNA, 1057 bp, Homo sapiens
catcactgagatagtgatgaagacggagtaatttataatatattcaggctccattgaaagccaaggaattcagccccttgagctggcaccttgcaaatattgtacttgtctcatgggttctgttagtttgagaaataaaaaatagaaatctaatttaaaaggatttctaataactcagaatagctaatgttggtttcctctgaggtcatatgagcctctcgtgttggtgcttttctcttcattgtgtattatagtgattagatattggctatgaaaattattacttttcatttgtttgtgtgtttggaggttgattacctagtcacttgtttataacaaaagctgtaaatgatactctttgacagagttaaataaggctatcttcatgcccttgtgaaatggaaattgatgaaaatgtaacactgagtaccttttatcaacataaatttcaaaacatggaattcagaaggattcatccaacacatactcttttctattatctggattaatatacctcacttcattcattcactctaatcaggttcatgacctgaagatgatttggcccctgttggaagagatcgttagtattactagtatattaatgttttgcccattgatgttttctgggttcatccactgactttttctttaacttcacagatgatttggatttccctatagcaagtggcaaagccacaacacttctgaattagttatcacacttaaaaagtcaagatgacaacaaccatagtggatctatttattgaagcagacaggctcttttagcggaatgatcaatgtcttacctctttctgaaaggcttttcagaggtaggaaatcatcaagcatctgatataaagtaatgaacaaggcttttgattggtcaagtttctggagcaggcttttaagtatttctgcctgtaaatgtagaaatctgagtgtgaaaagtaaaggcaacagcaaagatttactgggtgcatctatcaccctggcttttagagtctttgtgattaatacctgtttaattggggactgatctagatgctttggacgt

SEQ ID NO: 98823 - DNA, 1047 bp, Homo sapiens
gatgtattgtttggggagaaatatcaatgagagccctttctatctcactgtaaactcttcaaggattcaccttaactgtacgtgtttgttggagggtagcattttctctttccctccacttctttttcctctacctatttcagaaaacacaaaaataatttccattaacttccaataacttcctccatagtgtgcaggagctttcctccagtgtctttcttagatatcatgctgtggaactatttctaggtaagatgcaattctaataaactcctccagtatttaggaatggactaaatactgacttctttgggtggagccagttatgctgaatttcacacttcagcaaattgagttcatgagagaggcccctgtgacatgctgtgaaccccctggttttctttctttcttcctttttttaaaaaaataaaaacaaaaacaaaaaacaagtcctaaaacagtaatagctttcgtaatacattctttattatttcttatgactacaaaagtcatctcaattctcaattctcaaacacagatccagttgaagatatctactgaccttaataacattttaaaatttaatagctcagttgtttctgccccattcttataatgcctatagaaatttaaactatctagcacatagaacttagtttctagctgatactctaaaaataaaaaataaaataaaaatacaattctagggttacagatttccaagcttaaaacctcttctcctaaatgattatcctgttcctaacctgtaccatagcttttgagaaaattgtcaaaaagacagattttcaaatatgaggtctgcaagaacataattgcatggccacattttcagagagcgtagcatgtggtgaccatttgtgtaagatgcattctcaaaatgttctgactgtaatttaacccaaaggtctctatcccacttctttccactcaccaggtgcttccttacacttgtctacatagcaagcaagaaacagggcaggaaagatttcttctttataaaaaaggttccctaaagtgatactttag

SEQ ID NO: 98824 - DNA, 3096 bp, Homo sapiens
gttgtggtctgagatcaaagggacaagcagaaagcacattcctgctgattctgagaattgttttggaatactaaacctaaatgagatgatgtgatctcggttcatgcaaccactgcctcccaggttccagcgattctcatgcctcagcttcctgagtagctgggattacaggcgggcgccaccacatccagctaagttttctattttttagtagagatggggttttccatgttgcccaggctggtctcaaatacctggcctcaagtgcatccatctgcttcagcctcccaaagttctgggattacaggtgtgagccacctcacctggccaaatgatgatatttttaagacacaaatgtttgcttcctttagtgccctaaagcaggggtcagcaagctatggcccaagggccaaatcgaatcctccagattgggacaacccacgaatattggcttttatatttctaatgggttcaacataataaaaaacagaataatattttgtgacatttggaaattatataaaattcaagtattggcattcataaataaagttttactggaacaaattcccactcatgtgtttatatattgtgtaagagtgttttcacgtgacaatggcatagttgagtagctgcaacagagggcaaatgtccggcaaagcgaacatgggcactatctcactgctgacacaaaatgtttgctgatctgctctggagtactaaatcaagaaaggagaccagtaagaacaaggttgagaagctattgaaatactggtatcatttgtggaatattgttttggcaaaggatgtgatgggtaacatttaggtaaatctcacatttgaaacaatcttcaagacaccttattttgtaaaggttttgactcagaaaaaaaattaactaaaataattaggatttcagtcataactttgctttcttgaaccacaaattttttcccattggcactcagatttaaatggattatgtgagacatgcttcactgatattctggttctctttaaagtatgcattcttcacactattgcctaggtcctatagttgctgacagcaattttctttttaaataattctatgttagcctggtgcagcggctcacgcctgtaatcccagtactttgggaggctagggcgagtggatcacttgagcccaagagttcaagaccagcctacccaacatggcaaaaacccatctctactaaaaataccaaaattagacgggtgttgtggtgcacgcctgtaatcccagctactcaggagactgaggcacacgagaattgcttgaacccaggaggtggaggctgcagtgagccaagatcttgccactgcattctagcctggatgacagagtgagactcgatctcaaaataataataattctatgctctgctcctgtgccttatcttctctccgagatgatgtcatgcttgcctttgatctccagtaaatcgtgttatttttccttacccctaagaaatttaaaggaaaaacaaatgatggtactagtgaaatcgagaaaatgaagaactccttctagagattcattttaaaatccttcaaacagacaacaaagcaattccactgagagattttgctgaaacgttgtttgcgcatcctcagttgttagtagggaatcggtagctggttggagagtcctttctgtgcctggtaattataggcccaagcaagcacacaatgagcttcagaggagccaggctgtggttttctcattaatagctctggtctagccatgggatcctggtttacttcataaggcctatgaaatgcacatttaaaaacaacatgcggtacttttttttttttttttaagaaacagtctcttgattctaaccttatactgagaagaatttcatttccagaatactgttgctaccactataattaataagcatactcactaattatgatcgtaattaaaaataaaataaaccagcagatatacaatggcgcagcctcttgtgtgtggcaccagtgtctgtgaatttgtattcggggtgggtgccacaagtcctggtgaggagaaaaaaaaataaaagcctgccaaaagagcctactaaattatccaacttttcaaggttgactgaatagcacagacaaatagtatgtctatagaacgtagtggtaattattgcatataagcaaaagttagattgcatttttttaaaaaagatgtgaatattccactctaagaaaatgaagtctttatttatacacccaggactgagaacactatttttcctgagtcctttccttttgctcctacagaaagatatatgcatgttcatttgtaagaagagaaattcattcaccagtaatcacttgacagcctaattctggtttgtttctcatctctcagtgttgtgcttgttccatcgaacactaaccaccaacttttacaccctctggagaagccatcaagagatttaaaaaataagtgcctggctgagatgagaaatgggcagggcagggctagcaagggtttccaatgggcttctaaattatctagttgtcactccaactggctcaattaattactgtctccccagaggagccagatgggtctccagaaaccagtctgcaattgaacatcaatgaaaagatccagagaaactttatcaaagcttccattaaccccctgctgatgtctttaaatagttttttttttttttttttttttcctttaaacaccttgaaaacccaaaagccatgcacaggacttatcttgcattaagagatcttaaatctacagggactaattgaaatgcctgtccatgtcactcaaatacatagagaattcttctgagtctcaacatccctgtggcatttttgtgatgtgggtatacaataagagggtatcctgtatattttcttcaggtaaagactggtgaggatgttttttagggtttacatgttaatctgtcaagataagcaaacctttggtctatctgtcagtattaaaaatatctctcttatttaatgaaccttcttctggtgtccacctttccacccgccacccccacaacctgtactcatgctttctcattctttgcttctgccaaa

SEQ ID NO: 98825 - DNA, 1122 bp, Homo sapiens
aattctaagagtgggaaaacattctccaaatgcttcagcagaattatcacctgaattctgcctgccctccttctctctaattccttgccttgccaagggatttacgttgcggggggaaaacagtaagatagtgaacagttgttctaaattgggggtgatttctgctcctacccctaatgggcaatgtttagaggcaatttttggtgcagttgcatctagtgggtagaagccaggcaggctgataaacatcttataattcacaacacagcatccccaatcctccgcaatgaagaattttctggtccaaaatgtccatagggctaaggctgaaaaactctgttctagcaatagtttttaagaacagacttcatagcagtgcccaccatttcagggttccatagccatgtggcctttgcttgagctggcctgtggctgaacacatagggaagattccacatttctctggctccattgccccatgctgaaagcatgatgctcccgttactgttctcagagaacaggcagttgtaaagggcctttcaaggcccctcatgaatcctgttgtagctgttttgccatcagatgaacgggcgctgcttgttaggctgaccttgttctctagggttggacaattaagcattaactgcaaaataataataataataataataataataaaataaagtggcattacacctcattataatgccactgtgccacatgtagtcattgtacagttccatctgtttgttgattaacatttatttacagtaaaatcaaatcagttaactctctttgtcaagtaatgataaatttaataaaaccaaaataatgaataaagaaaagaaataactaagtgtaagaggcacactgtcttttattattcaactggtaagttcccattctttctctctctgccatcttttaattagacatattatgttatttgagtgggataatggagaacagtgggaattctcatccccactgggtataattgctacctgtcttctagatagtaagaggaaagcttcaagaaaatggtgggagaaaggggaaaatcttacagcaatcaatttaggtaatatgctgtaggcatggcagagccagactttgtggagt

SEQ ID NO: 98826 - DNA, 1085 bp, Homo sapiens
tcgaagctcccctaagcatatttacatacacacaattatgttctaattgcaattgctcctatcatttcattaaattaaattccttgaggaccactataggcaatggtgtctcactctataaggaatacatagaattaatgaacgttagcatttagcacctggaggctacaaaagttagtggttctccatctttgctctgttttcacagggttctttctctcatcagtaatatgttagaaatgataaatcaaatcaatcacgcaaaacctgctagaattcttgggtcctatgttcaccacctttgagactttaagagttgaggagcagctccatgaaggtgaggtgactcacccatgctaatgtcagagccagtactaaaaagcagggagaatcctactcctgaaagtagaaagttgctttcctttaaaattaggagataatgaatggcattcatgtattcagcttggcattctccccatttatgagaccagattatgtgagtatctgggcatggacatggagattgaactgggctttgatcatttaattgtagaatgtggtgtgaatgggcctgtgttctcacaaggttatttaaacaatcctaacccaaatcttactcctggggtcttagggggttaataaacacccttttgctccccttctgggttgaaaaccagttgacacagaagacaaaggaaatctgaatgtctgtcagctttttgctgataagctgatggaaggatgtgagctttatatctgtggccaaaagggcttgcttcagtgacacttgcagcccagctggctacctgcagcctctccgcctgccctgctaaggttgttggaaggacactctgtgcaggcagacaggtaggcagataggcagataggcagatagacaggtctgagagtgggtggagctgaggacagagtacttttcccaaattctctaatgagatgagtcactcccagcctcacccccatgccagaaacaatgaagggaagaggtgggaaaagagtaagggtgggggtgttacttttccagctgaagtcgtacccagtaaaattggagaagaggaagctcttgg

SEQ ID NO: 98827 - DNA, 1045 bp, Homo sapiens
aatccaaagccattatttttccattttgccctgaactctttggaataaataaaaagttaagacttggggaaggttttgagcaggggctagaatggcaagtcttaccggaatgtatcttcagctctgcaaatgtgaacagtcttttaaaatatctaatgtgaacgggtcatccagctaggcctttgtcttttaattctgaatttttaggttgtgaacactgttcgcagtcattagttttatttttctacaaagactagtatgatttaggagtttttgatagaaacatgagtactctgtgattgccaacagtttattagttctcttttggaagaatgcaatggaaatattacatacagatcctgggaacacgcatcggtgctgctggtctctctgaattaggagctgatgcaatgcagaacgatttctgcaccatctggagaatctggttgatgatccaatcagtattcttacatgcagcccccttctacctttttggctattcattcgcaagcactacatcattttcttaaccgaattataagtagggatggacttttggagcctcatctgtaaaaggtgaagtcattctccttggcagagaaaagcctgtgggagatgcgctgaggacaggcttggctcccacagattttgggggagacttctatgaccccctgtacacgtagggatttgagccaagaagttatgtcaacacctactggggcaaaaggtccagagagcacaaagaagacacactaaaatcctccaaaagaagaaaatgcaaaaacatttccgggggtggggtggggtggggtgggatgaagttttattttaaatgtaggtataattcttctagatttaggagaaaagcagacagagaattactctgacacaataaggttttctttgccatggcatgtagtcctgccaaggaggtttgctgaacaggacaaaattccagctccttattttaattttcatgaagggtaatgctgggaagctgttcaaaattaaaaataaatctttcaataaggagacctcctatgtg

SEQ ID NO: 98828 - DNA, 1159 bp, Homo sapiens
gcctgggcttggagcccatttgctggagagttgcttcacatctcaaagtgacaaccgatgccttgtttgtttgcgtgggaaagagaatgacactcacgtaacagccttctattatattgttcttttaaaagatcttttatgctggcttgatttgctttttgctttctttgccaagtgggtttgccttgctttggagagctgcagaaaataatacaaactctgagagattccaaaagggtatttcggttcttggtgtgatgatgtggttttctttctccaggtccaccatctgctcccctgaacttgatttcaaatgtcaacgagacatctgtgaacttggaatggagtagccctcagaatacaggtggccgccaggacatttcctataatgtggtatgcaagaaatgtggagctggtgaccccagcaagtgccgaccctgtggaagtggggtccactacaccccacagcagaatggcttgaagaccaccaaagtctccatcactgacctcctagctcataccaattacacctttgaaatctgggctgtgaatggagtgtccaaatataaccctaacccagaccaatcagtttctgtcactgtgaccaccaaccaagcaggtaggaattgaatctactttattgtatgatctgaatgtatacagagaaaaggcttaaaataatgaattataataaattgctataattgaaatagaatcaatcaagcctgggagctgcgttataatgtaaaagatacttaggggctgggcacggtggcttacacgtgtaatcccagcactttgggaggccagggcaggtggatcacttgagcctgagagtttgatcaagaccagactgggcaacacgatgacaccccatctctacaaaaaaaatacaaaaattagctaggcatggtggtacaaacctgtagtcccagctactcaggaggctcaggtgggaggattgcttgagcccagcagtcagaggttgcagtgagctgagtcactccatgctggatgggattcatctcagtcatttgaattatgatgtccatggctggacatcagagcacttatagattatgtacaattataaaattgatttttaccaatgcagagtgctcttttggtatttgttatattttctaacaaaagcattagc

SEQ ID NO: 98829 - DNA, 1142 bp, Homo sapiens
cccagagccttccttcagaatcgctgcccacaggaagaaggctgccctagcttagcacgtgttttcgtgccagccctccattttgaaatcctgcagcatctttgtcatttttttttccacgtggaagtgctatatctctgagtcctgaaaccatttagttttctgctccatttcttctctgtttagacactgccgtgccccgtcctacatactaattactgactttttgcttctgtggtgcttgattcattgtgtcacattttcccatgtgaaagtggaccaggaaccttggcaaggaggttaatggatttcagagtcactcttatttaaccctggaagtcacagcaaaagaagaaccaatgactgacccatttgataaaccaagccctggtcagcttcagctgcagactagtaatggatttcactatggtggcaagcattacagaattaaaacagggctgaagatagctcactgccacctccatgtttgccttctcaaactggctgaaatttttccttttgttatcattatacctttagtgaggaacacatggtggaataaaaataactccaaatggcagatagtacttttggatttcagtcaaattctgtcactaattagattgcatgaactttcagtattattagatttactttccagatctcagcttcctcgtctttaaaataagggtatttgtccaaatgattttaacatcctatgtagctcttagagtcggtgattttatgtacttcatttattcaaaaagcattcatttgtcattatattccagttaccatgctaaaaactgtaaatgcagttttgaaatctaaacaagaaagaaatttgtattttctctctgaggacttatgtgaagtaatcttccctttaatacaaattttacaatacttttgtgaaatgttttaaaggtttgcatttttctaagtttcacaggatggggagctgatcttaatgcttaaagaggttgttggtaattagtcctgaggggagtttgggaagtcctgcttaccttgttaaaataaagtcttcaataagtgggataaagagaaaaggagagtgaattacccttattaaatgttaccactaaaaaataattggccattaatcactgcaagctatgtaa

SEQ ID NO: 98830 - DNA, 1027 bp, Homo sapiens
tattattattattttgagacagagtctcactctgttacccaggctggagtgcaatggcgcgatctcagctcactgcaacctccgcctcccaggttcaagagattctcctgcctcagcctcccaagtagctgggactacagacgtgtgccagcacacctggctaatttttttttatgtatttttagtagagacgggggtttcaccatattggccaggctggtcttaaactcctgacctcaggtgatccactttggcctcccaaagtgctgggattataggcgtgagccactgtgcccggccaagacatcaattcttgaggagcacatatactggtgatagaaacagacatggaatggtgtctaagtagcaagacaccattatatgttacaaacaaagcaggaaaggaaataaggaactgaaatgtcaaacaatgacataagcataaggactggtgttatgccagtcctgtattgaggctagtagtgggtagttttgaaaacaaaatcttgccattcacaatgaccctcaagctacccgatgggtgtatgtactcagtaggtcgattcagatgtggagactagaaaattagaacaagtacaacagttagcccttttttgttataaacctcatatttgtaattggagacttactcgcaggtggacatatttctgatgacaaaggcaatcactctgtcagaaatttaattgcttctaaatagccagacacaatacttacataaatgaaagagaaaataatcggagttaggttttttacttctggatgccttgtatttattaaaagagagctcagattactcagaataccagttttctcttctttttagccatctctgtaggtaattgtttaccaagatgctgcagttcggtattaactacaggcccagattggcttttggctatattcaagcccatatttgtttctcaatgtcttgagaatagaatacttttattctcctcctcctaaagaggagatgggccctccctttaaatgagaaacacacttatat

SEQ ID NO: 98831 - DNA, 1005 bp, Homo sapiens
ttgggtgtgaggtagagtacatagggtacctggactttccatggaatggtttataccaaacttatagacacactggagacatttctgactttaggtttagtgttggctgacggcttttaaatgacattattaaggctcacacagatttcatgtggatatgtaaatactggcttgtcctaaaggggctactttaaatcttgacataagccagcaactgtgttctctaaactactcaagaattaaattttagtctaatccatgggaggaaagaattaagatatgtggaattactggaattttcttttatgcttggaatattgccgttcttaaatgtcacattgacagtatgtggttcatttccagaagcttgtttttttccccagagaagagcacatggttggtaaaggaagatcaagattccttttataatacaacatgatatgatgtgatattttataatatgatatgatagccctttgtatctactatcatgtggctatagtttctttggggcttaatgctgtcaaactcctgtcaactgaatgtgaggtgacatcccactagaaaataataattacccattgtagcacctttctctggtacttgctgtgtgatgcagaaagtatttcacaccagtgaagtgaatggatgttcattaaatgtatctataatggcaagaaattcagtgcccgtttctttcagagcaatgagaaactcaagaaataagccatatgtctcattttattccctccttagtcaataaaggtaggtctaacttggactttagcagccagagttgtcacctgggctatatacataggttaatcaggggttcctggactgagctttttagataggctttttagttcctggaattacatgcagaattctgagggtgccagagagcatcttcctaaaaagaagatgccttgctttcatcatattttcaatagcacgaaatggtctgaaggtcaattttaacggccacctatttttgcaaataag

SEQ ID NO: 98832 - DNA, 1016 bp, Homo sapiens
aggagatagaaccagaaaaataggttatgggaaagtctcacaacaagaaatgaacctctataggaagccaagaatttttcatgacagcagcaagtgattgatgcatccaaaaggttctggtttaatcatggacagccctgcttggctgtctttgttgtaaaaacacataaaccaccatgataagaggttatgcactgttcatatatgtcaggagggatgtctttaaaacagccatctttatgtaaactaacccacagcagataggactgggagaaagcaattagtggtggcaacatatacaaatgtcaggggaagcatgggctttatttcagagtcaaaacgtaatgcatcccaactgttgactcttccttataacctgtctttcagctggagagagattaacaacaaaggcttatctgaagggttgaagggttttacagctaagacgctgaagtgctattgacagtccaaaagttgtacatgattaatgaagccttaggaaatggaactacagacccaaggtgctgcttcctccaagatatgtgttggactggttgccttagcattttagtgaggtgacagcagtgcttaaatacatcgatcatgggagagttacctttctgcccatgctcttgggggatgctccatttcccatccagaatgaatttcatagcccaggcattgaattttaaaatggcgattaaaaatcagttaagtattagatgtctgtgatagctctggaaactactctatcacatgagaccagagactttggtttttctatcaactgtcttcttgccttggttgcagacttgattttctttctttcttttctttttttttttttacattttagcatgtgattgccattttttctctctttattattattattattattttgcttagcttttgtgacatacaaaagtgctatggcagtgggtttttttttttttttttgagacagggtctcaattcatcactcaggctagagtacagtggcatgatcccagctt

SEQ ID NO: 98833 - DNA, 1398 bp, Homo sapiens
tacccgaaagcatatttctttttgctttagagctgcaagtaactaatcatataatgatgggggaggcatacattctgtgaaataggtcagtgagggtgcagttagctctagtgaaagactagttagaaaagtgagaacaaaggccaaagattcccaaagtgtcgtaaatgaaagtgtttcagaagattcattggttgatctctagccattttatcattcatgcaatcaatcattttcgtgaacatatttttatgaaaaatctcaaatccaagttttccaggggaatttctcattccatgtcatttatcaaatttgcaatgtaatagtatagtttcatactgcattccatttgtcataggacaaaaactcagattgagacaccaactcctccactgccagattacatagttggtttttagttcagaacatatggtcctgctgcctgttagttggtaagccagctaatgtgtctgtcccatggactgtacaaactgatcaaagcaaccaaagacatttggacgattcagatgcagccgtcaacgtatgctgctgcttcagttagagcttagtagttcaacatctgatgttagctagtgagtataccacatttttgtttcttcctttcggattgcctttcagcattttagctactaaaaggaaaaagtacctctagacaaccaagtggatggtttttgtttgaagaaaattaaagataaagggagaaagatcaccaggtgagcttcaacgaaggcactagatagaccccagactgatcatttgccatttggttgtttgcaaaattttaagagcctcatgatatttcataaagatcaggtatcatctcactgaattctttttaaaaaaatgctgttttagcttcctcttttttttccccacatactccccattttatagtcataaacagcccattatggattccactggaaaatgcaaagattcgagggacactaatatatgcccaagtggaaggcttgaataatctgccaatgccatttagccaggttattacaatttttctaccaccctgaataattaagagtggcttgtcattgaccgagtcctgtcatttctggatgccatttttgacactatgcatggaagtcatacagtggttattcacagcatgcttctatgaaacaaggttaattacacatttttctgagatcccctggggtgagaacggggtatcttctttttttctttttttaagacagagtctcactctgtctcccagtggtgcaatctcagctcactgcaacttccacctcccagctcaagcagttctcccacctcagcctcccagggtgctaggattacagaaacgagccaccacactcagcccagggtatcttctttgctatcaacatttagatttat

SEQ ID NO: 98834 - DNA, 1009 bp, Homo sapiens
taaaacaattctcctgcctcagcctcccaagtagctgggatttacagacatgcaccaccatgcccagctaatatttttgtatttttagtagagcctgggtttcgctatgttgaccaggctggtctcgaactcctgacctcaagcgatccgcccgcctaggcctcccagagtgctgggattacaggcgtgagtcactgcacccggcattaaggtaactttcttttccaaccccttattgtatttcaaaatgtgctagaaaagtaccttgtaaaggtagtaaattggctttgcatatctagaaaaatgtagctcatctgtcattttgccaccttgacttctgagcactgttaccagagtagtttttcgtatttttcaattggaaatctgtccctgtgcttttgggtgctctttatttaacttgtttgatgaaacttcttagagcctggtgattgggaacactctgtaaatgagagattattattttagattgccaacttgaagggcctttacgaatctgtctccaagtaaacagcctcgaatgtgccaaacaaacaaagagtgattgattgatacttagacgtggccgaaaatattccaaaattgcagctttcaagacattttatactaggagagctcagagctaatgagggcagatttcctaagatctatgaccagaggtcctgatttgaaaaaactttctccaggtttacgttatcaagaaattgaaacagccaagttccaaacaacaaacatcacttactttgtctctacatttgccttttctaattgaatttagtgcgctgctgtatttcctcccagaaagtgtattgttttaaaattaccatttcagttctattactcaaagccctcgctgctaatgctttctgacagttatcaacataatgagccataatgaaatgatgagcaatcttcggtggaaacccaatgtcgattcgaccggtgctgtgtgactgtgttgtgaaaatttgaatgcaaattaaaataacat

SEQ ID NO: 98835 - DNA, 1062 bp, Homo sapiens
ttagcaagaacgtctcccttcttctgaaacaaggaggtggctttgcatttttgctttggtctatttgcagtggtttctatttgtttgtttttttcttcttccctgcagcttgcaaaattggatattacaaggctctctccacggatgccacctgtgccaagtgcccaccccacagctactctgtctgggaaggagccacctcgtgcacctgtgaccgaggctttttcagagctgacaacgatgctgcctctatgccctgcacccgtaagttgtatgcttgtctctcattcctgtgatgccaacagctttcattaccacctagcaaggcactgccaggtcttctcctgggataatcattcagggggcacttgagatcaaacattcatcctttctcaatcatagcaggggaaatgcttgtaaaaagaaagggtctttcccactgcttctggttgccttcagtgtgcacagctgcctacagactacttggtggagaagagattgagtgttcagaggttgtctgacagtgtaattagagctgagattggaatttattagtggctttgccattgcactgaggactcagggaagcttgacaactggcaggagaaacaggtagacggcagggtttgggaatgtggtttcagtctgtaaaggacagctcagtgtgcactgagatcattgcttaggttgtcattacacctcttccttctctactcatagttttgtgttcataagacttaggccccaatcctaataaatgcttgtttaatgattgcatttaataaatgctgggttaatgaatggatgaggctgggaagcttggtatgaagagcaggagtgaagaaatattttctcacactttatatggacagtgttcctaggtgttaccattcctttcatgtacacttgggccttcacagaccctacaatggctgtgaccttgatcggaatggggagcactgggcccatgaatttccattaggtgaatctgtgcttggagggctagcctcatggctcaggtcagacaccttccacagattttgagtttgtttcccagcctgt

SEQ ID NO: 98836 - DNA, 1105 bp, Homo sapiens
gcttggccttaccacttaactgtatgaccctggacaagttactgaaaaccctgtttcttcatctgcaaagtgggaacagtgataatgcctcaagctcacagaattattgtgacaattaaatgatcaatgagcatataaacaatgaatactcaatgaatacttgatatttattttcacaattgctattattagctactcttaggcactaatttagttttaaaatgaactataaagacaatcagatactatcaattattctacatttcttaaaaagcagaaaaatgacatagccatatatatatatatatatatatataaaattttcaaatagtaggtgtaatcagctcattaaattgggcattatactgtcacgtacacacatcaatgcatcaaaaatccagaagatactacgttaccaagactatcttaaaattcgactttgttatggtagtgggtgagccaatgaaagaagagttggttcttctttttcctcctcctccttctcctcctccatctttttttattcaaagccagcagaaagagataattaaagcaaagctaaaggaattgaatgcaaagtttgcatcatacgtgtgaactaatcttttctccatggcatatctagaagatcaagtaagacacccattcagatggttcattaactagtgaaacttcggtggaaatagggcaggaggaagtagtttcttgctcacaaagtcattagtattcaaaaatacagcatagcagttctcacctaaaatagaaggataaaaaatactaacagtcaatgcttgttatgccaagtacatctttcacaggggttttgtttagaataaaagagatagtgaaagttttcagatgctagtaagtagtgaataaatgcagaatgtacttacacatttatgtaccaaatgctggaaggctgtgcaccacatagagcaaagaaatgtactaaaccatcaatttactaggtcattttaaatgtaggcagcaaaatggctatgtgcgtgaaaagccactactatattttgagagagcctttctaagaatcctgaaatattaataacatggtcttaatgtagttggagacaaaagaaggtgttaa

SEQ ID NO: 98837 - DNA, 1073 bp, Homo sapiens
cttgaacactttctgttgtctctgtctttatctcagtcttgggattgagagtaaacccttttcacaggcaaaagattaaggcattatttctctacatcagtcatcaacacaaagcatttcaattgctattgtagttgtttcatgaacttagtggctcagaaattaaaaaaaaaaatcagtatcattctttcatttcatagacaaaaacagtttaagcccaggatcctcagggaagaaaaaccctaaaacaatgtaaatgtaaaattaatcataatatataattgcagaaatttgaactgattcaaagaaattgtccccacaatggtataggaatagcttccaaatcaggccataccatttaatcaaaaaaagaaaatcaattgaaaagtggttttacttataatgatactgagtaaaatcagcttttccagtaagacagttgatgaaaagtttactcatttgcagcgatgacaagaacatgcactttattatgctttgtcattcaaaacttggggaggcactgcagagtaacagacgaaccatggagtagaggctcaatcctagtatgctccagaaaggacccgtggacaagttattcatctcaaaaatgaacatgtcctacaagatcactggttggcaaagtatgacccatgggcaaaatctggcctgccaccagtttttatatgatctgacagctaagaatgttttttaatagatgacatttggaattgaattggtaataatgaacattttccttgaaaccaaattaagtgaaatgttctctctccaacaaagaattccattcccctcactaataactctatattgcaaaaaagtacttaatgatttactattatattttgaattctatcactaaaaaaataattgtaaaaatttgttttctatcttattacataaataccttcatcatatccttggtcttcctcttggcctctggctctttacagaaatgtttgcccattcctggatgagatgattttgaaggtcccttcaacaatctaatttttaactatgctcaacagatagcagtcaaaccacttgtagaatgcagg

SEQ ID NO: 98838 - DNA, 1338 bp, Homo sapiens
agtccacctaggcctcccaaagtggtgggattacaggtgtgagccactgggcccagccttaattctttagtaatttttaacaacaatcaggttgtactattctgattttactatccagaaaacagaagagtatcaaataaacaaatacttgaaataaaataagtaagaattaactgtgttatttaatacttgtgaaacagtatcaaaaaacaacaatgatcagttcacaatattgatgtgagaggataactacttacttgagacagtattagtttggtaagtttcctttgaatttcatggtgtaatttttagcataacagagttctgtgtgagagcttcatctcttttcctttctctttggcagctacccatttctataaggatatttcactccaggctctgtcccataatttggggggcaatacagggcacattcatactggtttgagaaataatttaaattttatatttcaaacatgtcagatttcttttctttcttactctttttttttttttttcctgttttgagacagagtctcactctgttgcccaggctggagtgcagtggcatgatcttggctccctgcaacctcagtctcccgggttcaagtgattctcctgcctcagcctccagaatagctggaactacaggcatgcacaatgcctcctggctaatttttgtatttttcagcagagacagggttcaccatgttggagaggctggtctcaagcttctgacctcaggtgatcagtctgccttgacctcccaaagtgctgggattacaggcgtgagccaccacgcccggcctcaaacatgtcagatttctggcatgccctctccccactccaaaatgaattccaaaaccaattattcttctcctgataatgatttgtccctttagcatccgggtattagagaaaggatgaggtggtttgaacctatttaagatgaactgcattgttaagagtttacttagacacgggtctatttacagttaagcagtggttctcaaaacatgtccctggaccagcaatgttgtcatcgggtccagggacacattttgcctgggagtatataagaaatgcaaattctcaggactcaccagaccatcataaactaggagtgaggaccagcaattggtcttttaacaagtcctttgttaaggtcattctgatacatgctagactctgagaagaaagattagaaactactgatcttccaagattagaagcttctgagatgagaagtttggtattcttgctgaatttggattcaggtaatctccagtttaaaaacttttttttagttagctaatgtccagactagagcttaggccg

SEQ ID NO: 98839 - DNA, 1097 bp, Homo sapiens
attccctttatacatatatgaagcagagctgtttttaagtagagtttatgacagtggaagttactcttcagagaagtaaattagagagtttagttgaatgtgtttagtttacttactttggaacttttactgtttaagcttactccttccaaactcaccaaagagaaatagctcctcaaataatcagatgatctgttctaaaggcaagaagggaaaataataagtcatctcccccactgcattctttttgtttgtgtttaatattttttatagagttaatttagatttagcaggctttatgtaaagtttcttctggaagatttagtgaatcttttgtgaaaaccatcttcatctgacattttagaattactcacctatttatgggattatactgcattctgttcttgaaagagcaaatccattttcagcatagtttttttctgtcactttttttcgttgtctgtttttctgaaaactacctccaaggtaagaggggaaaaatgggaggagatggaacgtagaaaataggatagaactgtgtcttgccagaggagatgatctgaattagaaactattggttgaaggaagaaacctccaaagccaatacaataatttatttaactttaggaatggtgtttaaattgtctaaataaaaataaatttttacatacttccaatcttgtctatagttactaaactgcagatgctatgagttagacttcaatcttgggttttctaccccatgttaataacagaagaaataaaaacaataatgaagaagttatcccatagtgttttagaaattatatccaatcttattttaaaacaaaacaaaaaacttgaagttttatgaaaatccattggtcatttccatcttcccctcttgcagccatgcactgtgctataggaataatgagttactcttagtgagtagcttatacacagaacacactgtcttttatcctcctgtgtattatctcatttcatcatcatttcagccctacagatgaaaaaattgaagttcagagtagttacatagtttgttcaagttcacacatctaataaggggcagagctaaaaaccaagttcaggccttt

SEQ ID NO: 98840 - DNA, 2392 bp, Homo sapiens
ctccagcctacaggacagagcaagactgcgtctcaaaaaaaaaaaaaaaaaaaatcattgaatctatcagatcatgggaaccgtatagacttggaatttttgaggattaaaaagagatattttaaattatttagtctggtactcttagaggaaactgacccctagaaaccttaaattgttaaatgttaggaatggaatccaggtccccttttcacagagcctggcctcttctcagtcattgtatttcagccattcacttcctccacttctacatagcagggaacggattcctggttgtgtttttgacaggagaaatgtaaccttaacacagccttgaggaaaacatgaaggtgatcatccatctgccaaaatttttaatgctatgttttgtttttctttcttttcctgggggaaggatttatgacttcatctttttttttttttttcccttcaaatctgagcctctttagaaatgatcctgcctcaaggctagggggaaaaaatcctattttaaaaaataaaatgtagatcttcttatggtctgctttccagacacaaaagagatctatgtcttttattattattatttttgagacagggtcttgctccgttgcccaggctgagtgcagtggcacaatcacggctcactgaggccttgacctcctgggctcaaaggatcctcccacctcagcctccccagtagctgggactacaggtgcatgccactatgcccagctaatttttaaaaacttctcgtagagacagagtctcactatgttgcccaggctggtctcaaactgctggatgtaagcagtgttcctgtcttagcctcccaaagtgctgggattacaggcatggtaagccacccaccgtgtgtgatgtggccaggatctaattttgattgttgattaagagtactttttaagtaattttcaactgttttgtgatatatgaaaaagaagactaattaataatgagatatcaaataatgtttcttaaattgaggtagcttggctggccgtggtggctcatgcctgtaattccagctctttgggaggtcgaggtgggaagatcacctgaggttgggagttcgagaccagcctgaccaacatggagaaaccccgtctctactaaaaatacaaaattagccatgcatggtggcgcatgcctgtagtcccagctacttgggaggctgagggaggagaatcgcttgaacccaggaggcagaggttgcagtgagccaagatcgtgccattgtactccagcctggccaacaagagcaaaacttcgtctcaaacaaacaaacaaaaattgaggtagcatcttgtaaatagaatcctagaaaaggttttcaacttcccatgccttttatagtcatttttgaatgttggtctagagatctgcttgggatgagtaagatttttttgtacatctgagataaatttaggttgttagtgacatgctgttcttttgtatttgataataagcctgatctgtttctcttgctttctttaaatgggtcagttctggcttccagctcatccatgttttacaaagaacagttgttccactttttcttctctcatgaccaaacactttgggagcatgtcaacatcatggtcttgtttttattatgattaatatcaatttttcacccatcgtttgtgtttaatatttgggatgagaaacggacaaacaaatgagcagattctgacttggtatttctcctgcatgccatttgtgatttataatttatacatggaaggatttactgacctacctgatagtccctcccaacaaagataaacacacttacacgtcatcagggtaagtaagatgcacttgaaagggacaaataattcacctgcaagcacttttggcttcatgccttttcccatgaatttgaactgttgacagagaatgctcaggctgccaaaacacttcccacagaacctcccaaaatccccgaggttgggaccagctccacttgccatgctgtgagaaggactaaacactaaccttttgtgccctacaagagtgcatcacacgaaagcaagaaaatggtccacttcctttgggattcaggtctggggatgtgctgctctcctctgttcccttttgtggatgtggtcctatgaaaggctcacctgtaaggctggacaaactgccaagtcgtccttgtcaaactgggtgcagaggaccttccactgtcacactgtgtatttcggctgccgattcaaaccgatttcttgggacaatgacccatcaagctgaagagttcaaaatgcattaagtagattttcaaaccccctccccccggcttacaggagtataactgagtccgtgggaaagggtgggttgttgccagcacccttttgtacttttaagagga

SEQ ID NO: 98841 - DNA, 1037 bp, Homo sapiens
ttataggtgtgagtcattgctcctggctttgtttgtttgttttgtttttttaattccatattctccaattacctctgacatatggtatttacaaggttcttccttaaactttttctgaatctacagttcatgaactcctgtgacacttacgcttttggcagatattttccaaatctctgcctctagtagtgctgacctccagacctgtctctccaattgcttcctgaacatctcaactcaaacatatcatgacccactagctgacctcatgcccttccttttgaaactgacatgtcttcctgtcttccctattttggctatagcatctctactgtctctggcatttggtctgggaaacttaagtccagtttcaattctactttttaaaatatcctgtaacatctaaatggaaatgagatcctcccgttgcactggtcttagatagagctttcttcctttccttactcaagggcaggtttggaatgaagttggattctagaagttaggccaagcaataattagttcattgacattcacaacagtaggtaatagagtccgagggttgagaatagggaagaattcttacaagaattatccttgggttaacactatatggtccaagccttgttgtgtatgaaataatcagaatttcataatttctgtttcttcaaaaagtagttttaaatgttgttttctaaaaagcgtcaaagggggcgcaatataacaaaacataagttatagccaatttcaaatgcatgcagatcctaccatggttaacaaaatgcaaatatattttaaagacttattgaatgtgtagtagccttttgtcattctatactttttctaaaaattcatgctaaaagtgcaactggcagaggagtttcatgaaactcttacgatgttaccttatgaaatatgaatttcaagaatgattgatgattttcatttgttcagcgtcaccagctcatagaaaacaaaatcagagattacatgaattttcaaaaataggatgtgggggaagagaaagtaaaattgaa

SEQ ID NO: 98842 - DNA, 1001 bp, Homo sapiens
gctcatgaccttcgagggacacatgtatcctgcctgcaaccttcgaggcacacgtgtattgtggctgtgacctggaattacactgccttacttcaaatcctgacactgtcacttattagccaaatttactcaagcaactgcttaactgtatatgccccagtttccgtagcttaaaatggggataatgtgtttccttattcataagtgtcttatatatttagtatgattatgtatataaagtgccggaattacactgccttgcttcaaatcctgacactgtcacttattagccatatttactcaagcaactgcttaactgtatatgccccagtttccttagcttaaaatgggaataatgtgtttccttattcataagagtgtcttatatatttagtatgattatgtatataaagtgctgagccataattcttcaataaatattagttataattatttttgaaatgtgataaacctcaattggactcctgctttggctatgtaaccagttggacctttgctaaacctcaattttttttatctagaaaataaaatgggaaacacagtatctaatagagagttataaaagaattatacattatttctatcactctggagacacagtccctaaaagtacttggtagaccctttcctatcctcccagcttcttttcttggcaacgttttattttttttcagagaatctcagttcttccctgtaagggatataggctccaactttgtttcctggagaggactcaggtagtggtgtattgagtgctggtgccaagtactttgtgggcagtttcttattattattcctcacttaatatcaaccccattttgctgaggaagccacagctgagagttaagagccacatctcgcctgctctctcaagtggcagcaacatcattcaatgtgtttgtctgactgtcgagcctgtgtctaaccactgagtcgttcgtcctccatcagatcaaacctgggaaaggcgtgacagtgag

SEQ ID NO: 98843 - DNA, 2733 bp, Homo sapiens
tccttgttcctgacacgttttccttgggaaattcagtacaaggtatttcgtctctcattcagtcatccctttgctcagcaaatatttgtctttaaagactctcacgttctctgagaaaaaaatcatggccttcgcacaaaaacaagaagattctatttagatttgaataactaatgtaaacaataaaaataaaatagacatttacatattttatctatatctagatacatagaaattaggccgaatgtatgtgtgagacagatagatgagtataactgttttcatcctatttatattggctttgttcttcaaagaaaaaaaaagctttttagatactacaccaatgaagaaaaaggtatcatctagaatcagccctgagatgaaaaagaagtgtgcttatttatataggaagtagctttgcatacttttcctttctgttattgttcaatcttgaattaaactgtcttttatttttctacttccatttgtgattactatgaaatttctgcctaagggctgccaggaattttgtaaaaattaaacaatacaaaattctttgaaagaggattttgagtcccaggcatgctgactttttaagctcaaaaagtacgcgtggcttttgcaagcagaagcaagtcctaatgctttgaagaatgtaaaatataatcagtatttcagaggcattgaggtggttaatctattaatctatactagggtaataaacctaccagtataaacatctgctaactagaatttggagctctcaccttaccttagagagaaagtttaacctaattctgcagtttcaatactaatcatgggttagatttttttcattgtagatctcacttgtccttgctttcttgagtagtcttagagcgtatttgtttgctgcaattaaagcagccgtagtctgattattttcttaacttgattgtaactgggtacacttggctgatcatgtgactctctaaattagctgttataagttaattcccaagcctttgaggtgtcaactctgtcctcagccacttagagctaatatttgaaggacctccagggtacttggagggggaggtggtggtgcttcaagaatcccatttgcccacagcacagtggaggagtacgatctgggctgtgtaggaggtgctgatttttggactgaaaaagcactgaccccctgcagaccacgatgtcctgctgtgattcttcccttgtttgaggcagggctacagatacaccccatggagccagagaacagaattccatgtgtcccccaaacccaaatcatatacccaaagccctcagccctcagatttaagaattcctagcctagtagctttttcgggtggtttctctgctcccaagaaggatgtccaggaggtccatgggcccccagtccccctacttcttgcagggtgctgccctgtggcagagccacctctaccttcatgcctgctgcagggattcacccatccttaagtcctccagcccgttgctggtttgctccattctagaatttgcttcctactgcgcgcaaatgtttcatgttagagaatggtaactgccatctctataatggttaatgccgaacatgactgcagatgaaagtaacagtgtgatcacatcctttctcttcctgttctgtggcatgagtcagtctctttgccttaatgtttatacagatccttaataacaaataacagctgatggcgacttgctgagacatgtacaataaggaaagaaattacatcgtaaaagatttgggctttgtcccaattttttttttaagagaaaaaaaaaaaagcagggagagagaaccttgttctaataaccagtttgtgcaacaatgttccttttttcaaatctaatgagatctgatccccacaagtattatgatttattacctgcccctactggactgtttgcgttgggtgtttattatttggatattcggttaacataacacttgaaataatttcgctttctgaatctgctcttctctctttttcttgggtggttttgtggtaggtcggacatcctcagatgaaaataactcacaagagagccctttttctgttatcagtgttctgtcttcatgtccaggaaaatagactcgtgggtttcctcaaatgtaggggaaaaacaaaagttgtttgctttgtgtctaaaagttccatggtgtcacacctagaaaccctcggtgttggagactggtgcttcatactccattgtcagcaactttgcagaaagtgttgtactaaagctactacagtgagcaagcttatgcccttcagcgttgtctcaaattttgtttttaagtccaggcgtaaagataacatgtgataatgacctctccatttatttggagtcacagatttgatactggaggatctcaaagcattaggtcaaaataattagctctgtctgtagaataatcaactccctctctgcctggatgcaacagatttgtaaccttgttttaaaagctaggcgtttccattggtacaagtcagcgtgtttaggtgtggagagagttggcagcctgcagggaggggtggctgtttcccagaagtcacaattcctggtggagagaggaagctgtctactcagtttccctcctgtgctttgtgaatggtgaccgccccttctcccagcctctccagccttcctcaaggtggggcaaaatcagccccctgcagcaaagtccctttccttccttcctgtggagac

SEQ ID NO: 98844 - DNA, 2751 bp, Homo sapiens
atgaagttaatcccagacagctagaaattagccagtatagcacatatgcttagattggatgctgtgaatatatgctttctggtcaacaaaaaagttaaatcatgtagatgctcaagtgaagagcacctctgtcgactggaaagagttgagttatttaccttttttcccccagaaactgtttcttgaggtggaaaagcaactggaagtacaactacacagaactgaaaggctattgagtttgattatgggcataaaattaaattttcagctaaatgtgacagccctagtagaacaaagaagaaccaatcaaaaagttattgactattgagacttttagacagagctaacaaattgaccatgggttccagggatagtcacagcctggaagttgcttattctctttcttctaaaaggtagggaagttcacacaaccacagccactgtagccaggccagggaagaaggccaatttaggcatttaccagcatgtgcaagatgcagtttttcatctgagggggtgagaccttttctaggtgcctgtgttagaacttggagcacttgcaggtaatgagaacgcattccaatacaagaaaaacctatttagggcagtactggatatggattagccaagaagatccacagatcaaaatagaatccagggcagaaacagagcagagaaatttcccagagccacttatgggtaagtggaacaccaatgatttactaattacaggcatgtttttgcacaaattcattttttagtaaacaagatatgctttatgctacttgcaggccattcttaaatcattcttttgggaatccttataaagacatcagttaaaaatctcatctgttatccttcaagagaagtagttggcatgatttttgaaattgagtccctgcctacctagattcaacagattaaatatgaattatcagtggataattacctagggctgttcttatatgtatattttatttccttaagtgtgaagcacatggagtgtcacgcagatgtgggaaaaggtaactcacaaggatcttttgcccagaactcttctggtagggcgctgctggctcttccagtatgcacccaaggtggcaaagagtctgcctgtcaatggtatccagaagtgacagtggggatagccctggagaaggttgtttggattttcataagggagagattctctctctgatctttataatctgaatcctaccctcacaggctttttttttttttttttttttttttttgacactagtcacaaaattaacagtcaggatgcttttgaaatcagaacaatttccctggaggaggcacagcccccggtaccatcattattatatatgttttgaaactccatagactggaactcgttcagcgtgctgtaatctgtgtgtttagaagctgtattgactttaggagtcacacagatgggtgtagacccatgtttcaacatttttctttcagggacacacctttgaaattctgcttggaacatatcagcttcctcctccctccgagtcatcagccatctcagtgaatagcgcatctgcatcctttattgatacatacgggggcaggggtgagggcagttactgcctctgcctctgttttctcattcaaatattagcaaaggtccacaaacagaaatagagaaaccagattaaagaggacagattgtatttatggtaggctgtaacacattttgatcaacaacaacaaaaaagtttttggagctatggggctgcctgatggtaggatacatactgggtttattataatgcatgtacattgttcaatgtaactttcccatcatttttatgccaaggccatatgtatggctcagatgaaatgtaactggcaatttttcattgttgttgttctttatttacctttctcttttaatcatctccctgttccaactaaacaaatcacccccaaaagccagtgattaaacacaagtgagttcaaagagccaaggcaagtctgcccaagagtggccgactccccctacagaaggccaagtctgccaattgcagtcttcactcagagcctggtagtaaaactgctgagaataaggtggtttcagaggcaaacagtcacctggcccagagggcttctgcaatggagccccctcagaagggctaggctatgtgagaagtggtgggtgttggccgtgtcaaacagctccttccagtaggcatccaggaactgagtggtgtgcaccccttaggaggccaagcctaaggcaccagctacagacaaggtgcccaggtggcagaatgcagcccctggcccggccaaggctgtgtggatctataacagacaattttggcatgactgcattgactttcactctggtcttctgggttctaaaatgttggttccttaagtaggaactaaaagttaatatctgcccttgtgatgactaggaatttggttaattcatgtgcctgcttagcaaattaaaatggccagtaatcagaactagaatgttaaatctcaactgatctgagtttttctcatcttttgatagaataaattgaactatctggctgggcacagtggctcacacctgtcatcccagcagtttgggaggctaaggcagtcagattacctgagttcaggagttttagaccagtctggccattatggtgaaaccccgtctctactaaaaatacaaaaattagccacgcatggcagcacgtgcctataatcccagctactctggaggctgaggcagga

SEQ ID NO: 98845 - DNA, 1037 bp, Homo sapiens
agttccttaggctgccacattagtttcctcatctagaaaatagctaactggacaaggtcatccacagggtgcccggtagctcttaagtgtcaaaatgagtgataagataaagtgctcttttgccaaagataagaaggactatctttgttgacagttatctagaaaggcttccaagaataggaacttggtaaactgtagttaaataaagctggtaaaagaggaatgaatatcccttgagccaagaacaggagttagctgccacaccctggggttgaagagactgggtaggtaggtggagctgagttttgaaagatttttgaagagcagaggaagagtttggtctctacccctggctcgttcatcagatatttcttgattgccatctatcttccagccattgagagccattgatcatgtaagattctttccctactggagttgggaaagatatttcatccaaccaaagggaatgtgcccttgatatgaagatttgtaatgtttaccaaaaaatctttgttctaccactttaggcatagaagaagaagataagaaaagcctcacagtaaagttgacttgcaggttatatttaaaggatgattgtctttatttgaacaaaaggagaaaataacaaatccgttgtttgaagaggaaaaaaaacagaaaaaaagaagtgcctttgatttggcataattgatgctttattgctttgtagataggtggtttagggcattggacaaaagacgataatgtttatttagatttgggatttgggactgttctagaaagtcaatatatggttgttacttttagtagctgtaagaatggcataagataacttagtggaaggtaagtgctttctgagcttttctgtctgatgatgaaccctagtggttgcaaaaatgagtttataccttagaatcatttgaggtactgattacaaatgtacacttttaacatcaatcctcaagactttagagtttggagtctgtgatctgaatttttcacaagctcctaggtggttctgattaatttaggtt

SEQ ID NO: 98846 - DNA, 1914 bp, Homo sapiens
gctgtgcctttttctacacaatttaccctgccccaaaggccctcctgctggtcacaattttgcacattccacaaggttctacagaagcatcatttttttcttctctctcctaactcccaccagcattttgattgcgttccttcatgtcacttatgctgtgtaatgccatcttatcggacttgttagggcacagagtacagtattactcagtgagtaattgttctgccatttattagctatttgacttcaggcaaattaataatttttctctgtacttggttttctcatatataaaatgcaagtagtaatagttcctacaacatcagcttgtcgtcataagtaaatacgtgaaacacacatgaaccgtggctgggacgcagaaatcctgcaatcaatattagcgcttactcctactcctgctactgctgctactactcctggattgtcatggccctgtgtcaggaccttgaacttggtaaaaggagtgtaggctgggctctagaccccactttccccttcagttggatactctttttcagtgaacaacctgtacaactatatatggcagttctgtaccagaatctatgcacttcccaggctaagtctgtatttatctttgcattcactatagcacctaaaacaatacagtacatagagtcctattcagtcattgcacgccacgtgtgatcattgaaatgaacgaagaaacaaatgtaaaaaggaaaatgtaaaaatgtcaatatggttttatttgtaagcagcccattgatttttgaagcatactcaccgaatacatcatgtattttcagtgagaaagcagtatttgtcacaatactagaaatgtcataaatttaaagagtaattgagtctgaattttctgcaggtttatttactagatcaaagagtgacttcaactttcagtgcttattttatttgccagcataaacttacaggttcagtcaaatgccaagaaaataagttaataatctaaattatgcagattctggcaaattctctttcttttgggggagaaaaaaagagagagctttgagtttttatctcacttcagcaaatccaactgactataatagtaagaataaaactctagcaattaatctaatagctctaggctgctagtcattccagaaaagtgacattacacagaatatactagttactctcattgcatgtcattgatatataattcaattgattttcacattttttacactccaaaatgaaatacaacttttgtcatgtcaccagattggaattcattgacaatacattaacatgccaaaaataatattacacacaagaataatgtagaaataaattacaggtagagcagtatccctaaggagattttcatttgtgtcctataacagaagacttataaccctactcatacatctgtttcatcccactacgttttagactcttcgttcaattcaataaattactcattttgccacacactcagcactctgtcagttttgctgggcagtatacttacacaaaagagtctgtataattctaaagtataaccccccctttttttttagcaaacaaatacagagactttcatgcaaatgaatccttgaaaaagatagtctggataactgtaaggctgccacaacttttgtggaaatgttttggaactgtcttcttcaaaatgtctgggaccttctttttattgataatctcctcctcctccttcttcgtcatcgtcatctttgtctttcttcttccttctttcttcttcttcttttcgatggaatctcactctattgcctaggctagagtgcaatggcaccatcatagctcattgcagcctccaactcttaggttcaaatgatcctccggcctcagcctcctgagtagctagggctacaggtgtgcaccactgcacct

SEQ ID NO: 98847 - DNA, 1762 bp, Homo sapiens
agcaataagagtataaaatcatatttttttgatttttttctatttattttatttatgaaacaaatactgtttattgtagaacatttggaaaatgcagagaaagaaatgctgctgcatgcaaagtaaacctgaaatcacatttggtaacgtctgggtgcctatcccctgtctcattgctgtacttgtaatgtacaaagtataaatgcaatgtacaaaatataaagagtattactctgtttgggtggtggtgctccccttttcctctctactgctggtccagaccaaggaaagtggtttgttggtaacgtcagaatcacctaccttgctgggtaaagcattcatttgctgttttagattgcatttctgttttgcttgggttgagtactgtcatctgtatgcctgtggagttacagcttcccacacactttattggcccacaaactacagctacttctgtccgcctccccggctcaacattccagttccccattaggactggcaccttcggctgtaactctgaaatcctctatgaatgagctcttgccattcccttcccttagggtgctgcaccctgtttctcaatcccacagaatcttgttctgaatcaccaggagcttgaatttggcttactgatctgactctaatatggtaccttcttaggggatcccctcgctgcttcggttctctgccctctgcctagatgtcctgagagcttgatgtcatcccacagcaagacttagttctcagtccaggcaaagtggcatatgcctgtaatcccagcactttgagaggctgagatgtgatgattgcttaaatccaggagttcaaggccaccctaagcaacatagcaagactttgtctctacagcaaataaaaaagtaattagtgatgcgtggtagtgcatacctgtggtcccagctactcaggaggctgaggcgggaggctcacctgaacccaggagtttgaggtggcagtgagctatgattgtgtcactgcactccagcctggaagacagagtaagactctctccccgccataccctcaaaaaaaaaaaaaaaaaaaagacagttttccacaacattttggacactgaattggccctacatcagtttcttttaatgtaatcccccgaattccagcttcttcccatctccctctgttgcctatgtcagtgaggtttcgacaagcctgtacagctctcccgtcaaagataaacagtaaggtctatgtcatggaaagatgagtccttaataaaagggagtccttagtagagggaatccttaataaaagaagcttcagctgttacccctggctggttatccagttgcagggactggaataactcctggtcccttataattctgaggttattgcaattcaacagtgattgcctttcctacttcacaggcaatgaaaagtttcttactatgttcccagtcccgtgcagagcatgacttggtacaggttttgtggtgtattcatctcttgaaaaaggttgtatcagtacagaaagaggggaaaaaatgagttgatcaaaactggcgtatttgatcatttaagttgtattggccaaattatttgttacatagtaatcctgtttccttctgtgagatgttatgacaactgaggacatgctttgattcactggctgcagtgcagactagttgggtgttcatttgttttgttttgcacgtggaaatttaagtaaccacaacagcagcaactggatattgttctttgaatagagagaattcattgaatt

SEQ ID NO: 98848 - DNA, 1057 bp, Homo sapiens
ggatgtgtgaatcttgtagaagtcactttatccttctaagccctgtattccttgtttgtgaaatggagatcatattatatctatcaatcatctatgtgttttagctgattaatatttcactagactttaacataatcagatttattattaattgtactgtggttttattgtgtgcgtagctgctaagtacagcatagaaagcctttcttagtaaggtaactaaatatggcttagagccatgttgaagcgaacttatttatcataaggttatcaggtttagtaaaaaatcgcaaattaattttgtatgtataaaaatgcggaatacaggcaagtataaagataggcaaaatcatctataagcttaccacataatgagagccacacttattttgctttttatgcttccagactttctttgatgtacacatatacaccacaaaatgagttaatgatcatggagcatgatcataaaatcttttcagatcaataaatataacttcataacattatttttaatggctacagagttttctgttgcctgaatgtaccacagtttcttcaactatcctctattgttggacatttaagatgctttcagtttgatgctttcaataatgttgcccttaatatccttggccaaagttttaaaatgtagccttaattattttcaaataattgccaagttgaaaaatatgcattttttagaaaagcttcagtacatactgaaaaaggctcagttttgagacacatgcttcctgagcttgaaacaaacataacgagaaagagcatacatataggatcattatatgttaatttccatgcaatactcattaatgaaatgaactccaaagtggaggtagttttactcattagcacttgcatgtgagaaaacttcttttaaagttttactttctcaaggttttttgccatcaaagcctttcttttcattctaaaaaatcaattaattttaacacttgttttaaacaaatgtaggattctttggctacatctgttggcagctaccctttaacataaagggttatgtattttagtctcc

SEQ ID NO: 98849 - DNA, 2587 bp, Homo sapiens
aattccccaacccctcctttttcttgtctagcctcatgatgtgttgccagttagaggtgcaattaaatgaacaatcagttttattttccattttcatcacttatggagaggcccaagtattcatcaatatcaatgttattaatgttttacatcagtttaattatatcagccttaatttttcttccatagactaatgttactaaataggttgcatcttaattggttatgatgcattcacaggctttagacatttaaaatactcgatcaaatttctcgatcaaaattcatcaattaattttaggacatctttctacatattagctatcctgtttgtgtttggccaacctctcttgctttgcactgtgaacttgaggcttggattcatttgttttcagatttaagtgtttaaaaaagacatctccactttgaaaaacagtttccttttgaagtgcccagcctggcaatggctgaagcagccccaggcaaattaacatgttaaaagaatggatcaatacctttctggctcctttaccctcctcgcactcttccaagggagaagagttttgaagaaccctaggaggcccttgacagaggtgccaggaggcttcaagaggactgtcagtagcccaagtggggaacattgacagcttgatctagtgcccagatcgcttctccgctggccatttgaaaatggatgcaagaggaattgacagcttcaggaaagctttagccgttcatgtaattatggagaggattagaagaaaagtgttgggtgacataagagatcaatacaagggcactagttgactgaattcacctttagctgttagggcactccattttgtaatatttagcctgtgcttagagaagaatgtttgataggcttgtttatttttttaggggttgtgtagacctatgcataagaaaaagaagacataagcagcctctggtttttgagcgtggacttgtagataattaacaatgtaatgcttccagtccttagggtgcaaaggtactaattaactaatgggagagattgagatttcattactgtgttctttaaggaggtgccagcaaagaagtgcagttgaaagtaatatatgaatattcaggtttctttttcaaaccctttcttttagaattgcctctctgcttgtatcctagagtttaaaattagcactgatacactaaaccaaggtaagagtgtggttgtttttgtaagaaaaaaaaactcatgttgatggagaagtgaaaacattatctttgcatgaatgaaaagcgtctttaaaagatttggaatcaaccactgaatggtctcaaatgatctgacttttggaagttttcctccataggataaagaatggctagtgtacttaactaaaataagcccaagtacctaatttattctagccttcatacatgattctgggattctcttgtacaacatgttggagctacaactttttcaataattttaaatggttactgaatatgacaagaatcctacactataatttcagcaattgtactaaaactttttaaaaagcattgttagatctttcttctagagaaccataaaatcttttactgaagagaagtaatgttttaccgtatgaaaatcataacttttattgcaactttgaaaactagatacactaaaaagaacccctccccaaaaaggattgttgacttctacaagagatagtgattagaaaacacaacccattgagtttttccaatattttcaattatatcttctagctggttatcactgatctacaggaaagctattgatttttgtatgtttatcttacatccaatcttcttattgaactatcttgtgaatactaataagttttcagttaattctccggagttttctagagagcaaatagtttccattgcaaacaatcatatatgtatttttctcttatttaaaaaattaagcctcttatttcaaacttttatattacaacattggtcagaattttcagaccaataataaataatagggtagattgtgaacatccttatgaccaattttaatggatataacttaactataatatcagatctattttcttaatatcatattaattttaaacacttctcagaggagtgaatgttgaattttgttaaatttacatatttatcttggttatgttgcttttttggtttgttgtattttgtatttatgagatctaatatattagtagattttttctcgtgataaaccataaactctctttgcatttgtagaaaaaaaaaagccttattagatagcagtgaattttgacaaattcttttgaattcagtttgttaattgaaaacagtgattaggagccagaactttggaataccaactgaattttaatctcagctctgccactcactatgtgactatgggctagttagtaaactttagtaatttggctttctcttctataaaatgggaataatgatacctattgcatgggtatacttagtgttaaataagataatatatctaagtctcaacaaggaaatggtgtctattaagtgttcagtaagtgtcacaatttttattgtttattttgaatttctaata

SEQ ID NO: 98850 - DNA, 1054 bp, Homo sapiens
atatttgtggattcactttttgttgaatattgtcttttgtttctgtctccctcctccccactccccccagtgtctccaaatttacttattttttaaccttacctttattccttctagaatgggaaggcaagcgtactgcatattttacccaacaaacttaactctggttgaaaccagcactatcttctgaaaggccacgatcatatatgcattctataaactagaagaagaggactttgcatgaaatgtttttgaagttcaattagacttgagttcaaactaatttcacagagcagaaaatgggcatagctagacgttgcagtctaattaagtaaaagcaaagtcagttaaaacaacatctaaatgtggaagagctttggttttgctccacatggtctgacaaagtttgatgatgctgttcaaagtccatttgggatggattattaggattaaagagcagcagaatgctctctgtacatggtgtgttccctggtgtcattagcggatgagaaaattcagctgcttatctggctcttgtttctcaggatggatttaaacagacccacacttctcaaaggtgatcttactaacctcttcttaataagttacagatctcaaattgctcaaaatccttaaaataccatttgaagtaagttgattgataattatcatttcccttccgtttacagatattttctgcaccagtacaaagctgtggtacagtttcttaattacccagataatcctgtttgcttgtatttttaaactatgaagtgctgggtaattattcaattcttaatagaaggcaaatggcaatgtaaacaataattaggatgttagacagactaatgcgcttcaaagcaaattggatttttttcatactgttcagcttgaagtcccataaagctaacaatttagaagcaaggcgaaaaaggttccatgttgttcatattttatggcgttatctcttcatggcttgtttctgtgaatagcagtttgccccaatgaagctgcctgtgcccaagccaaatgtttctgtaacaatcgcttccct

SEQ ID NO: 98851 - DNA, 1007 bp, Homo sapiens
gaagtatacaattttgttgtatattgaggtcatcagtattaaaatgtactcatatcaacaaaaggtatcgtattaaaagctttttaaagaaagaacaagatagaaatgttccaatggttttaaaataaacagacttgtgctctgaaaagaggaagagagctatgtcaaaaaaaatgatttcttttttcaactatactatagaaggagcttaggagaaagaagtaatggaaaggaaatatttaaaatctacttcacagagatgctgcttccatatcctttgcactgttgaaatttttcctctacctttgaatcgtatcattaagaatcaattgcttgaatcacatggctgcttttatctccggctttgaagcatggctgtgatcattgaaaaaatgtaattctttatctataagagagcagcgtttaattattgtcctttttctgatatacttttttttttcctctttgtgtgaccaggctgcctttgtgagtgtgaatcatgcaatagtctctatttggggttcaccaaaacatcgcatagaaatcatctcagggatttttgaatatggtattcaagatttgatgacttattttagtctaactgagcttccttgtatctttcagaaatgaattaacacataattattctgttaagatctgagcctctaggaaaaagccttcttaagtggtttttcagttactgctgtgcaaagcaggggtggtcatgatataagtttgactttcacataactgaactttactagttaatggcggggggtgggggaacgggtaattggtaaatttaacattagcaaaggactgcatgcttgtcagataaatttctcatatagaattacataaagtaaaaattgtaagtctaccattccctgcccacacacacacacacccacatccacccatacatacacacacacagttttcaaaagcttactccaacattttacaagttaccatttttcacaatttggcaggcaactcaaatatag

SEQ ID NO: 98852 - DNA, 1247 bp, Homo sapiens
tattttgcttttttttctgctaataaaatgattaactctttcaagacactttttgcacaagaccttgcactttggttgtttgtttctgttattgccatgtaaaaatttctgatgtagttaggtaagaaaaaacttgaatgacaaaggattccaagcttgagtgagactttatttatttatttatttatttatttattttgagatggagtctagctccatcgcccaggctggagtgcagtggcgcgatcttggctcactgcaagctctgcctcccgggttcactccattctcctgcctcagcctcccaagtagctgggactacaggcgcccgccaccacgcctggctaattttttgtatttttagtagagacggggtttcaccgtgttagccaggatggtctccatctcctgacctcgtgatccacccgccttggcctcccaaagtgctgggattacaggcgtgagccaccgcgcccagccagagtgagacttttaaaagatgacttgagactctaaaagtcttaggaataataaaaacagttggccctatccttgatatcatgataggcatcaagagtagcacccaggcacagtggaaataatatagagacgaggaaagatgtatgaatttggtcacttagctagatgaccttgagcatgtttcttaagccctgtgagccttggtttgttcatccataaaatgggatgataatagttatatttagtttacagacttgcaatgaggacttggggttgtaagattggtaaaagtcacctcagagatcatgcaacaacttgatactagcatttctgttgtcattgtgctcttcccaaggtcatagctattgacttttaagagcgttgagttgaaatagtagaaggaaaatccatcccctgaccactccttgatatcaaggctaaagataggaagcatctctctcctttgccctaacaaataataatatacgttttcacactttgtattgaaaatattatatggagtatgtcatttttttttcctcctcgataggaaagagaaacttcctttgaacgagcaaaaagtgacttgtgggtaggacaagaaagagggtgtaaagaaagcttaagaaggaatataaaggaaaactggccaagtcttcagaactctggcagcagtttcctccccaattgtcttttcaatggttctactgtggcaggacaaatagaagaacaggtgaaaggtcacctacttcctcatccatcttcct

SEQ ID NO: 98853 - DNA, 1831 bp, Homo sapiens
tttcctgtctatggacttggtaaaatgacaaagattgttaaatatctcccgtcttctgcataagtgcgtgaatgatctaaatgtgaaattaggattaagttgttccagttccctcccactgactaaaatcgagtgaagaaagtccattttttctttctgccttgtggaccggtggagatatgacccaacaaagtggagggacattgcttcaagtacattctgttccctgaacacccaccgatgggttctctaaatgaaattaatcttgatgaaagacctctttatttctcttaggaggtggtaattaagcaagcaagagtcttcttatttgatctgtggtcagaagcaatagcaaattgtgacccaatttggtattgatttcagttattgagtttttgaagaaatctatgtatttttatcacattaattactacttaccatattactaagtggatttttttttctcacctcaggttcagtgtatgcagttgattcttgcttttttaccccttcctgtcagaatactggggagtgtataaagtcctttgctttacagaaagtttatatctgagtaagagatgagagtaattcctatttatacagattgtttgtcatgtgtgaaataaggctcaaaaatatcttttattccaagtttttgtcttgcttgatacttgtttttataatgtagttatcaacagtctgcggctgccaatccattatggttactacaaaatagttagaatgtaattctggtctcatctatggaacaatcagattaatcttttctctgggtaattgttgagctgtagatggcattgccacatggttcatctgatttggtggttaaagggcctgaattaactgactgccaaacaatttgtctggcatttcaaccattctaatgacagggtgggattaactatggggcaatccacttgattgactgaaaatccagttagaacatgaagaaaattgcattttttggtgatttggtgtcataaagttacacgttactccattcatagtttacacttgtctgaagtggcattcctgcttagctatagttatttctaggagtaactaacagtgaatgttctttcattttgtggtaaatagaaaaaagagtggctatcttttctgttgactcagtgttaaaaattcaaaaaaaaaaaaaggaaatgtgtaaatttaaaagtttacaagttggaatttaaggatttttaaaataaagattaaggcctcgatttttggtttgctcttgacttagcaactactagataagctgtactgaattggtaacccaaagtatattctggtattaatataagaaaatatgtgagtgcattgttactggcaactaaattactatgatcatagcaggaacagtgaaatgagcagggcaatgacatgccatcacattttagagtaaattattctgccttttccgttttgtaagacaggagccgcacatcttcacatgtcaagattcttatatatatttttaaaaaaacaacattggcttccatttcctgctaaaatgttcactctcagcattagcacatcttcgtgtatctaatgtcattgattttcaattgtcacagagcctagtaactcatacattgctacattgtgaaactccttgacatttttacaaccaaaattagaaagaaaagagaaaaagatggtgggcaaagtgaatataaaagcaatcgaacatttttctggtttgctttatggaaatagtcttgggggatccagttaatcacgtgcgtcctcgaaggggaggaatttagggtttcaaatctagtccacttccgagcaagctgttcct

SEQ ID NO: 98854 - DNA, 1333 bp, Homo sapiens
gtcttcctttggcaagctctgctcttcctgcccttaatttgcaggtctctgctcagtggttgaaacaatacccatactagtttttcctttatgagtaaatttgaactgttgccacttgaaattgtagctgttgtaataggtgaatttgaggttgttggaccaccacaaggaactgccgagaactcacaagcagtaaatccaccattgcctctggatttcaggcaaaagattgaaacaattaaacaaacaaaaaaaaaacttcctcaataaaatattgtcttatctcccataagatcctttattagtgatgattggtgctcagtagtttgcttcattattgaaagaaaaataatcaggtgtcctatgagaataaaatgggattgacaaatcactgcatgatgaaactttgtagttgatacatctgctttggatctttgcagtgggaggaagtgagtatcatggatgaaaaaaatacaccaatccgaacctaccaagtgtgcaatgtgatggaacccagccagaataactggctacgaactgattggatcacccgagaaggggctcagagggtgtatattgagattaaattcaccttgagggactgcaatagtcttccgggcgtcatggggacttgcaaggagacgtttaacctgtactactatgaatcagacaacgacaaagagcgtttcatcagagagaaccagtttgtcaaaattgacaccattgctgctgatgagagcttcacccaagtggacattggtgacagaatcatgaagctgaacaccgagatccgggatgtagggccattaagcaaaaaggggttttacctggcttttcaggatgtgggggcctgcatcgccctggtatcagtccgtgtgttctataaaaagtgtccactcacagtccgcaatctggcccagtttcctgacaccatcacaggggctgatacgtcttccctggtggaagttcgaggctcctgtgtcaacaactcagaagagaaagatgtgccaaaaatgtactgtggggcagatggtgaatggctggtacccattggcaactgcctatgcaacgctgggcatgaggagcggagcggagaatgccaaggtaagagggtccatattgcagttttttcactggggcttagtgcgagtaattaaatcagagatgagactaaatggagtaaagccagtaattagtagcccctgtgggatgtggtgggacacaggggtctaatgagtaagtgctatagctccaggtggcaaagctaagacgtttctaatactgacaaaataaatgatgctgctgtaatcagcagaaagccaaacacatttgc

SEQ ID NO: 98855 - DNA, 1049 bp, Homo sapiens
aagggaaaatgttagggagagccttttcctgaccctttggataggatactctctgatagaagagagaattcacttgtggctctgtcaccctgatgagttatgtggtcatctgaaacttgcaaaaacaaataattctagtagataccagacagagatgaatgcagattttgctctggagtgtaactgctctacatagatgtatttatctttttgaattgtacttcagattctctattcatcctttttagaaaaatgaatcaagtgagtcctaggatggaattttaaatgttaagcaagttgaataaataagaacctgcagatttaaagagggggagaagatcaaatgagtaatgattatttacataagtgagcccaagtttaggttttgatcagtgttggatatgcacagcctcagcacatatggaaacgctcaggcaaatggtttttgtgttattggctttttgcaattggaaattcatctatttttcttttgttttttgcagttaccttattggattccagatctgttcagggagaacttgggtggatagcaagccctctggaaggaggggtaagtcctgagttgctctctgatccaaagggtaaaaaaggagtgattagcaactttctgagagtcctaatggcttgattcttgttgattgtggtgagggggtcagatttccgctgtggcctatgaagtgaattacgctttgttggagaaatcctatactccctttggataactctgtcatggaagaactagaaaccaaaagggcagaaaggggtttcaaaattaggagactggtggaggcacagacttagatgcctatttaaaactaaaataccaacaggaaatatgatccggggaccaaattagaatttatgcctattactgtgatggccatgaagtcctgacaaggttaatttaagagcaattgtcctgcttccagatgaaaaaaaaagaataaataaagatatgagagagaagacatttctaattgtacctgcatgaactgcaggaaggctctgtaccttgctctcactcttaa

SEQ ID NO: 98856 - DNA, 1031 bp, Homo sapiens
ctagcgaaagcctttcgagctctggtttctgcaaagtttcccgagccctgcgcttctcgggaccgggctgcggggcctgctccgcagcgcagcggtcgtggcgccgctcgtcaggcgccagtgacctgatttctagcacccggagtcagacacctttctcctcgccaagcccagcgccccgagggtgcgattgcgggcctgaggggcccgagctcttcgccccgcagacttggggaacccgccggcaagttgaacgcagtcgagttttagcttttcgccccagaattgcacacagtttagagctaacgtgcggggtcgacgggacccgtctgggtgctcagttttctgtgcatccgttcggacgtgctgggaggattgtatgtgcctgtgtgtctgtgtcgggaggtggggcggggcgggggggcggtgatcatttagtttctgagaaacccagggagaggcgaactgtgtgtgtgtgtgtgtgtatgtgtggtgtgtgtgtgcatgtctgcgtgtgtgtgcatgtctgcatgtgtggtgtgtgtgcatgtctgcgtgtgtgtgcatgtctgcgtgtgtgtgcctgtgtgtgtgcgcgcgcgtgcaactgcgtgtatgtaggtgcgcgaatgcctgcgtggaagcggacgcggaggattgtatgtctgtgcgcagatgtcctgagtgtgtgcgcgtgtgttcgagtgtatgctcgtgctctgttccagcgtatgctggtgctctggcctgcgtgcatctagtctcacatccgtctctcattcttctcctttccggcatccatctatctatccgtccgtccatccgtctatctatccatccatgcatccatccatctctccgtgcatccgtccgtccgtccatgcatccatccataatgcatccatccatatatctgtccgtccgtccgtccatccatccctccatccatccacccattcatctatccatccatccacccatccatccatccattcatctttccatctctccagacatccgtccatccatcc

SEQ ID NO: 98857 - DNA, 2313 bp, Homo sapiens
cagccgagctgcagcagcccgtctcaggggcaccgcagcctccccgggccctacggccgcccgccagcaggatggctggaatggccttagtcatgaggcttttagaattgtttcaaggcaggattatgcgtcagaagcaatcaatggagcagctggtggtgtttatttgggtactaccaactcctgtgtggcagttatggaaggtaaacaagcaaaggtgctggagaatgccgaaggtgccagaactaccccttcagttgtggcctttacagcagatggtgagcgacttgttggcatgccagtcaagcaacaggctgtcaccaacccaaacaatgcattctatgctaccaaatgtctcattgtccagctatcctgaagtacagaaagacattaaaaatattccctttaaaattgtctgtgcctccaatggtgatgcctgggttgaggctcatgggaaactgtattctccaagtcagatcggagcatttgtgtcgatgaagatgaaagagactgcagaaaattacttggggcacacagcaaaaaatgctgtgatcgcagtcccagcttatttcaatgacttgcagaggcaggccactaaagatgctggccagatatctggactgaatgtgcttcgggtgattaatgaacccacagctgctgctcttgcctatggtctagacaaatcaaaagacaaagtcattgctgtatatgatttaggtggtggaacttttgatatttctatcctggaatttcagaaaggagtattcgaggtgaaatccacaaatggggacactttcttaggtggggaagactttgaccaggccttgctacagcacattgtgaaggagttcaagagagagacgggggttgatttgaccaaagacaacgtggcatttcagagggtgtgggaagctgctgaaaaggctaaatgtgaactctcctcatctgtgcagactgacatcaatttgccctatcttacaatggattcttctggacccaagcatttgaatacaaagttgacccatgctcaatttgaagggattgtcactgatctaatcaggaggactatcgctccatgccaaaaagctatgcaagatgcagaagtcagcaagagtgatataggagaagtgattcttgtgggtggcatgactaggatgcccaagttcaacagactgtgcaggactttttttggcagagcccccaagtaaagctgtcaatcctgatgaggctgtggccattggagctgccattcagggagatgtgttggccggcgatgtcacagatgtgctgctccttgatgtcattcccctgtctctgggtattgaaactctgcgaggtgtctttaccaaacttattaataggaataccactattccaaccaagaagagccaggtattctcaactgctgctgatgggcagacacaagtggaaattaaagtgtgtcagggtgagagagagatggctggagacaacaaactccttggacagtttactttgattggaattccaccagcccctcgtggagttcctcagatcaaagttacatttgacattgatgccaatgggatcatacatgtttcagctaaagataaaggcacaggacatgagcagcagattgtaatccagtcttctggtgggttaagcaaagatgatgttgaaaatatggttaaaaatgcagagaaatatgctaaggaagaccagcgaaggaaggaatgagttgaagcagttaatatggctgaaggcatcattcatgacacagaaaccaagatggaagaattcaaggaccaattacctgctgatagtgcaacaagctgaaagaagagatttccaaagtgagggagctcctagctaaaaagacagtgaaacaggagaaaacattagacaggcagcatcctctcttcagcaggcatcattgaagctcttcaaaatggcatacaaaaagatggcaactgaacgagaaggctctggaagttctggcactggggaacaaaaggaagatcaaaaggaggaaaaacagtaataatagcagaaattttgaagccagaaggaccacatatgaagcttaggagtaaagagacttcctgagcagaaacgggcaaacttcagtctttttactgtgtttttgcagtattctatatataatttccttaatttgtaaatttagttactattagctagtgatcatttaatggatggtgattctaacagtataaagttcacaatgttcgatgtccctagcttatcatttttcagctgcatgtaaaaggaagtaggatgaattgatcattataaagatttaactattttatgctg

SEQ ID NO: 98858 - DNA, 1036 bp, Homo sapiens
aatttaagaggaaaggaagttaatctttacagcacatttacttttattgtcttgtttaatcctcacaatgtcccgtaaggtgggtgttattcacccaaacttatagatgaatggactgaggccaaagctgttaagcagttgggccaacattacatatagccagaaatggcaaaagaaggctttgacttctatgcaaccatgtggcagaacctgtttgttttacccacttaattatatcagtctatcctcatgccaaactcaagttgcaaacaggcatttaaaaaaatcattcactcccaatacatgagaggaatgctgccaggattcagattacacaagagaaactcattttacatgatcagttttcctttctgtctcctgatatcagaacttgtcatgaatggcttatatcttattttgatatacttctttgtgtccttttcttatttctgcatgtctttgaaatctacttctctgctgttacttctcatgttgaaagtccctgtagatcttttttctccagactcttaaaatatctaatcaatttctggggaaatgtgacctgatttctttcagtcagagttcctaccctcatttgctgggacaagcagccctaagaactttgaccctttgacattcaacagaacttgaacctgattgtatgtggggggttcccccttgcccatgtagttatttgatttcatttgaaaaattaaaagtaagagctgaaaattaaaactcaaattattaaattgtggatgtaccattgtcagctgctgagccattccttggcagcaatttttctaggaatagatatcatacatttcacatctgtgacagaaacaagcatattgttttatgcttttgatttagcccagtctggaaatgtgttttcatacacacttggatgcttgggaaacatcctaggttagaagggatcttcattagtgctggcatatagaaccagagtaagagacaagatcactggctcatggctataagtttaggaagtcttaaatggagaaggagatggatt

SEQ ID NO: 98859 - DNA, 1044 bp, Homo sapiens
gcagaggcaagaagcctgggaaattcgtgtagggggaggaattgacaagaaaaatacccagtccccttaggtcaaatccctagctcctaacagggacaaagggcctgctctttccctcactccttcttttccacttggctgctttacagaataggataaggaagtagaacatgggcccaggaatgacaagcccacaggatctgcaggcagccctctgcaggcctccagctccgaaacaaaagtaccaaagcccttctccgccctgctaggtccctgtgatgctctggcctttcgagttcgtgtgaaaaatctgggacactcagtctgtcaaatgcgggggtgggaaggggacgcaccagtaccaaggcatggagaactggaaggaaaatatctagaaaatctgtgacatatggctgctgtagatataggcacttgcaaatgagactgtaatgctaaacagagcctttccaaccaaataggcaaagcacatttctgaataattggactggggagaagagtaaagtttcgccatctgaggcaacatggcgcagtggaaaagaatggatggggtttagagagcgcgccagggatgaacactacctattctatttactggttgtgtccctttgagcaagccacttcatctctttggacttcagttgtactcatctgtaaaatgggttcttgagtgtaaagtacttgtacatgtagcggaggggcagtgaacagcttccatgagaaccataacaattcaagacggcagctttgccagtggaattgattggtttaaaaaagagagagagaaaattaagattttgtttgaaaattttatctgaaagtcctccatggtctacaaattggctcattatctttcctcttgttttacaaatgagtaggagagaacctggaacaaaatctagtctggaacagtgcctttgtaaagaagcctctatggggaccaatccgcctgcaggcagtagaggaggaatcaggtttagccacagcaagagagaaactgagttccttaccctctgccatatcagg

SEQ ID NO: 98860 - DNA, 1036 bp, Homo sapiens
ttgctgtgtatatttggctcccccagaagcgagcttcctcctttagccagcctgcagcccaacccccaggtggatgaaaggatggtgacacctcggtgaagacggtgacagtatttgtgatataagtgtcgaaatactagatttatataagtttgaaggacaatgagattacagttattcattaagaaaacaaatacagaatttattccaaaaggtaaaaaaggtgaaagaagatacgtaacatgagtagtatggttgttggaagcattttttcgtattttcacttcaaagttttagaactttacactttctttgaacatgtactgtaaaataaaacaatgcaaaaattgtgttttaaatatcaaattagccatacttgattcaaattatacctgtatacaaggaaacactcattggttcacactgttcttttctctccttcccaaaggatgtgctgggtggcgtcctgatcaccgcactcctcatcgtcctcacctaccctgcctggaccttcatcgactgcctggactcggccagccccctcttccccgtgtgtgtcatagttgtgccattcttcctgtgttacaattaccctgtttctgattactacagcccaacccgggcggacaccaccaccattctggctgccggggctggagtgaccataggattctggatcaaccatttcttccagcttgtatccaagcccgctgaatctctccctgttattcagaacatcccaccactcaccacctacatgttagttttgggtctgaccaaatttgcagtgggaattgtgttgatcctcttggttcgtcagcttgtacaaaatctctcactgcaagtattatactcatggttcaaggtggtcaccaggaacaaggaggccaggcggagactggagattgaagtgccttacaagtttgttacctacacatctgttggcatctgcgctacaacctttgtgccgatgcttcacaggtttctgggattaccctgagtctcaaacagttggaaactagcccactggacatga

SEQ ID NO: 98861 - DNA, 1114 bp, Homo sapiens
gtagagacagggtttctccatgttgcccaggtacgtctgaaactcctgggcttaagtgatccacccacctcagcctcccaaagtgctgggattataggcatgagccactgtgcccggcctcctccttgttatgatcaaattagactgtgcctggttgggtggtaagatcactctgaaagaaagctcactgtgaagagatgaaaggtggaggcagagctgtgaggtcatggggaaaagcctgctttccttataagtcctgctgttcatgttggaataaggatctgctcttccttgtttccatgcattttgcaggattccaggtaccattaccacactcttctgacccatgaaaccaactggctgctcacacatcaccaaacaggttgggggttagccttcagcacaggtggatacatctgggattcactgagattcctgccctctcctgcttcctagtggtttgggacaggccctctgcccatcgtcagcagttttttgctttcatacaaacctggaaggcactggcatctgcctaggaaagtggatctgtgaagaacagatgaactcaatcctttctggagtctgacaaagaagggataggcttccttgacattgcctgtcctgacaaggcctccctgacattactcctccaatttcacagttaccttctgtaaatctattttctcatctactgaatagaatcaggcgccctttttgtcttcccacctcttatctcttggcaattttaaggggaattaatgcaagaacaactttagtgtctcttgggaaaacaagccaaccaaatacaaaacccattaagcctactagggtgagtcctcttaacatgggaaggcgatgattatgcaaacaccggagttccctcctcttcagttcctaagaataaagaacaggtatcaagaactttctttaaagttagtgtaactatagttaacaaagtatccattgaagtttagtgcctgtaggactgagccagtgctttatcaacccaacacatcatcaccatgtgcatactctagaaaaaaaaatagcttccttaaaagttacagaggctcttaacgtgttaaaaccgaaaaatcacatttttcttgatttc

SEQ ID NO: 98862 - DNA, 1720 bp, Homo sapiens
attcaagtctagctctgtataggggtgctggggtgctgggataaataattcccagcagtccttccagttctgcagttcttgattatattgcttaccatcaacaccttatataatcttcacttacatgtcatttgaagatttttcttctcctttggggagtcgaggggaggagagttttgtcttttaagttagacatttattttgatagaattaaaatgtgccatctttatcagatttagtaatattcatatgaatgtgaatattcatattaatatgaaactaaggctctataatattagttgggtttggtttctgcattgttttatttggtttccctccctatccctcaccccaagtgtggattagtgtgcagagccagatagttaaatgcagtcactgaaattcttgctttaaaagacagtgaggcagaattgtttagtttggagagatgtgaaaaagaggccaccttaatatttcacctctgttgctttgggtttacttaagaatgacaatttagaatattttccagctctttccccagaaatataaacaaagatccttctctgctggtcaagaaatatatgtaattgtcctttgtctctgtggtactaacttgacagtagccggttcccctcccctccaacctgattctgtatttcctaagcatgctgaccttggaaccattagtagagactcagcagtttactctttcatcaataatgcactcactctgaagtggcaggctggacactgtggcccagctctgcatgggtgtttatagtttatgccagtaaatgtttctgttgaatctgtcaggagctgcaggcctgatcccttttcaagttggtggtgagagcagtgagtcagcatatttgtaaacttcagaagagtacagaacactgataatttactgtggcactggtaatttcatgaatatggagtgggcccatatgttcatttttagctctgtaaatctcaagaactgttactgccttggtaagctgtatcagtgcattggcacccagataaagagaactttctgcctgtcttgaagtaaatgaggcatcaacccagacttgtgttaggctggcctttgctgtggttttacagtagatgcttcagaactgcttagaaagctcttttcagatgggaatgtgggttgccttctggtagcatggcctgtcatcagaggtgtggttcccccagtagccggcctatgacacggcggctccagtttctttatgtaataaggtgagaaagagtgaggaagagttgtacagagcaaatgaattcagtgtcgatgtcttatccagtgagcgttgctatggaaaaacctgtttgaaaacaggttcttcccattaagttcatcagttttatgtttcatttttttccttttggcctttttaggaccagttccaagtgcaggcagagttcccctaggacttctgactgtggaccttcagcagcctccatgatttcatccttcctgctcgggtccctgttaccaaaaatacagggcccttattttcatatttgccccggattttttccttgcaagagtttcttgatagcaaatccttcttttaaatactagaaagtatgaggaagcgttctcttttcatagccagtgatttaaagaatagttatttttaaagtagactagtgggcttttagtgttaaatgtctattgatgttttgccagaagaaacattgatttttc

SEQ ID NO: 98863 - DNA, 1759 bp, Homo sapiens
caggagtttaaattcagaaggagtttctgccacaagttctaacatttcagctctttttctttgcctttgtagatggtgtccctgtggtacttgtctgctgaaataattccagctttgtttcaagaatctgaaatttattcatacaagtacctgtgttatatgggatttaaaaaataaatagttctgttttccatggaaggctctaggttttgtcagtattgtgctgtattaatattacagaccctacttgggtatgtcctaaggtggaagatgatgaactgtcagtctttcttattttctcttaagttttgtttgtttatttaattgtaaaccagaagaagtttgtaaacacgaaatggacagcttgaccaaaagcttaaaaacattctgctttaggccttatgtgcctgtgggccacacacagaagagctgattccacggcccttattcaccttttgcttactctccagcctctactattgcttgcctagggcaagcctcctaatctccttgtgcttcactttttcccatctgtaacttgtctgtcccacaaagggcttggccagggctgcactgggaatgagtgaatagaaggcgaggtgccatgtttttgcaatttcattattctttcatttttcttttctttgtttttgagatggagtctcactctatcacccaggctggagtgcagtggtgagatctcagcttactgcaacctccccctcccgagttcaagcaattctcttgtcttagcctcctgagtagctgggactacaggcgcccaccgtcacgcctggctaattttttttgtattttttagtagagatggggtttcaccatgttagccaggatggtctcgatctcctgacctcatgatccacctgccttggcctcccaaagtgctgggattacaggcatgagctactgtgcccggccccagctaatttttttgtatttttagtagagatggggtttcaccatgttggccaggatggtctcgatctcctgacctcgtgatcttcccgcgttggcccccaaagtgctgggattacaggcgtgagccaccgtgcccggcctcctttttcttttacatgccctacttgtcacctgaaatcttactctgaaactaaaacagctatcaaaattacatgtttaaagttatgtttgcactaagttagctaaaggtctcaattgaataagttaactaattgtgaaatttggatacaatctcatatagtcgacatttccattctttccttaattagccctaccacagtctctttttaattatttcactgtacttgtggaggaagtaataaattattccttttggtttgagaaataatccccttaaagatttttgtcaggtgaaagactgggtaaagaaccatttgttggcccaagaaggcagagtgatttcttttatttttgaagttgttattctaaatatattctatacatattgaagaaatgtgaaaattttgggggaaaatgatatgggtgtcagacaaatataggatgatggcattatttaagaacagaagttttcaaaacagactgacagtgagggtactttttaacctagaggtaaaaatcctttggttttacacagtttgagagtgatttaaagttacaattagctgggtcatcttgaagctcttccaacattcctgacctcctttaggttttaaaatatgagtgtgcatgtgtgcatgagagacacatagttaagattagactttaaaatagatctcaacgt

SEQ ID NO: 98864 - DNA, 2043 bp, Homo sapiens
tgtcaaaataagtcagtaataaagttggtattaagtttttcatctaatatatatgtatgtgtttgtgtgtgtgtatataaaatacacacacacgtacacacatacataccacaactaaggaacaaaattgtttttcagactcctaagcaaatcagtaaacacaggaattttgttactggggcatgtttagctgcatcatttcctccagtttattgttattttacatacagctttttcaactaagaaaaggtcttcagagtattaaaaagtagagtggaagcagattaagaactactgttccctgccattcttgattactgagttgtctgatattactctggcatatggcttactttttaataattaaaaatctctagtggctttgcagttataattgagctaagtctgttctccagagattcctgcatatgtcagttacgtcggcacttatacctatttcttcctgtccttttaatgtacactactaagctttcttttgtactgctttgtttggtggtagggatgaatggaacagaactcgattcacctttgagaaacctggctccgtgcgttataagaaatctggaaattcatctgattgatcttcgcattaacctatggagttttgttgacattggagcgtaaccttgcttgttatgcagggggcagtcctctgcagcatgtggagtatctgcaaaagcacccagaaagcccgtagttgtagctagagtgaaaagccgtggtcccctggtcttacatatttcttatttgctgagcatccttgcagttaacaacttgagatagaatgtcaagttgatgacagaataagatcaatgttgagtgggaaaaaaagaagaacctttaactttttagcagactgcagagcattttaagagtttcaaaagggttcaactccaaatattttagtggctttggatcagattattatggcatatatatatatatatgctttttctttttttcaggcttcttccccttcattttttgtggtttgttgcaaacttaattatgtatgttaagaggcatctatccttttcaaaaaccacttctgggcaaggaaaattctccacatttttgtatttggaacagttatgtggttgccgggcagatcagtggcaaaaattatttcttgtagaatgtatgggctttgtgtgtgattggctgcgttgacttgagcctgtgattttttttcccctttagcttgttacctatttcagttttgattatttacagttctacagaaaacttgaatttaacttgtgacaagatccctgttggagagacaaaaggtttagaactttagttttgacaattctagttttcatgctgctcagaatacattttgtgaaatgaaaaataaccttgtaagtaatatgcacatttaatcctgtaccatctgtatacacagtgggtagtaccttctgctacagtaatacctaatgacctggagttcatgacctttttcccctttcaggacacctgtgaaagatttcagatgctaaaaaatatgggtgaaattgtgatgtttccctggtcatcacactggtttttagtgtaacatgagcttggaaatatatgagaaaaatatctattgaacaacttgttgaagtaaaagtgttcaatttatggtttgatttatacaaaacattctggactataataaagggagatctttctagcatgcccacatttagttaccatcaacaaataaattgtgaagacaacaggttgaaaaaaattggaagtttttaagcttctgacctttggttagtctgtatggaaacagttttgattcctctggatgtctgcttttttgtgtttgaggcaagctttcaaatactatcatttttcttagcttctttgaaggaattaaaagacaaagcaatattaaacaaataagcagtgattcctacacagttggaatagtggtataacacaggcactgtttttatagaagcttcagcaatcatcacatgagtcacttagccctgccttgtttttactgctcttgcctcactctct

SEQ ID NO: 98865 - DNA, 1005 bp, Homo sapiens
ttaggattatttcctttgggtagtattaatattatgaataagagagtatgaagctttaaggctctgatatattggtaaattgtttacaaagaattttaccaacttatacctcagtgaagccttattttccctggtcagcattgagggtttttcactctttcccccaaataaaacaccttagggaatttgatgagctgaaaaaagactattttatcttattttgcatttgtgaggttgaatccttctctgaatgtttaatatttggttttcttttttgttgactttttctaagtttgtactggggtaaatcagtttcttaagcaatggttaatacagcgttgtgaccagttcctttatttttctagatgtaggtgcaaaaaactacagacatctctgtgctgtttattacaacaagaatcctgggtttgagatcattcatgggctgctggacagaattatgcagttgctcgatgtgcctcctggtgaagacaaggggggatatgtgatcaaagcatcagaaggtaagacagatgagccgaatccagagttagtgacagtgtcaggaagaggctacaccttgtttttgatgaagttggtagttttgatttgggattttagaaagaaagggagagttttatttcaattaattgtcaatattatccagaaaatatcccctttccctccagcattttaagaaaacacttttcagaactctcgtaagtgctgcacagtatactttcgttccaactgagctgtaacccctagttactggcacctttaagccatcaaaatggctaaatcactggcacctttaagccatcagcacatggtgaacccagaagttttaactggaagctggtaagacctaaagtgatggtttgcactcaaaagctgcctgtctgatggctttaagacaaaagaaaaaagaaaacaaaaacaaaaacctcagaagttattctgaaagatttcacacatgttaatcaagtcataaagtttgcagagcaa

SEQ ID NO: 98866 - DNA, 2128 bp, Homo sapiens
acagtggtatgctcctcgcttatctcagctggcatagatatggcccactgtctgctcctggccctgtttaatagctatttgtgtgtgcttatcttctttttaggctgtaggcatttactcagaaaataattattgaggtctggcatggtggctcatgcctgtagccttagcactttgggaggctgaggcaggcagattgcctgagcccaggagttcgagaccagcctgggcaacatggtaaaaccctgtctctactgaaaatacaaaaaaaaaaaaaaaaaaaaaattcagtgggcatggtgatgtgtgcttgtactcccagctactcaggaggctgagttgggaggatcgcctgagcctgggaagtcaaggctgcaatgagccaagatcatgctgctgcactccagcctgggctactggagtgagaccctgtctcaaagaaacaaagaagaattactgacggtttaggttgtagatgtcttgtactggctttgacctctatcatcaaagaatatctagaatagagcgccttgaatatagtgtgtactgagaaatgttaaatggcaagggcagttatttctttgtatctgttcagtccgaagttcaactcagaatatactttccataagtaacaatactttcatggctagaaacttcactgactcttaaaaataatttatttcagttgcttaaatggaattcttaagtttcacaaaaacttttgaaaataaaacatctgtttatcatataaaaaacatttcaacaatgcatatctttttttttttttttttaagacggagtctcgctctgttgctcaggctggagtgcagtggcgtgatctcggttcactgcaaactctgcctcccgggttcacgccattctcctgcctcagcctcctgagtagctgggactacaggtgcctgccaccatgcctggccaattttttttgtatttttagtagagacggagtttcaccatgttagccaggatggtctcgatctcctgaccttgtgatccgcctgccttggcctcccaaagtgcggggattacaggcgtgagccaccgcgcctggcctcaacaatgcacatctttgaccatattaagtggatatatagccatacataagcttgcccttatattgtttgttttcatttaaatgtttttgggtgtaccctatagtggaaagagcatgggttttacagtcagttaattctggtcaaatcctggttttgaccagataattaatcgtattagcaatataattaattaatatatataattaatattatatttattattattatctaatatatataataatatataatataatattaattatattaataataatataattaatcgtattagctccagccaattagtttgactttggccaagttacttaatcattctgagctttgtttctccatctgttttataggaataataatacttactttgcatggttgtcttgagaattaaataagattatagataaattgacagatagttaatacctagcatgtgccagataatcgataccacagattaacagttaatgttagttttcgttttcctccatttatgtgcttacttttatattattttaatattagagtacagtgtcttaaaatattcatgttttacttggatatctagaagataaaaggcattctgtattttatgtcaactattgctagtagcttttacctatgggagtaaatccgtggaagaagttttgctcaatgtatgctaacatgaagcagctttctgttttcagtttattccctcagatattagtttgttttttctctttttaatttggaaagcaaaatgaggccagcattcgttctatgtttgtgttagagcagcggtctccagaatgtattgaagggccacaagtgttataaagttaaatgatgactgctgactttcagtcttcctctctatacttaggtacttctttttaaaaatgagttttgttacaggtttagatgatttttttttttacaaaataaaaatttaataaattaattttcagaaatcaatagcttttatagatacaatatgtctaatttcaagctctaagggaagaaaagacccatgttataatagcacaaaacat

SEQ ID NO: 98867 - DNA, 1125 bp, Homo sapiens
cataaccaaacaccttagtttttaatcattggtactttggtggaagaggatctataccaaacaggagcctatttgaaaaatttgagttatatgtaatagtcatttacaaggggacatcatgtaccactcctttttcttttctgttaaaaaatcatttggcgtgttctttcatcttatagaattgtagctagccgcccctcctttgcgcagcttagatcagccctctccaggcagtactttgaagtctgtgaaatacatagataatttaggctgacatacttgccaggcccatttaaaaagcagaattgtttgatggcatgacacaagcagtctgttaactgagttataaaagaactgaggcatttccaacaaaccccagctttggcatgacttttaaatagttcttattttgtggtgtgtagtcagtggactttctatgatgtagtatggtctcttagtgcaacatactaggaaatgggaatgttactatacccagcaatttcaaggaggaatgggtggaaataagtttgtggttattttctcctttgattcagttcagctacagtagagggagtatcttagcaagatataaggaagtaagtccggagagagcaataacccttgggaaacgtaaaaagccagccaatcagtgtggagttgggagggggcgcctaaataatgaggttaatctaattattacggtgggcttaatacaaagccctagaaatcaggcttttcttaaaaatattgcaaaattaaatctaaaaatatatagttcattattgtatgtgtatgctataaacatcctgaaacctttcttgaatgaaatagagtataaattttttaagttctcttttgtttttgtttttgttttgaggcagggtctcactctgtcactcaggcatgatcatagctcactgcaatctcgaactcctgtgctcaagggatcctcccacttcagcctcccaaggagctgggactacaggcatatgacaccaccagtgtgcctggctaatctttacatttttttaaataatttattgtagagatggagtctcactttgttgcccaggctggtctgaaactcctgggctcaagtgatccttctgcctcggccttctaaag

SEQ ID NO: 98868 - DNA, 2690 bp, Homo sapiens
ttctaaataatgaaacttttttgaagaaaaaagtctaaaccatagttttccagttgatgtgaaaattcctcagattttcattggtgggagcagtacctaaactactggttcaaaagagtagagatagagtggcaagaatgagcaaggcagtctcattcagcacagcacattggtggaaaagatttttaagttctttttcattgctagagactgctttagaatatcagagaaagagttgccagtcttaagggagacaaacctgtgagcagattcttacagataatgctgagagaatgtaccagttgccccttggtagctcagaagggagcaacagttgccattaacttgttttctaatattaaggaaaaacccaaccttcccagccttgtatcaatttggggtgggcaagcatgtcttccaaaatgaaaatagaatccatactggatttcgatatgcctcccacacattttatgtgaccagtattcctgtaagagtagatgaaagactcctagccctattttcatgcttgacctcgttggacagtttcttattctaatgtagacttttttgactgaccatccgtgttgtatgaggccgtcaggctgccagtttagagactgcatcaggcacactttttgagcattaagacttccactctaaatcagacacattcaggttctttgaggctgagccaaccactgcatttattgagactctagatatgaagttgctgcaacattttaaaaaattagtcatgactcaagggactcagctgatttatgcattttgttgggcagagtggcatatgcttttggaatgagaagttgaatgcagactctgctgtggggtaaatttttcagttgataacaaggaagtcagcagacgcagcattgaagctgccatatcaggctgctgtgtgagctattggttggtgattggtttaaatccttaacattttaattttttctgttaaatgtcaggaacaactaaactataaacaaaatagtttaaaagaaaaatgacttctggggaacaaaggacctaattgtgaattcttaatccttatgcccagaaaagcaactgtattttgcaaaatccaatattcaggctttttcttaaacacagattgacttctgtgattgcagtttattcctttatggtcactgaagctgccaatgtatatagatagaatctctctgaaatggcaagagaaaacatatcactgggttgagtgagtttaagtgtaaaaggaacaagagccaaagaaagattggtttggctttgcaatgtaagagggtgatttagatttagtaagatacaatcctccaattgtcaatttgacatatatctgtggagaaccctgaaaatcaaattgccatgcattttgtttataactactacatttacaaaatgttggattttaataaacatagatggaataggataggttaaagcctcttgaccgttcatagggctccagttagtgtcactttcttcatgaagcaggctaagccttcactttttgctcagagcattattaactttctctaaagcattgctgtagtcctggtgcaagctacatttcctctacccctcaaatcactgacaaaatagtttttaaaatttcacattttccctgaaacttttctaaatgagcgaatgatctacttcttcttacctgcttagtttggatgtagaaatacagaatttttttttaaactttagtcacaatatatgtttaagattcttgttcctttctcctcccttgaccaccaaggccatcacagaacaaacctaattcactgttcttttatgatttggtttgttctttcaatttgctattggtttgtatcatatatgtatgttggtgtttgtgtatctgtcttataagttacgaaaatatagcggtcagatctttaaaggtttttgtgtaactctatgcttaaaaataactcaataaaagcattttcattgtgggcttgtgaaatacttcagttctgagaaattatccagtaattctggagccctcaaataatggaggattatctagcgtccacatgtggaatgtggttttccaaagagagcttatgtcatcagtctggattaatttaatttcaccatttcatatttttggcatgtagaatttccaattattaattcaaaaaatatgggtgtaaggagcatcgacattaacaatttttgaagtaacacatttgcatacatgatggcatcttaactgtgtaaatacatcatttttaatatagaaagttattttagtacatttggttccacatagttaagatctgctaacgtgagtataatgtgtcctgtcatgcattgaatattgtgttttttttttaataggtaaaaaatccattccaggtttacattaactaaataaaagccaacccacaaggacgtactttttccttcatgcgttgagaaggtcatagatttttcctcatatttgtttcttggcttttcagcactattttaaaaaggaagttctgtactttggtgctataatataggagggcattttaaggaaaattgttcttaagctttatttctttttaaaaaaattgaaaatatatttgtgatgttttaagacctttcatgaatatgtatttttaatttaaaagcaattctaatcttttcttatttttttttttttaatatccaacttctcc

SEQ ID NO: 98869 - DNA, 1654 bp, Homo sapiens
gcagctgtatatattttttagcacctacatatttgtattctgttttcctcattgtgatattttaattgcatttacatttttcctggtcctaattctgattaattcatatttaatttatttatggttttatttatttatttgtttagagacaggttctctgttgcctaggctggagagcagtggtatgattatagcttattgtaaccttgaactcctgggctcaggcaattctccacctcagcctcccgagtagctgaaactaaaggcatgtatccatacctagctaatttttaaatctgtggaggtggtgttttgctatgttgcccgtgctggtcttgaactactagcctcaagtgttcctcctacctcggcttcccaaagctttgggattacaggcatgagccactgtgcctgacctatatttaatctatttaaacatttgtatttcttgtagtctatttcaattactttgtgaaatgaggcaggatatgaaaacttgcaaacatgcatttgaaatcttgaaagcaaactttagtttttaaaatgataatcaattagctgggtgcagtggtgtgtacctgtagttccagctacttgggaggctgaggcaggagatcactagagccatttgaggcatttgaggctgcagtgagctatgattgtgcccattgcactccatcctgtgcaaaacagtgagactgtgtctctaaaaaaagaaaaaataaaataatgaatgataatgaataaaataaccaaggcttagatataagcaaacatatttaggttgtatttgtttctcgtttattttttaatcaaatttatgatttttcattttgtaaatttggaagccagaatgttttcagttcttttcagttcaatttcagtgtcctggaattgaaaattgaaagtgacttggatattttagggcaatgcattttccagaagtgtcttcctatgaagccatagtctttctgccatggtctttgtctttaaccaagtgtctttgtttgggtcctatttggtcagtgcaatttcatgtcttttcctgtaggtggcacgcactacccttcttcctggcctcctgaagaccatagcagcaaatcgtaagatgccccttccactgaaactgtttgaaatctctgacattgtaataaaagattctaatacaggtaagaataagtcacctttgatttgatttgtgtatttaaaacatttttttcattatgaaaaccttaactatacataaaagcagaaaaaatagtataattagcccctatgtacccagcacccaccttcaacagttaccaacacatggacaggcttctttcatctataccactatcaacttcccatattattttaatatgaatcatagacattgtatcatttcatcagcaaacactttagtatgtatttatttatttatttttttcctggaggcagagtttcactcttcacccaggctggagtgcagtggcctgatatcagctcactgcaacctctgcctcctgggttcaagtgatacttgtgcctcagcctcctaagcagcagggattaaaggcatgtgccaccacacccggctaatttttgtgtttttagtagagacggtgtttcaccatgttggccaggctggactcgaacttctgaccacccg

SEQ ID NO: 98870 - DNA, 2207 bp, Homo sapiens
gcctcagcctcccaagtagctgggactacaggcgcccgccactacgcccggctaattttttgtatttttagtagagacggggtttcaccatgttggcgaggctggttctgaactcctgatctcaagtgatccgcaaagtgacctcagcctcccaaagtgctgggattacaggcatgagcacctagccaggtttcatctcttttccattcatttgtaataaatgaatcaaaacctgttcccagttccttcgtaagtcattcactttgaaattgcccattatatcagttcttgactgtgctgcttatgtcttttattgtaattgtctaagtttattggcagtttcatttagaggttaggaatatttaaatgagaatgatactgctttaatattgagtattaagtgatttgtgttatagactaggatattaactataaagggagggcattttaagattataacatctttgcttattaataactttaaatagttctcttttatactgataagctcttgtgctgtttctcttgcatatgcaagtctgtatgttttttaacctagattttagagaaaatcatgtcttcttctagaatcaaggggaatcttagaactggaaggttatattttaaagaaggttaatgctattataaataatatctgaattctgatttgaaatagtttctttggattttggtttttacttctacaaaaataagggactgggttagttctaaaaagaattctaaaagttctaaaagtgtttaaaactaaatttaaaaattctaaagtttatctatagaaccacctgctaatgttgtagattagagctagactaattaaagaactaattggtaatatatatcaagtatatgaattctttatctatacttagggtcagaactttgaagaatccttatactaattttggaaggattgtagtaatgagttgttatattttattttctgaggtctagtttcctattgcttttaaagtttgcccatggtgttccttttaataagaggtattcaaattcatttgcatagaatgatttttcagtaaatcttaatggatttttgcttattcgaaatgtacctttttctcccagttttacttatctagcttgattacttttttaaaaaactttattttatttttatttattttttgagacagagcttcgctctcttgcccaggctgaagtgcagtgtcctgatcttggctcactgcaacctccgcctcttgggttcaagcgattcttgtgccccagcctcccgagtagctgggattacaggtgtgtgctaccataccttgctaatttttgtactttaatagagatggggttttaccatgttggacaggctggtctcgaactcccggcctcaagtgatccacccaccatggcctcccagagtgctgggatgacaagtgtgagccacctcgcttggccttttgtcaacttttattttagattcagttagtacatgcgtgggtctaattacaaaggtatattgcatgatgttgaggtttggagtgtgactgaacccgtcacccagtagtgagcatagtacccaataggtagtttttcagctcttgctccccacctctctcttcgccttgtattcccctagtgaagcttgatagatttcttaagatgtggtaactgttatgttcttcaggatttacatcctgtcttttctattttatataagtggaaggaaaataatcagaaatgcattaaatgtcactataaatagctgtggcttagcacacttaagaatcaatctttcttgggaggccgaggcgggtggatcatgaggtcaggagatcgagaccatcctggctaacaaggtgaaaccccgtctctactaaaaatacaaaaaattagccgggcgcggtggcgggcgcctgtagtcccagctactcgggaggctgaggcaggagaatggcgtgaacccgggaagcggagcttgcagtgagccgagattgcgccactgcagtccgcagtccgacctgggcgacagagcgagactccgtctcaaaaaaaaaaaaaaaaaaaaaaaaaagaatcaatctttctgcataaagtaccttaaagatcaaagagagtgcctgtcttttgacctaacagattctatattttaccttgctttaccaacaggtgagtcctaccatcattaatttggctaagaggtttatatttatggttaa

SEQ ID NO: 98871 - DNA, 1986 bp, Homo sapiens
cctagtctctgactttctaagtgtaaataattcacacttcatcatattgatttttgctatatctgcatagtagttgtaatattttcttttaaattggctcacttttaagttggcttatgtacttcagccttgttataggaataatatctgtaaaaactataaggttcatttacttgttgtatttttctaacacattaaaataaacacataaatattaacattaaaaaagttcctggcaggcatggtggctcatgcctgtaatcccagcactttgggaggccgaggcgggcggatcacttgaggctacaagttcgagaccagtgtggccaacatggcaaaaccccatctctactaaaaatacaaaaattagtcgggtgtggtggaggttgcagcaagccgagattgcaccactgaactccagtgtgggcgacagggtgagactctgtctcaaacaaaaaaaagtttcttactgtgtactaactactgccacttcagggtagcttaatttaaattgcctcttgtcactatcccttattatccattgccatgataaaatacaagttcactcagatacacagctgcgttgccatgtgtctgcagagtgtttttcttttacacagagaggactagtttcatttgagaatagattgcttcatgtcagttgcatttcataattaatcagtcacattatacctaagtcttgctgtaaaacttctttatgctgtggggaaaacgcttatccccagtgtgcatgtcaccattctccatctcagcagctgtagcagatccgggagctgttttctgctatggctggatgtggcttcaggatctttctcaagaaagcatggcaagaatcactagaactgacattgacatgaaatgaattctttttaccatttcagttgatgtgtatcattttgttttaataagtgaaatacaggccaactagcctttgaaaactagttgtagaacagcataatgaacaatattgcctaacattggacaatagtacaataatctgatggtacatcagtttttgtgttacgttttaaatgctttttcaaaaagctagcattaatatacatgataataatttatccttagtaatgatttgtcagttatcatcattgttggtattttttgagtgcttactctgtgccaggcaccatacttgcattatctcattatatcatttattattagacttgatgtatctaatcgtcagtgagtttttaatttcataacttctgcctacaatgctggtttctgagggtggcaagcatctttctcttcgattggtgggtactcagcagtttatttgttatgagtttcaggcatgtgcacagaagttaagtgatacagtaaagaacactgggcagagttccagtcacttgaattctgttgtcagtcctactgttctgccacaagtcagtatggatttagcaagggttataatggtagtcaaaatggaaagtcatgaaataccaaggagggagagaaagtttctgactagagtcattaggaatattatggaagagaggtcatttaagtcagccttagggaatggtagcaggtgaggctgggaggacatttcaggtaaggtagggaaacataaggtttagggaatggctagggcatcatgggagattagattggaaaggtaaatgggaaactagcttaggaagggcccgagtacagtttataccatctccatgtgaaaaatttactttagctctgtatgatggctaggactcattgtgaaagaagtattaatgttaaattccatctgctatgggcctgagattgatgtgtatttattgttagcttattctttttttgtttgttttttattattattattattacatttacttcagctcacaccaggcctattcttaacttgctgatatgtgtagagaatataaattgctcttagaagttgacttacagcattactttttattttaaacttaagtaattgctttt

SEQ ID NO: 98872 - DNA, 2170 bp, Homo sapiens
cattcctttttcagagaaactccagaaaatcttgccaaacttctgaccaggatgtatttaaaatcagaagtcataggtgatgggaatcagattgagattgaaatccctccaaccagagctgacattatccatgcatgtgatattgtagaagatgcagctattgcttatggatataacaacattcagatgactctcccgaaaacttacaccatagctaatcaagtaagattgcacccttaaataaacactccttattgttagaaactgattatttaatgccaggaaggcttcgagaaaacagaacgtaggaatcaagcagtatttggacatgctctgcaatgagaggcatttgctgtggagaggatacaaaacagatgcccaaatgattagagtaagttgaaaacctgtgatgactagttctttgaagaaagacaagttttgagtttggagcccttgttgaatctctcagagattcattttctcaacttgggcctgaaggcagaagctgtgtgtgggagagatggaagtgggggtggtttgtacatctgtgtaggagcagaggggtggcagagcggtggggagggaggaggtaatattgatagggaaatagtggcattagcagtacgttagtaagggtgaaaaggtttttaatcttttaaacatttttatttaaaaaagttttaatggcatgttctgtataaatctcccttttaaaaaacaagaaataattgcggtgaaatcaagtggatgctttttttttcagtttcctcttaataagctcactgaacttctccgacatgacatggcagccgctggcttcactgaagcacttacctttgccctggtatgtcttacatgctttttctgcccagatgattatttacttagactctctgaattatttattctatgatgctttataagaatttataaaatctagactgttagaacttccagattctggaagaataactttgttacttgagattatacaattcctggtaaagtaatgttgaagcttttgtttttacagccacaaaagaaaatgaaggcctagaaaaaaatacctcaaatgagagatgacaaagtattttatagtttcatgtgagtgttgagagttcacaatgtatttcataaccaaatttattaagttagaatatttggtcttaatttggttatggctgtgcccactagatgccgtcctgggtaaaggcttgtggactgttccacattaaattaatttctttgtctttgaacatgttcacaaacatttgctttgagttgaaaagctgacataaaaggcctaaatcaggaaatgacttttattacaaaatcagaaggaaatttccctcccccaccagattgaccatttgaaagaataaaatgtgtatgcaatttgtagttccgtttttccctcttgctgagcatttctgtggtgcctgcaatgtagttcttgagcattcaagtatgtttaatctatgaggggaaaggaagcttcttctttttctcccctgcaacttagccctacctctgaaattctcaatattttagagtatttaagggactctacttctagtttgcttaataaatattaagcattaagatttttctgattcaggagtcattcattcaacatttgttgagcatttattatatgtcaggcactgcaccaatgaggaagcctgaggctgagagaggataagtacgtagcacattttacacggacagcaggagaactgctgtgttccaggccaccatacctgcatgatctcattatatcatgagcagggtcctgacctttagcctcctagaacagtgcttttccatggtctcataccgtgtacactaggtctgtaatgccatgtcattcatctttgcacatatatatacacacatttgtagttgtgagcatccaggatttcatataaaatgaagtaccaaaaataacattgaaaaatatatttttattttttaaaacatatgagtgtcacaggaatacatcttattttaaaggactcatactttaaccatgtagattaaaccataacagttcttttccccacttcgaatcctcttttcctccccagaaacaactgctgttaaaacttgggtatgcatttttccctgcccttttatattagtggtgccagtttgaaaaaagttacttatt

SEQ ID NO: 98873 - DNA, 1041 bp, Homo sapiens
taaggtatttcctttataacttttaggtactccttgccttcagaaatattgtcagggtagtacagcttttaatattaattttttaaaaaatttaattcgtgcatttacagaccttgaatgtctttcctgaagcctgtatatataggagtgaaatatttatataagagtaaagcatatattccaataaggtcacggtattttttttctaagaattttttttgaaatagaaaaattatttaacaaatctatatggtgtttactacatgccaattatttaatctttgtaagtaccagacaagataggaattttcattatctccttaacaggtaagaaaagtggtttgcctagtgtcatactgttaataagtgcttgagccaggattcaagcagcctggcctcagagacttaggagattgttaagatttattccagtaattagccatttgtctctgttgaagcccagtgaacctgaggttgggggttggggaacgaaacgatttgtctcagtcatggattataactgtcagagaactgcgtaaatgcagaacacctgaagataaggctaggcctactcatgtttttattccacttcctttcttaaaatgtatacgtaaaggtccattagatgtgaggacacaattatattaaatattaattcatttccatctgagtgaagagaatatatttatagattactatatttgtttttcttttctttgcaggcaaaaatagttcttgatattattgtcaccatgttcagtgaatattgtgagaatcaatttacgtaagttcatccagcacctttattgatggcccattgttctgaaggcgaggctttgtgctaaatgtaaagataggccaggtgcggtggctcacacctataatcccagcactttgggaggctgaggcgggaggattgcttgagcccaggagttcaagaccagcctgggcaacacaagaagatgccatatctacaaaaaattaaaaaattacttgggtttggtggcctgcgcctgtagtcctagctattggggagactga

SEQ ID NO: 98874 - DNA, 1114 bp, Homo sapiens
ttttctaacttttcccctcctttttttttttttttttttttgagacggagtttcgctcttgttgcccaggctggagtgcaatggcacaatctcagctcaccgcaacctctgcctcccgggttcaagtgatcctcctgcctcagcctcccgagtagctgggattacaggcatgtgccaccacgcctggctaattttgtatttttagttgagatggggtttctccatgttggtcaggctggtcttgaactcccaacctcaggtgatccaccggcctcagcctcccaaagtgctgggattacaggcatgagccaccacacctggcgttctcttcttttttaatattaggtcagtatgtgaactatagtgatagaaattaaaaaaaaaaactaattttatttgacttaatttgttttcagactgacaatcacctgaaacattatttacatatcattgaaaacaaacccctgtatccagttatctatgatagcaatggtgtcgtcctttcaatgcctcccatcatcaatggtgagttattttataagcatcacagatctttgctgtttccttttaatcttcagcatttctgtagaattctcaatagacttggctgaatcaaattcaaataactcataatctgagtatctcaggtcttttgtagattctaatcattcttttcattcatttattcaacaacattttattggtgattcttatgtaacttatgctcatacatttataaatattttctgatgctaggttttgggttctattatgtttcttcaaaggttattgatgttttggttttagcaagtaattcacttggttaaactcaaagtcaaactctgtcatgtctgtagttttttttcttttgttttttttttttgttgttgttgttttttgttttgtttttgagacaggctcttgctctgtcgcccaggctggagtgcagtggtgcagtcatggcttactgcaaccttaaactcctgggctcaagcgattctcccaccttggcctcccaaagccctgggattatagatgtgagctgccgtgcctggccttgcctagttatatagttaaacaaaaacttttaatttaaattttgccctcttaattc

SEQ ID NO: 98875 - DNA, 1202 bp, Homo sapiens
acatccctacttctatttctttctctcctattttgttgcttgctgtaatttcctaaaattaccttaaatcctttgtggataaactgtagaacaagtgaaatgaataccttttgaactttccttatacattaaagtaaacttgaactgtaattcagagctgttgaaattaaaattaaattttttccatgactaaggtaatgcagctatgtgataaaatttaggaaaacatagaaaagccaaaaaacccacaattcgatagttcgttctaatttattaaaacatgtttacttgagtatatcaagaagaaataggttaaaagaggtaaaggaaatgctaactttgaagatatcctagaaacaatatttgggaaaagataatggcaaggaattttcttcagctcctgaaatcatgtatttcaggtagttttgtgatttctcagtactcttaatggttgtgagaatttgttcattatatgccactaatgatgccatgtagtagcaatatgctgtttcagggaagtatctgaaataattaaaaaaaatatgtagtctatatttatgttatctttagaatttcggctttagaatattcaaatctgtctcattctcctcctttcctttcctccctccttctccctcaacctctcaacaattaggaaaagagcactggttgccattggtacccatgatttggacactttgtcgggcccatttacttatactgcaaagcgtccttcagatatcaaattcaagcctctaaataagaccaaggagtatacagcctgtgaactgatgaacatatacaaggtaaatattctttttgattatgcagcagctttgcaaaaatcatgaaattccatcaaagtcaagccttgcaactagggaaatgtaatcaatacttttaaaaaatagcagtgtctggactccaacctagagacagtgattcatctgatctagagtgggacctgaacatagttttattttatttattattaaatttttaacctctgatatgatttcagtgtactgctaggattgagaaccactgaagtagaccataccacattgtaatcttcaattgaaactcatgcaagtataaagaacagtaaaacttagctagtgttttttgtgggaaatactgttacaagctgtctatctcccattatttaaaagtccagcagcgaaaatgaattcagtagtcac

SEQ ID NO: 98876 - DNA, 1098 bp, Homo sapiens
ctttgatcatttgctaaaatgattatatacttagcccctagcccttaaaaaaacatttttttttaacctaggaatgaaaaagaacaaagcctttgctttccataaataattttggataataatatccaatgcatgtttaaaacacatttgagatataattgtttaaattgtggaacattaatgaaattttaaaagattttaaacttttcagaggggttgtttggtaaatatatgaattatgagcaaactttttctcaattatttaatacattttcagaaatcttactgaaatataaattctgtgaaggtagtgactttttctcttgtttaccactttattacttgttgactgaataaattaatatatacttgtttgaatgaaaatgtatgccagtggcaagaatgcagctaccttcctattacaagatattacaaagaaaagccttactgtttgctatctctaatgatattatgaatttcagacagctaagatacgtccttttgcggtagcagcagttctccgtaatataaagtttactaaagatcgatatgacagcttcattgaacttcaggagaaattacatcagaatatttgcaggtttgtggttgcattttctttcttccttgccttcccctttccctttgtctccctatctcctttccatcctgatccctctccctcttctctcttgccacttctgccttctttctctctctctccttcctttcttcctctgcagattttttacaaatcatttctaaattaatagtatgtgacagaatatgagaatttcactttgctttaccagataccttttactgcttgtaaatgccatatgcatggagaaacaggaggtatattttgaatactgtatagagaagaattatctagtcctagagacttccctgctttttgttgttgttgttttggttcagatcagtcgtggattatgctactaagtataaaccgtgttaatgaagtatgatatatcatttttaaaatggaaataacattttggcttattctcactttttgagtgagagtaattataaattgacagaacttgagtttaaatgactaaattttacttattcagt

SEQ ID NO: 98877 - DNA, 1153 bp, Homo sapiens
ggctcatgcccataatcccagcacttcgggaggccgaggctggtggatcacttgaggtcaggagttcaagaccagcctggccaacatggtgaaaccccgtctctactaaaaatatgaaaattagccaggcatagtggcgtgcacctgtaatcccagctactcaggaggctgaggcacagaatcgtttgaacctgggaggtggaggttgcagtgagtcgagatttgcaccactgcactccagcctgggcagcagagggagactctgtttcaaaaaaaaaaaaaaagatagaggataacaaatatatacagtgaaaaaaatgaacagctattaaaaattgtttttatttttgattacttcttcattatctggtcagctgcaaaagaataagagttctaactgatgggctagattctgaaattgtgagggtttaggtgagtgatgggtattggtgaaatggtgataattaggcattaggttaaggatggttaaaattttagagttgactcagttggtttcctatgggacaatcagatgcttttattttaggatcaaggataactcctgagagttcgtttcccaaacctgcccagtgagaatctgtatttttaccagtcaccttgtgatttttatgatcagacagaattaggaaagcaacttaaaatgttttctacttaaagtgagtccatggaccagcagcatctgaatcacatgagaacttactagaaatgcagtcttagtcgccacccaacacctattaatcagaatctgtggtttaacaaactccccaattgattgtaagcacattgaaatttgagaagcactgccttaaaacagtagttcccaacttctccctatgataagagttccctagagatgccttcaaaatgcaccatttaccaaatctttgtcttcacttattttattcagtagggccagatggaaccagggaatctgtattttccataagctctgtttcttcctagaagctcagaatctcatggttagaataactatcataacttaaaggttatctaatccagtccctcagctgatgttgaaatgctccttaaacggttgctcagttaatggtttgtagcctctgctgggatgctagtgataggaaatacattactatgaggcatcttatgtcat

SEQ ID NO: 98878 - DNA, 1301 bp, Homo sapiens
tgtaacttctctgcagtggttatgtttaagaaaatctgttactctgctgtagtgtggtgcttgagatattctaaactctttgccactgcattaaacgtgattctagtggtgtttcttctgtcatctccctcttggctgccttcattctgctgcactatccctttgctatcactagtttgcttcccattgtacctattatcccttctaatttttaccagtgtctgatggtctctgactgtttttagtttttatactacccctctcattctcatgtggacttgggtgcccacaggatttaggttttagagtcatcctataagaagttgtgtttcttttatttagtgaatcatctttcttttacccctttgacacttttgttgttgttactttatgttcttggtgatgttttaattttcttttagcttgagatgggaaaactttttctgtaaagggccagatagtaaatatttaggctttttggctctatagtctctgttacaactcagctattgcagtgtgtaagtagcagtagataatatgtaaatgaatgggtctgtctgtgttccaataaatctttatttacaaaaacaagtatcaggtatgatttggccagggggctattgcttgctgacccttgtttagatggatttgtgcttttctggggtgattgaggttgccagatatctgaactcagttaaagctgaagtatttttctgtctgctatgattataacacttaatattttcatgttgtttttgtcgtggatataataatcccatgttcttgttatagaaaatatgtataatgtagttactgccttatagggctgacaacttttactttttaaagagagtttaaattatttaatttttatcattactttttggcttgttttagacatctgagaaggaaataataagtaaagaacaaggtaatgtaaaggcagcaggagcctctgatgttgttctttacaaaattgacgtccctgccaatagatatgatctcctgtgtctggaaggattggttcgaggacttcaggtcttcaaagaaaggtaaggaaatatgttccttaaagactttgctaagttgggttttcttttctttccttgtcattatcagcagccatgtttaaatttctaggaaaaagcttgtagaggaacgtagctttagctctcaatagagggttgatttgaggaattagattcatgcagattgtagccatttgaaaatttccatgaaaattttagtcatagccattcatctttgagaacatattttaaaactggtgtttaatgctttta

SEQ ID NO: 98879 - DNA, 1128 bp, Homo sapiens
aaattcagtctttacatatggtcattgtatgagctgagatgctgaaactgaaagaagatgtaagcttctgtgtctttttttttttttgcaaaggaattagatctttttttacagtagttcctccttatccacagttttttgcctccacagttttggttacctgcagcaaactgtggtttgaaaataggtgagtatagtacaataagaaattctgagacagaaagagactacattcacattactcttattatagtatattattttaattgttctattttattattagttgttaatctcttactgtgcctaatttataaattaaactttttcataggtatgtatgtataggaagaaacatggtatatgtaacatttagtcctatccaatgtttcaggcatccactggggagcttgaaacatatcccctgtggataagggggtgctgctgaaaaatgaatgcagatgccttcatttctccggttattatattatcttctctgtatataggtccctcctgagatctgccatctcctgggaggtgactcagctttcttcactattgaaacagtaattttattaacccctttgattgaacattgtttaaactcgaattcttcctcttctctttttgcctctccccattccccttcttttcttttccccctttttactccttcctcctcctcttcattctcttgtttttcatttttcattttccctaattataaaaatttgcctcctaagtttgagatgcccaaggtagaggttttttggagcccagcaccaccttgtacagccccagcattgcatagactcctgtggttcctcaggtgggactttggcacataatactcgtggccagaagtgaatttctctgcatattgtgcaaatgtggatataattcttaatttggacaaaaatttgaactacttatattgtggcagtgggagggcatcatgtaaaacaaaaatcattacatattttgatagaaatccatcagttattttagcaggttgttggtggtggaaatagtaggaattctggttaagtggagtttccacataattaaagcgtaacattaacagttggaatacaacttgtaatcatttcaagtgaaaatttcttaaat

SEQ ID NO: 98880 - DNA, 1062 bp, Homo sapiens
ttttcttttttttatcttaaatttttttggcccagctttttttttttttttttttttttttaattttttgagacggagtctcgctcttgtcagccaggctggagtgcaatgtcatgatctcggctcactgcaacctctgcctcccaggttcaagcaattctcctgcctcagcctcccaagtagctgggattacaggcatgcgccaccatgcctggctaattttgtatttttagtagagacagggtttcaccgtgttggccaggctggtttcaaactcctgacctcagatgatccacacacattggcctcccaaagtgctgggattacaggcatgagccaccatgcctggcctgtttgtttttaaatgataatatgtgatgcctgatatttagtagtatgattggtgtaaggcaattagtaataagaaaatgcagtttgtatgtagttttcacttatactgaacagagtgaaattaaccatctccttttttattttcctagctgacgaagaatttgatgaactatgttttgaatttggtctggagcttgatgaaattgtatgtattggatatttgtctatttttcaaagattgtgtgcataagcttatttttcagggttatactgtatttcatctttgttaccttatagttagactaaggtgataatgtttgtgggccatgatttctgtgttcagagggctaagctccatgtctgtctgttgccttgactaaaatctcaaaaggagttcatgccttattccatctacaatcaccttgttaccaggctcatgctgtggaaatggatagaatgtgttagataaccccagtatgaaagtaagctccctcctttggcaaattaatcacagaaagggaccaagaagcagtagaaatgttgcttcaaccagagttaccctgcctccttcacttccagcgcctcctccttcagctcctctgcccccataaccttcctccgtgcctcttcaaccagtactaatgcattactatattcattggtcttgtaaaatgaactaatattttttaaggacttgcttataaaaatgag

SEQ ID NO: 98881 - DNA, 2541 bp, Homo sapiens
gattgcttgagctcaggagttggagaccagactgggcaacacagcaaaaccctgtctctacaaaaagtagctgggtgtggtggtgtatacgtgtagtcccagctacttgggaggctgtggccggaggatcgcttaaaccaaggcggtcaaggctgtagtgagcggtgatcaagccactgcactccagccctggccacaaagtgagaccctgtctcagaaaaaaaaaaaaaaaattcagtcagaaggattgatgttatttattgagatgtactttcaagaggtcagaaatgattctcctcattagtttacctttattgtgttcttgcttgaaactgttaactgggttgaggtcagaattgaaaaagcatgttcagcaaacatgtggtttccaagtagtatggatacatcttgtttcttaccttttttttttttccccagtcttcctctttttttcttgttttcagataatgtctcattcacacttttaaaatccacattctctctctttagtccctccaagggttgctttctatttgaaattccattgtttctaccagtccccaccttcctttttaccacctctttgcttagcaaggatatttctctttcaagctgtttgccattttggttattttgctcttctgactcctttggagcagttttgtctccttagtctaccttttcaacggactttctgtgcagatggtttcctcttgccactccttttcttgttaactgatttattatcactgctcttcaattatagtcctgttctggcgtggtgtaatagctggcagtagtggcagaaccttctgtgtatatcatatacacccctaaggtgtggttacttgatgtgtcatttcgttagaggaaattagtaatcacgattttattgttgatttttctttgtatagaaacccatgaaataacagctgaaaggaataaaacatatgataattaggattcagcgtattttaatagttctgtaccacttagttatctattactgcatactaaattatcccaaagtttagcatcttaaagcagctatcatttgttatatagtttctgagggtcaggaattggggactggcttagctgggtggtttttgctctggatctgttaccagattgcagtcaaggtgtttgccagatccgtagtcatctcaaggcctaactgggtctggagaaactgctttcaggttcattcaagtggttgttggcaaacctcagttccttgctgatttttggccataggctttagttcctcccaccttatcctctccataggactacttagcacatgttagcttgtttgccccagatggagaggtccgagagagtaggtaagtaagagagtgccgaggatagacgcctgttttcaataacagctcagaagtgatacactagcccttctcatattctcttgatcacagaccaatcctagcacaatgtggaagggaacagtacaagggtgtgaataccaggaggccggtattattggagcccatcttggaggctgactaccaccgtttcccctctaacctccactgattcagttcctcccatatgcaaaatatactcaccccctcccaaggccctcagaagtgtcatcccattacagcagcagctcagaatctagaatctcatcatctaaatcaggaccagatgtggatgtggctccttgggtgtagttccttcagtatagcttctttagtacactgttggcctgagagactcgagagaccatttatctgccccacatatacctaacatacagtggtgggatgggcataggataactcctgtagcccttccacttcaaaggggcggaaatgggagacacaaaggagtcattggtccatggcaattctggaatcaagtggcaaatgttggatgttcttgattaggtctgaaggcctggaataattctccatggctgtctgccctgccctctaggctcttggtttccacccctctgagtgatccctagaaagcatgtgctttacagctggttggttttctcagtctacttactgctaatagaattttgagagttcaaagactttattttatcctatttctatccctttcaattctagctggcaatgcttctgcatatgtatttcttctaaaaacttggaaggtctttggtgcatgttactggcttccattttattagtcaaaagccacaccacctacacatctctgaaatatattgagtttctgctgataacagtgctcttaattaagccctattgtgtgattaattggatttatgaggtgcattctttataatttttaatagcaccctttgttggaatgattagtgcctttgatctttctgggtcttaagattttatggtcatatccttgattttatctttggaccatgttttcctggcagtgccttggatttggtctttgctcagaagttatttcttaattttagcattgtttcacatctggagaagatgagaattttttaaatccccaacatcctggctcatttttgtttaacagcctttcctttagcttatc

SEQ ID NO: 98882 - DNA, 1055 bp, Homo sapiens
aatgaagtaaaaactgaggtctgttaacagcccctctcccgccgccaggatttgcacacctttctctgcaggaagccttgaaccctctccactcgcatttccaccacctccaggcaagatctcccacgtggaggccccaccccctccctgacgcgccccactctcgccccgcccacctggtgggcgtccccggccgttagcgccctggaagcatccgggacttcagggtcagtacattacaatgcctgacaaatcctagccagttctatcaaattatatctttcttacaggcttttaagctattagtctcataaagatacatttaatcagcgaggtaatggcatgatgagtgtttttaggttaaaaagagaacaggaactgttgccagcagaatggcgatattcaagacaacacgcacaagaagaggcgggtcctacgcgcttcgctagggaagcccgggtcagctcgctgcgcaggcgcagtgagttcgacacaccatgccgactgtcagcgtgaagcgtgatctgctcttccaagccctgggccgcacctacagtgagtggcggccctatacgttgggccctacgcctcttctcggaggcagggcctccctccaaaagggcaatgtggcgacattcatgccttcctgaaggttttggctccgggaggccggggtttacgcgggaaggccgatgatggtggcggtccggctgggctgtggtagcctcggaaccggcatcgcagcggtgccactgcttgtgcccggcttgccgtgtcattcattcagcgatctgccatcgagtgcctacagcgtgcctggcaccgacatccaagccaggggatagaacaggaaggaaacccggggttgcatcccgagcgtagccagttaattgcaatagcagcgctgtgggaactcagtttataagggggtaggaggagagatttgtgcagcggggtggagaacggcattccacctgtcttcgttttattaatgtttcctgagcgcctgttatgtgtcaggcactgttctaagagcttaggactagagctgtgca

SEQ ID NO: 98883 - DNA, 1045 bp, Homo sapiens
ctacgtgacagaatgagaccctgtctcaaaaataaataaataaagtaggaaactttaacctagatgtgatatctggaactgtggtgacaattttgccaccataatgaaacaagcatgaggctgacagcactcctatccaggatattcctgggtatgttggtcaaagatccagtgtttcttgtctctagagctggagttgatttgaagccatgtttagtttgtctaaacctagtctcgacaatggtcactggggagagaataatttagacagatacttctagtgggaatctccatttctttaggaatttaattgtggttagtaaccacagattccaactgaggggagttcaatctcagcccaaattaaatctgccagggtacttggagtaggagggacataaacacaagtttaaaaagctgtgtttcaagataaaatgtgctcattaactgtggcaaagatgtaaacatatcaatcattgctaattcccactactcagtgaatcttttttttttttttgctattttataactttatttgatgtatttgatgatcagagattagttcttgtccacattgactgtctgtagatttttgaaagtggtaacaggtacataggtaaccaaagtatagagcttatttggtgaatcttcaccctcattacgttttctggacaaccgcacatggattccctataggacattccttattcctttggcccagacagctttgttgagcctggtatcaatgcgtacatctggagttcccatctccttcatggcaaatttccgaatctctttgagtgcccgaggagcacgcttcttgaagccctctccatggatgcgcttgtgaatgttgatggtatgttcttgggtcaccacctcgttgatggcagaagggccctttttcttctcgccacccttctttgcgggagacattctgccgggtctaagttggaaaggaagttttgttttttgtttttttgagatggagtctcgctctgtcgctctgtcgcccaggctggagtgcaatggtgcaatctcagct

SEQ ID NO: 98884 - DNA, 1052 bp, Homo sapiens
tgattgttagttttctgaggctcccccagccataaggaactgtgagtcaatcaaactccttttgttcataaattacccagtctcgggaagtatctttatagcagtgtaagaatggactgatacaattgccttgaaccacattaagtagcaatttaagatgaattacatatacgataaaacacaatgaaatgttttatgtaatcagtctttcctttaaaatgttatgtaatcagtctttcctttaaaatgttgactatggataaatttgttttttggggctaccataacaaagtaacaaaaacagaatggcttaaaaaaaggaaattgttgtctcatatttctggaggctagaagtctgaaatcagggtgttgcccaagccatgctctttctgatggctccaggggagaatccttccttgcctcttttagctcctggtgtttgcccataacccttgacattgctaggcttatagaggcatcactctagtcccatggttgtcttctgcctgtgtgtcttcacatcatcttccctttgtgtgtatctgtctctgtatccaaatttcccctctttaaaaggataccagtcatgctggattaggacccaactccgacgacttcattttaagttgacttgaccctacttccaaataaggtcacattctgaagtagtgggggttatgacttcaataggtcttttggaggtgatataattcaactcataataccagggttgtgcaatgtttcaggatagttaatggacgtagaagctaacctcagggcggtaggggttgggcagaaggggaaggtggaaaggaaggattttccacacccacttctgttaacactgcatttgtagaggccagattcacatgaagggtgaaaagtggaagcttctttaaggccttaaaatttcaccatttttaactaagagtaaagaaagtttcaaatatctattgcttttcactatgaatcttagagttcagaataacaagataaagactttacttcctcctagccaaagtcatagcggaacttaacacggacttatagca

SEQ ID NO: 98885 - DNA, 1108 bp, Homo sapiens
ctctttggatacgtgctaatgcaatcctaaaacagggggaaaagaaaaaggaaaagaagaaaagggggaatgtggaagcaagaaaaaataaaattagctgggcgtggtggcgtgtgcctgtaatcccagctacttgggagactgaggcaggagaatctcttgaacctgggaggcagaggttgcagtgagatgagattgcaccactgcactccagcctgggtgaaaaagtgagactctgtctcaaaaaacaaaaacagacaaaaataaaaaacataagaaagagaaagaatgaggagcacttagaaaaggaagcggagttcattagttcattggggaggggaataaaggcttatggaggaaagtgtcagcagctgaggtccaaatagcacaaaaaaagaatttggcagggaaagggggcactcagacagcattgtgtttggtgtttgggtactttgtaatggaaaagcaggctgtagcctgaggcccaagatcaggtcaggctagggaacaaaggcagcatgtaatgggtatggtgagtcagcatgaacccaaatctagattgacagtagaggtcaaattcagggaagaaggcaaatgaccccaaagacccagatatgtcttctggaaaaagacagcttggtccaatgcaaagacccagatgcagaaacattgcaatagtgtcaaacgtgagccagcatggacagcaaagacgatcccctgctaccgcagtctgagtctgttcagagaggagacagtggccaaactgacttgatcccaaaccagcctctgtcgtggcaggcacagtcattgagttgtgaatatgatggaaaacactcaaagactcaccaaagtagagaaatatggggatctccagcagataactcctggcaaggtagaagagaggcaaaataatgttgagtaagacagacgtgtccctgctccaccatatgccagctgcgtgggcttgtccagttcccttctcctctccaatcctctccttctttacctgaaaaacgtgatcatttgggggctcatctttggccagcatgcactggaacaacagccaccgtgcttgtttatagctggtgttcaatctgactagtcagtg

SEQ ID NO: 98886 - DNA, 1029 bp, Homo sapiens
tatccacaactctcaccatgaaaacagtgcagaggcgaatttccagactggacgcttccaagccagcttacctgtacccttaacagatgtgccagttgggaaactatttcgtgtttctccttaaacaaactccttaatccttccttaagcaatgaaaacaactgatttctcttagtcaacacaataaaaaccttcagaaagtaattacaaaattgcttgcaggtaacaacctataagacctataagaaatgtcctctttgtgttaagaacgcaatctctttggtatagtgatatgatctccaaaattacatttgcaacatcaggcaatgaaacaaaggaacatcttaataaattaatcctaaaataacttcgttatagcagaatgttatctgaatttggaaatgggaaatcctgaagtatatggcagaaaagaatttgtctatgaacagcaatttgccaacaagatcaggagggaactaaactcaaagatatgttgtcaatgtgcacagtgtccatgcctagaacttggtaaaattgctccctttaaggtactggctacaattgaatgtgaacctagaatgaatgtcagtaggtttcgttaggccatggggcccatcctgcctgacacccaaatctcacctcacgctgaggttcctgggattgggattgagtccagaaacaattgtgcatctctaagagattcccactgtacaaccaagtggcttcctgctgaagtattctccaatcaagtggtgggtcagttctgaaaggagctgacctgtcatgttaaggggaatgctggttcaaagagctacacctgggctgcacctccaccttcagagctgcagacacctgggccacacctacacctttacagcctcatacttatctcaaggctccccataacccaggaaaagtaagcagaggtagctaaaagactggatcacctgtcaacacagttgggtcatctctcagtgcatcaactaaagggtattttctgggcagtatataaacttggattttagaata

SEQ ID NO: 98887 - DNA, 3012 bp, Homo sapiens
aggtgggtcgaccttggtgattggttctgggcactatcgtggtggtgggactgggattaagactgtcgtttggggtttgagagttgcagctttgcttttccccaagtgcgttttaatcatatactgttgataggttgggtaactcggggactgcttactaccagcagtcctgtggggtaggtgttatcaggctcgtttcacagatgaggagcccgaggcacaggttttcaaatggttttcgcaggaagtctgatactagaaagtgtgctctaagctgctgtataaaagatccctcgaaaatgaaaaggctggaggaatgtctttaaaattatatggaagctagaaaggcagtaggctttgtgaacgaaattatagctgaaaagaatgacaaatagctgacatttattgagcttttattacatgccacgcactgtttggagagctttatgtacagtgtcttcacactgttaacagtcctctggggtgggggttattcccattttacagcgggagaaactgcagattggacgacttagcttgcctcagatctcagctagtaagaagctgggattcagacaggcctgtgtaaatccagagctctgaaatctaagcactatattttgctgcctctccttggtggctggctgaatagtttccacagtggattttagtctgggtggccaggagagttgtagtttgatgataccttctttcatgtttatcaacctattttgtttccccaaattagttctgagagttaagggtgctgatgagttgctcctgaaagtgtattagaagggtattataggggacaggtggtgtgacatgggaatcttttgcacagacttgattttgttttctggcatttttctgggcagttcctcacacttggggatgagtaagccttctaattgtcgcatgcgttttctctctagacttttcctggtttctcttttgtataaaaatattggttttgtaggatgacattgggtgtggggcagagtggtccattggacctaagggtcaaggtgacaagtcacctcgtatctttggatctcagttactgaatttgtaaggctttagactcagtgacttaaagcttaaatattctgagggtctaaaatgttctccttgaaggaagaaaggaagaatgggagaaatgaagaacgcacaaattataaggggaaaatcatcctctgtctggtttggggtgagaatcagatcttaaagcctcgaggtctgtttcatttgcttttgtgtttccctgctgtttggttccagttaagtgactgtttcattcctcatttgattaattgactcacctagagccatttaatttttgtgatatgtcaggcaccttattaggtgctgggaatacagctgtgaatagagggaaaaatagacaagaagcaaatggtcatacaaacggataggtggttgcaagtttgataggtacgatgaaggaaaagtattgtgtgaatgaggattatgagcaagattgtgatgtagatggaaatctagtctagggagctgttttttgaattgatgtggtgagattttgctagaggacagtcttgaaatctgagcctgcaattatgtacataatgcaagagtttgggaagttgtcagcaacaataattcttttcattgcacagtgtatttcatactcagaatgtcatcccggctctcattgcaagatacgaaaatgagataggcaactttacaagttgtcattctgtctgccttcagggtacttaaagcttaaatagtcctctaatactttctcccactcaaaatgaactgtaagggggagtaagactcttttatgtgagatttgggcttgaatattggatttagattttttttaggaaagctaggccaagggtgataggcttttaaaacaacgagcatcataatgactcaaaagtatccattgtagcatacgcttcacagggtcatttaacttaaaagtctcatcatcttaggagatcattttttgatggctggattgggaaatatagattgttaaaaatatataaatgtctcagttgaacatgtatgaagccaattcaaataatacattgcaatatatttacttaatggccatctgcatgcaaaacaccgtcctaggggtaccatgtggcataaataaaaaagatgaacttgccaaagttactgctttcaaagagatttcagttaatgtatactaatactcaaatttaaggtttttttttttcaaagtgctagcatatctcatctgatccttttaagagccatatatgataaacagaaatactgagaaaatggagataaaaaattgtcaggatatggtgataaatagtaaatggagtgggagaaagaggtgctaagtgattactaggtttcagacctatgcaactaaagaggtatgtgtgctattcactgagctggggcttaactggtagagaactaggttctggatatgggaagggcatgactttagttttggaagtgttcagctggagctgcctttgaggcctttattgaggtactggttttgtgctgagaattggggtggccatttaccgttttgaagacctccatgtagaggcaagagctcaaaccatgggtatgggtgagattgcctgtggggaggctatagaataagaagagaaggaggcctgggatggagctgggcagaggaggttgagcttgtcaaggagacaagagtggccaggaaggtcagaggacagccagaaacagatgttcctgcaaggcgatgagtcagtactgtggaatgctcctatgagagaagaattgagaaccatcattgaatttagcaacatggaggtcactggtgacctttgaaagagatgctgatctgcaggtaggggtgggatggggagcagtgggaggtgaggaaaacggagacagaaactgtttccaataggtttgatttcagcatgtttaaatgctgatgggaaggctcagtggagagggagtggttgaatatagactagaaaagggtttgtg

SEQ ID NO: 98888 - DNA, 3130 bp, Homo sapiens
ttttatccccactcaaaatcacttagcagtgtggtttcatgaattgagtttcaactcaattcatcagtgtgggttcatgtagatttaggtcatttatttttactgtgacaagttagtacattttaggtctataccatatttatttcccctttgctctcttgatagacttttaggctgtttccattttttttgttattacaaacattattaccgttaagtattattgaacacaagtctttgttttaatttttgacactgtagttaacctgtgctcctttttctctgttcttcacatttttgtctcggccttcctctaatcgtttcattatttgagctaaggtaccattctttgtccattatacttaacagtacaaaactgtaatgggcacttttcctcgaaggctctttttagtaatctttactttagttaactttctttgctttttttttttttaaataaaaatatcttaaaatatagaaatatcttgaacatattttacagatatatattattttacttgtaattccatgcatgactgcagggataattcacgtgtaccctttctcttgggaaacgtttctgtgttgatgtacatttgatttagctaattctgtattttagtgtttgtttcctttaaatattttcctctaaatgtagtgcacttttttcattgcagtttggtgggtaggaacatgagctcagagttaagattgcttggattggaatccgggctctactttttagctgtgtgtctttgggcagcgtatttaatttctatgtctcaatttcttcatctgtaaaatggagataatagaaatctacccgtagattgttgtgagattcaaatgaggtgtctggcatagtcattactcaatacatattagctatttttattagttttattttttgttagagtatgcagtattttctaagcctactcagtttgtggtgttgccttcttttttgaagcagcattttaacacagacatctatgcctcaaggaaatgtgtgatgttttataactgttagtggagattgggaagagatactgtaaactgtagcaaaccataagttgaggtacattaactagattgttatattttaatatcaataatttaggatttggttgggcatggtggcttatgcctttaatcccagcactttgggaggccgaggagggcggatcacctgaggtcaggagtttgagtccagcctggccaatgtggcatgagtccagcctggccaatgtggtgaaatcccgtctctactaaaaatacaaattagctgggtgtggtagcgggtgcctgtaatcccagctacttgggaggctgagacaggagaattgcttgaacctgggaagtggaggttgcagtgagccaagatcatgccattgcactccagcctgggcaacagagggagacgctgtctcaaaaaaaaaaaaaaaattaggatttatcgtgtttcaatttttttgaaatacgtataaagcactttgaaagtgagttgacatggtgaaattctcagataattaccaagggtctactcttgttagttttaaataccttttgtaatatgaccctgataatgattcagatggtgtttctaagtatattatcctatgtcatcaaccttgtgttgttcagtggagaaggaaccattgccatccatgtatgtaaagcttcataggtaaatttgagcgagtgacttaacctttctcagccttccatttcaatttctgtaacataaagatttcaattcttacctcacaaggttatcatgacttatgttagttgcttccttcatctctctggctcccctgtcttctcttgtaacttcctttttttctgttttccctatgtatattctttcttcctctttatcccttctctgcccttcacaagtagttttttggtaaatggtaacaagacattctgaaccagtgtgtgagtgaacccattatattaataaaaatacacattatttaaaggggactaggaaatgttaattctgtaaggacaagaggatttaggccatatgaagttacagaggagatgctgtaaatgttaaatgagcagtataaaggacagagaggtcatgttttgccacagtagccagggaatggtcagctgagcaaaatgagactaatgttagatttgaagaaagatttgtgaggaaggtattcacataggatgtccagtgggcagtggagtttggaagattggcaaataaaactgagccatcaactgcttgggaggactcaggaagctgtgaggataaatcacatcccatggggaagaaaggcacatggacttggaggacaaaagcaattaagacctagcgtaacctctttatttattgattaaactctgaaagtagttgttgaatgaattaaaccttctaggaatagaaagggagaactagcagctagcaaatggagagaattgagtggctctgagttgttgcaggaggagctttgaaggtctggcccgagttgtttgtaaccctgccgttgagactggtggtgtggcattgtctgtgccatttagtctgactggacttctggtttttttttttttttggtctgtaatcctttcttgcttttgggggatggagagggatctgcttcatcactgttctttttacctccttttccccctcctttacttgactcaggatttttgttacctgtgccatatttatttcttaggtgtctttgactttatcagttagctttgtgcatttccccatgtattcattgatgtgtttactacctggaatttaatggggtgtttgcatgagtctcttcctcttttgacatctcaataagcaagattctcatggaaaccatctcagaggcagtgggcagtaaatagatggagtgaaagatgaggcagaactgtttctctgcattctatattgagatgtacaattgtttaacaaataattacaaaagaaaatgagtgccatgagagagtgccctaaggggtcagcggatgggtagagaagttcaggctggggctagggccagtggaggtttgggtatcagagaatgcctaatcaatttagatgctaagagataactaggctttgaatgtatgcagaagaataaaggacattccaggtagagct

SEQ ID NO: 98889 - DNA, 1152 bp, Homo sapiens
tggacaatgaggagggaattgagattcttgaagagaggattgatgtgaaatacgggttataagggagtggcaacgtcacactggcaacatgaatgaaggatgcattgatggaggagggggagaggggactagagacagaggaatagttaaggatacagttgaattctgccaggtgacaggagtaaggacctgaactgataaagtaacacgtgagaaagggcaggaggcaggggatgacagaggaagcagaaccatcgggacttggcaactgactggatctttgcagggcaagggaagggaacattaccaaatgctttttaagttttgagtaagttctagaaatgggaagagtcagctttccatttgagttgggaaaggtgaaagcagagtgacagtagaagatgtggaaaggagaattcagttaaaaaaatttatttttaaaaatgcgaagtgggatagctgggatctcctcaaagaaagccagatgaggggtcatctgggtaggcgatggtgagatcagggagtggcggaaagtgaacaaagttctgggcttagatgtttatagaatgaggtgagaagtcagtgaaagatgtgtaaagtgcttatcactaggggcccagtaggcattgtctagggaggcctcagctaaggctgggtctcacaaacatgtggcattggtcctggctgtataactctccagctggcagccttgtgagtaggagtgaagaaaatgcagtgaatctgcagggagcggttgtgttttagagctctaggatagcaagtgctcgggagtcctccaggaaggacatggttgtcacagaaacattggttcctgggactaggctttcaggggacaagagaagacacaagggagttggtggccaagatggagtgggagagcaggtctagtgggtgaggggttgtggggttactaacagcctattctcattctgttaatttttaaggcttgaattagttttctaatgataggagtcttgttgctttgggaccacagatgtgaatgttattattattatttttgcttctctgctttatctgtggcattactgctcttgtggcattcccccccacccccgactcccttgtttttggtgaacataatagtcaccgtaaaaaagatgtataattcta

SEQ ID NO: 98890 - DNA, 1927 bp, Homo sapiens
cttaggaaaatttaaataaattattattcttaacatctgtcatccatccatctgtttgtctatcggtgtgatggatgctcccaccaggtactttgctagtggacaccaaggatagaatgatgaataagacaaatacggcccttccctggtgcatagagtgggaaggtgaacattaagcagttccacagtaattatttaattacagttgcagtaggtcctgtgaaggcaaagttgtggggtgccgagggtggggaaccagagtaggctgtcttgagaggcttctctgaggaagtggcatccaactgatctaggagaagggggatggtagtggggcggtgtggtggtggggcaactgggccgctttctaggcagaggcttgaagcaatgtggggtggggtgggatggtgacttggctttggggaaaatccacaagaagggcaggagtttgtgcagaggtcttctgagatgaagctggatgcaaaaataaatgggccacagcatgcatgagacagaaataaaaataaagccgtctcttagaagcaatccattgagagtagactgggaagatgagggaacttggaggcttgactgtgccaactagttagcaatatctgtatcaagtcagtatgcttctttggtcctcagttactacaaaaagtttaaattttattattacaaaatttgcaaacagttaactttttatgatttgaattttatgattagcaatgttacagtttaccaaaattatcttcagcagtattaaaacatctataaatatatataacaatatacctgaccatatattatgttgattttggtattgttcgcctattaaggccaatgggaaacttttcagctagattggatattatttcataattccatagagttgtatgttttgaacagaaatatttttagtgtcttctctaagtttactattcaatttcttgtttaaaagatcataaattgacctagtgtttcaggcatgtcaatactgttgctatataaatttgtagaaattataatgaatttatatatttgctttaagtttttcttctaagaatgtgtgtttgatgagaaagtttggaaaatacgtaaaagcataaattctacattctagatatagccagtgctgaggtgctttcggtcctgatacctgtttgtgtgtatgttaacaaaagtggaaatatattgtgtgtaaatatttaacctacttctcatttatcatatcatgagcaattcccatgttattgaatgtttttgaaaatatttttagtggttgtataataatctactatatgtacataatgtactttaccatttcccaattattagatttgcatattttcattacccattattataaatagcaaatggaagttctcaagtaaatttgtttttcttcattaaatattcacagaagtggaattgtttggtcaaaaggtatgaaaaatttaaaggctcttaataaaaattacaattgcttcccagagaggttgtacttatatatctgtgccctttagtttgagtgtgtctttccattgcacctgtacttggatttatttttttatttttatttttttttgagacggagtctcactctgtcacccaggctggagtgcagtgacgtgatcttggctcactgcaacctccatctcccggattcaggtgattctcaatgcctcagcctcccgagtagctgggattacaggtgcgcaccaccacacccggctcatttttttgtatttttagtagagaccaggcttcactatgttggccagactggtcttgaactcctgacctcaggtgatccgtctgcctcggtctcccaaggtgctgggattacaggcgtgggccactgtgcccggccttgtacttccatttatatattgaaaaccagaagagagatgttgtttcatatgaataa

SEQ ID NO: 98891 - DNA, 1065 bp, Homo sapiens
ggcaattttagaaagaagtgcctatggaagatgacttattggtgaggcttctttcctctttaattgcatgacgttatagcgcagaaatgatcacatctatgaacctagatggccttactgattgctgcttgacgggttgttgaatgagctgatattgaccagagtttctacccctcctcccctccccttttgggttgtccagttcagtgtcataagcacagacataattccttagcttattgctgggttttttttgatgatgtttctttttgtttttccctgttttaaaattttattcataaaatcagccaacatttattgaacatatactaggtaatactttgtaggtttcttgggattcatatttcaaagatgcatcattagagtgtttacctcgttgaagtagatagaaagtaaaacagtaaacatacaatccatagttaaaagtgctaatgtagatgtatgtgcaaagtgttttgggttcttagaggactgcaagtagatattagaagacttcataaaagaggtgacatttgagctagagtttggactgtttcaccagtataaaagtattgggattaataagcaggggaaggagcaatagtgtgtgatttgtaaatcataggagcagctttgattctggtacccattccctaccctcatgtgggatagcttttctcaacagatgtttgagcaagagctagttattgctttatggttttttttgttgttgttgtttgtttgtttttttgtttttttttgagacagaatctcagtcctaggctgaagtgccatggcacaatcatggctcactgcagcctcaacttccccagctcaagtgatcctcctacctcagcctcccaagtagctgggactacaggcgtgtgccaccatggccagccaattaaaaacatttttttttgtagacactagatctattttgtccaggctggtcttgaacgcctggactcaggcattcctcctgcctcagttacccaaactgttgggattacaggcatgagcaaccatacctggtcctactttatgactttaaaatattttctt

SEQ ID NO: 98892 - DNA, 1461 bp, Homo sapiens
gtttgcaaactccagttgcttgttgctgactagagtgagaatggggctcacagggaaggaatgtggtgattatttggcagtggctgctggggctgtgagagaggatggatgtgttgtatttgtaaagtacttgccatccctaatgcagtgagatgctaaagcacaggaaatgggtaaatttttggtcttcccccaaccctctttctgacttgctccctttttactactgggaaatgtttgtggatacttaaggttttggttggaacagccgcctgtttacagtatgatgtggaaacttttcttgtaattccgttgttaatagatattgtacaaatgagtctcttagaaatatcaagacattgtaggggaccagtgtggtagctgctgcctgatagaaaaaaaaaaatcttcatttgccgatgtaacttttctttaaattattttaaaatgattttgaactaacgcctttctttttcttcctcctagattctcgctgaagtctgttaattctactttttgagtacttatgaataaccacgtgtcttcaaaaccatctaccatgaagctaaaacataccatcaaccctattcttttatattttatacattttctaatatcactttatactattttaacatacattccgttttattttttctccgagtcaagacaagaaaaatcaaaccgaattaaagcaaagcctgtaaattcaaaacctgattctgcatacagatctgttaatagtttggatggtttggcttcagtattataccctggatgtgatactttagataaagtttttacatatgcaaaaaacaaatttaagaacaaaagactcttgggaacacgtgaagttttaaatgaggaagatgaagtacaaccaaatggaaaaatttttaaaaaggtaagatgatctttcattgcctttgaattctttcgaataaaatatcctgttagaaatgaagtaaagggcaagcacagcctgcctccattagaattcgctgttgaaggagaagcagtgtaggaagggggctagactaccttctaatttcttcctgtacttaccagcactgatatgttctgagttttcagaaggacatcgcaacccagtggtgtggagctcttccccagtgtctaccagggtttggaatgtctagggcagttttgagtatgaaaccatactccctgtctctagagcagctgggtgctggaaatggctccaggttttggggtgggacctgctgtgttaaatgtggcttagatgtgggttgcagtgagtgcttcatgtctttgtactttggctgtggcagttgcatggttcttaaaacatttcttttcagaaatatggagaaacctgccattgttgatttgaaacaacgggcaagatgttctcagaggcagtgtaacagcgattaagagcctggactccagacccagactataggtctgaatcttggcttt

SEQ ID NO: 98893 - DNA, 1107 bp, Homo sapiens
ccgtctgatactgacatttaggaattcctaaatagagagaaattaaaattttggcatctgcggtacttggtactaggctaaatattaagttaacacctacatcatttaaataggtgaaatttataagtagattattagtgtatgaccatttggccaggcagttgacctttacgagcctatcaaactctcaatatttttgaaaaccaaaaataaagccaaaaaaccccccagttacaatataagatttgagttgttatagaagatgtcacaaaatagctaatttttaaaatagatttttcactcaaactcagtttctggctttttattaaaaagataattctatgcaaacgtaactttctggttcatcataacatttggacgatattctggtttcttctgtaaattattattttgattacattaaaaaaatttttttttgttttatcaggttattcttggacagtataattggctttcctatgaagatgtctttgttcgagcctttaattttggaaatggattacagatgttgggtcagaaaccaaagaccaacatcgccatcttctgtgagaccagggccgagtggatgatagctgcacaggcgtgttttatgtataattttcagcgtatgtagactttcttatcttctggaagaatgaacttaactgatatttattgaaatactttactctgaagaggttaaaattctgatgttaattttcacccagtgtccagttagtggagaactctgttgtgacttggaatttttggtttattttggaaaataaatcaattatatgacaaattgtaccaatcagtgttgcagtgaggcttgaacctcttcatgggagactttcaggtcttgagaactagacctacacttaggggccgttgttccaataccatttctcaggaatcctctttagaagttactgtcaattttgttctgtcacctctatcagtaacaacagttgacctccgaaacacttccatactgaaacctggtgaacttcaaggtgcaggttaaacaatagagttttcatattgtaattatctgaatggtaattgtggtggctcagtctgtgagatagttctggaagcataagt

SEQ ID NO: 98894 - DNA, 1083 bp, Homo sapiens
catttcagagaatgtttgtctttagatatttttgcttgagaataaacggtactgccacttgtttgtgctcttttcttgacatacaccgtaaatctgacattcagtgtgtcatcctatttgtatatgttctttttcacattgtaaagccaagtggccaacaattaagaatttgaagtcttagaaatcagttataattccttcacaatgtggtagtcccagagtaacatctgtaagtgaaacaaaataaaaatttaaatatcttcatctttaaaaattggaaatcttggggcatttaggggaggatgagtaggtgtaatgttgattagtatgataagataactttaaaaaacataacacttatagactgtggatttaacagtttagggctcctaatgcgttattatgattcatctccacattcagagactttacatttgtagttaaatgtttgaatatttgactggctgctgcttttccttttagttgttacattatatgccactctaggaggtccagccattgttcatgcattaaatgaaacagaggtgaccaacatcattactagtaaagaactcttacaaacaaagttgaaggtgaggactctagttactttctaactgtctgatactttagaattttcagtgtcatgagccctattattgatacttagttcttttatgacttttaagtccttaatctttgtggacttttatgaatatcatactttattttttcctttagaaaataaaaagtagattttgtatatattcatgtataagtaatccagagttataaattgttaagatgcctatgtttaaattgaagaaattacgactactttttctcttattgtgctcatctattttctagtttacttttagtaaatttgtaattttgaagggttatattttaaactagtaatttttattttacttctgaagcattaagtaattacaagttttcagaattgtttggaagttaaaaagggagacttttaattatattacagtaaaaagagtttctttggtctctagacaactcccagaaatatctgggctattctatatgggggaaggaggagaa

SEQ ID NO: 98895 - DNA, 1034 bp, Homo sapiens
aatatcgaaagtcaaatagccaaacaaaaactcccaaacgttgcatggtctttttgtgagcaaagaatgtggtactgtatatttttataagataaagttaggacattttgaaaaaccatttcagacggttgttcgtttattttgtgagtaggttttagttcagaattagtaagataagcaaagcaatataaagaatatcttacaatttatatgagtatctagatatatttctgcttttaaaaattatttttgtggaaactttatttttaaactaattgtggttcgattttaaaagtttgatcttgataggatacatctttttgaaaaattcacaaaaggttttttccttcttgctgaatcacatccacagttgaagagtacttcttttaaaatgccttaatattgctagaaatgttaatctaatgctaagtgaatatgtaaggcagctgttattattaactatgttaaactcatttttatacatttaggaaatcatggatcggatctacaaaaatgtcatgaataaagtcagtgaaatgagtagttttcaacgtaatctgtttattctggcctataattacaaaatggaacagatttcaaaaggacgtaatactccactgtgcgacaggtaagtaaagactctctacctccttctttctcctcttgataatttaatcatttagttcacattaatagcccaattaattgagatagttataagaaagaaatatatttcataaagtcaagagaactctttaaaaaaaatccatcccaggccaggcgcggtggctcatgcctgtaatcccagcactttgggaggccgaggcaggtggatcatgaggtcaggagatcgagaccatcctggctaacacagtgaaaccccgtctctactaaaaacacaaaaagaaattagcggggcttggtggcgggcgcctgtaatcccagctactcaggaggctgaggcaggagaatggtgcgaacccaggaggcggagcttgcagtgagccaagattgcgccactgcacgatctgtct

SEQ ID NO: 98896 - DNA, 1082 bp, Homo sapiens
tttaacaaacaattcaaagcttgaattagtgaaacttcaaaaacagattgtggtatacaaattatacacatttctaataaagtacattaaagcaaaaattaatttgattttaatacatttcataaagatgatagaattgttcagtattaatatatgataaatattttatgtaaataatgatataaaagtggccataagcaagggttttcctgtcactatacaaaactaaacctgacaattcaaattcgaatatcacttgaaaagctcttaagaggaaataataaattctttaccttgttgaacttcaaaaaattaacatttggggctcaagagactctccaaattggctgtgtgaccttggataagtaacttaatctcaaaatctctcatatcaaaactgggggattagtttaagtgatttggaaaatcccattcagttttaaaatcctgtggttctctaatttttttctttagctttgttttccggaaagttcgaagcttgctagggggaaatattcgtctcctgttgtgtggtggcgctccactttctgcaaccacgcagcgattcatgaacatctgtttctgctgtcctgttggtcagggatacgggctcactgaatctgctggggctggaacaatttccgaaggtagtgttctccatggtcagaggctggagtgtgatgccagacgtttttttggggtatgggatattttctgcaaatatataggagaagagtagtaaggtgtttgtgaggcagaataatggtggattccaagtactatgatcattgatatcaatttttagaatgtattagatgcatctggagtcaataatttatctggagaagtttttatatcaaactgataggtaatattaaaaaccacttagcattttggaagagaaactttagtaacaaacactgactgttttgtgtacatttattttctcacatcagtgattaaatttctttttatgtagaaaacttaaggtgcttttgtttatttgtgtaggtgagtatattaaggctcaggttcagaaatgtttatgaggatttctgtaagtgttagagaaggaactaagt

SEQ ID NO: 98897 - DNA, 1016 bp, Homo sapiens
taagaaagtagaatagacgtaaaccattgttttcatcatcctttaagacagggatttcaaactcaagaaccaggcagctacctatttaaatgagtcaagtgggccctaatgtaagacaatgtgatgggtaaggattgattctgagggaacaggagcaggcatgccctctctaacagaggccgtcagttctgctgtacctgaaatgtgggcccattgttgctggcgattccacacttacatctaaaatttcctgattttttaagaatgacaataactaatttaaaaaaaaaaaaaaaacctcaatgtaggccaaaaaatacgactctacaggcctcacggcctgtgcttcaccaatatgtgacttctgcttttaaggaatagctggggatacctcagccttaggataaataatcatttttggtaatttagaaaaatgaagcagtgtattagctactgttctcaaatatcctttttttcatttaattcctagtgtgggactacaatactggcagagtgggagcaccattagtttgctgtgaaatcaaattaaaaaactgggaggaaggtaataaactattttaaccacagagcattaatttttaaagtattaaacttgaaaattagtgcttcactttcttgctttagaatgtaaacacccataagtgctcatttttgtcctttgtgatagacgtgttttatctcgaactatatgaatgcatttatttttcttgtttcaaagatgtttctgaagaactattattgttttcattttacttattacgtagatgcaagtaagaattatggcaaaaacttgagaaatgtactaataagtgaataatgtcaataaattaggagtgatcataactttattttgcagaagtaaaattataaaatttattttatgaaattgtggatttttaaatgatttttttctttttttttctgagggcttcaaccttgtattattagaaggaaattttcactgcaattccatagaagtctgtttattctcatgc

SEQ ID NO: 98898 - DNA, 1092 bp, Homo sapiens
tggcctcccaaagtgttgtgattacagacatgagccactggcccagcagtaactcattcttatatagggatttgttctattaattgcatgacttaatacttctgtcagtttatcaatatgatatttaagatgttgcagaatctttcaaataatttgtctcttgtatttataattttatacaacaaatggaagatgttgggttttagagtttaatttttttctcagaatagaagtttgaaaacataaatacttatggtttagcaactgagattttgtgcctactgttaaattgataaactttgttcattcatagtgtctgccttttttcctttgggaagttctaattggattaaaataagatgactgtttagaaactagtagtttcaaattttcatgtgttgtatttaactcaactattaactcaattattattttattaggtggatactttaatactgataagccacaccccaggggtgaaattcttattgggggccaaagtgtgacaatggggtactacaaaaatgaagcaaaaacaaaagctgatttctttgaagatgaaaatggacaaaggtggctctgtactggggatattggagagtttgaacccgatggatgcttaaagattattggtaagtcatctaatatttttttgaaaatgaatgtttctgaaatagtttacacaagaagcacaatatatttagaggaggcgctgaataatataaatctttatgtaatcttagtttgggttgttgcatcactcctggaatataaaatattacggactgtggaatttatgaggcctgacatgttatgagttctcaaagatggttcagcagcagtggtattttaaattactcttagataaccttcagtcattgtttcctgcctgtgtttctgacatctagagattagtggatggagctctcacagtctgaactgcacccttgccttgccctgcccaggagaatagaggaaagccaggcagctcaagtactatgactcatatgggttgaaaaataccttattctgcttctccttttaggttctttttttttaaaagttaatggcatttcagttagccgtgtgtgg

SEQ ID NO: 98899 - DNA, 1085 bp, Homo sapiens
ttgggcatagtcagagttcctctatcaatacaaattctgatgataacaaaagaaaaaaaagaatatattcacatcattttgattcgttgctgaatttttaagatagtttttaatttatgttaaattttagttttttaaaacacatgctatgaaatactgatagggtttaaaggtgaatattctaatatttgtaactttcttttaaaatgtgtacatggcagtattcataacagtttttcatagttgaaattcatcatgaaatgtcagattgaagtttatttagcaacgaactctgccaaagcattggaaaatattatgaatcaaacagtaaaactggcggttgcatgaaatggatatgccagtgccaagtatggcacatgcattttaaaaaaaatgaggagttatttactacttgtcactgtaataataactgcagtcaacacagttcaccattttgttccttatctgttatcctttctatatttcagttatcattcttatgtcattggatttgttgtgccaaatcaaaaggaactaactgaactagctcgaaagaaaggacttaaagggacttgggaggagctgtgtaacagttgtgaaatggaaaatgaggtacttaaagtgctttccgaagctgctatttcaggtgagtattcggttaaactgatactaaaaactgagatgggaagagagtacttacatgcattcaacctgttttaaggtttagggttcattactttctgctcagaaaccatttctaccgttagtatatggaagagtaaacttatcagtcccccattcaagccttgctacacaaattaaccactcccaccaaactgatgtacatgtatcttgaatgttcttgtctctgcaacctttgctttctgggttaccctttctcttatgtcagctgttcttcaaggccttgctcagttttctggccacactagcccatagtgatcaggccaaaactccttttgaaactttatacaatgttagagtactggtagttggttgtactaatagtttcataaccatttttggtggggtgaggagtgcccaagactagtttaatattgttggtc

SEQ ID NO: 98900 - DNA, 1393 bp, Homo sapiens
gctttcagagttactgggattacaggcatgagccatcatgcctggctctaactcgttttcaatgacagaatatatattctattttgttcctatatcatattttatttaactcattttcctcttgatggggacttgttaaatagtttattgttttacttatgtttgtattttgaggaatagattctttagaagtgacattcatggttcacttgttggttgtgcattttgatggatacgcaaaaagtggggaagttacaccatttgctaagaacttaaataccttttcttcttttctttttttttaatcatcttagcaagtctggaaaagtttgaaattccagtaaaaattcgtttgagtcctgaaccgtggacccctgaaactggtctggtgacagatgccttcaagctgaaacgcaaagagcttaaaacacattaccaggcggacattgagcgaatgtatggaagaaaataattattctcttctggcatcagtttgctacagtgagctcagatcaaataggaaaatacttgaaatgcatgtctcaagctgcaaggcaaactccattcctcatattaaactattacttctcatgacgtcaccatttttaactgacaggattagtaaaacattaagacagcaaacttgtgtctgtctcttctttcattttccccgccaccaacttactttaccacctatgactgtacttgtcagtatgagaatttttctgaatcatattggggaagcagtgattttaaaacctcaagtttttaaacatgatttatatgttctgtataatgttcagtttgtaactttttaaaagtttggatgtatagagggataaataggaaatataagaattggttatttgggggcttttttacttactgtatttaaaaatacaagggtattgatatgaaattatgtaaatttcaaatgcttatgaatcaaatcattgttgaacaaaagatttgttgctgtgtaattattgtcttgtatgcatttgagagaaataaatatacccatacttatgttttaagaagttgagatcttgtgaatatatgcctgtcagtgtcttctttatatatttattttttattagaaaaaatgaagtttggttggtgatgcatgaaacaaaatagcaagagagggttatagtttaatagtaagggagataacacagcatgtgtagcaccagttgataattggtctctagtagcttactgtcaaaatgttcaatgaagtcttctgttcatctgttgaaactaggaaaatacccaaacttaaatggaagaattctgaaagagaggatagaatttaaagaacaagagtatataaagttattctttgaatatttcgttgactatatgtacattgagttatctatatttgtaa

SEQ ID NO: 98901 - DNA, 1613 bp, Homo sapiens
tttctttcttttccttcctttcttccttccttcttctctctctctccttccctcccttccttccttcccttcctccctccctcctttctttctttctttttctcttttcttttcttttctttcttttctttcctcgcttcttgtcacccaggccagagtgcaatggtgtgatctcaggtcactgcagcctccgtctcctgggttcaaacgattctcctgcctcagcctcccgagtagctgggattataggcatgcgccaccacgcctggctaattttgtatttttggtagagttgggatttctccatgttggtcaggctggtcttgaacgccgacctcaggtgatccgcccgccttggccttccaaagtgctggaattacaggcatgagccgctgcacccggccaaattctttatttttcaatacaattttgtaaagatggacctcatgtaaatccatcatagtttttccggttcttttgaaatttgtcaccatatttggataaaggtatctcttgaacctcattcaaatatactacacatgttctggataattccatattagacactttagttatggacagggcttctcagacttcaatcagtgtcacacatagaaagtaaatatatctcttctgggcaaggtggctcacgcctgtaatcccagcactttgggaggtcaaggcggcagatcacctgaggtcaggagttcgagaccagcctggccaacatggtgaaaccctgtctctactaaaaattcaaaaattagccaagtgtggtggcacatgcttgtagtgccagctactcaggaggctgaggcaggagaatcgcttgaacccgggaggcagaggttgcagtgagctgagatcacgccactgtactccagcccgggtgacagagtgagaccctgtctcaaaaaaaaaaaaaaaaaaatgaaagtaagtaaacatatctatatggcacagtggggtaaatttgagggattttagggacatcttccatgggcctaggctaaaatagtcattgtgttttctttatattatataattactataaaactaccaagagaaagacagtaaatgttaaatttctataaaacttccaaaataaaatgttttaacatgttttaatgaggaacttggtgtgttttcatgaatacacttttttttaagtcagattttatgtttgaaattgctactcataattcctggtgatgtctctttaatatgacctctttattttcttggtacctaccaacaagaagcaacttcaaaagtaagtggtagcaaatgggagaagagtatttattgcttttgctcctactgacttttctcatcattcacctacattttggtaatctgatctctttacacgtaattaatgatgtgatcattttttaaatctagtgacagctccttttctttcattaacaaatgtaaagttgacaatttttgtgataaagcaaatggatttttgattcaaacttttttttccatatcaaacctcctaaaataatgataaagctttagtcaaatgtattgttctaatcttttttgagacagagtctcactctgttgcccaggctggagtacagtggtgtgatctcagctcactg

SEQ ID NO: 98902 - DNA, 1048 bp, Homo sapiens
aagtgttaggataatttgcttccagcagagtttttttttgttcttgttgttattctctttaatggaatgagcagtatttgcaatattgaacacgttttatcagatttgttgcaacacttttcataaggatgaacactggaaagatttctgaaagaatttttcctccctcccttttttcccccttgtaaatgatgttgttaagacctaaaatgttgcttcagggatttcaggttgttggtcagtatataacagcaataagacaactagaccatcttttctttctcctcttggtataccaagtttattttcatttttttaaggagaaatttgcaaatgtataataacatgttttcaaacatattatttaatactttctactattcaaatgaattctcacatttttgtactttcctttgaaataaactacagacttggccttttgcaagagcctgaagaagtttccttgaggtctgggcattcccgtaacctgccttctctttctcatttctgaactccggcttgacctgttgtattttcctagattaaaccaactgtgataatgtgaattggggctgaattttgatctcaatctatctgaccaaatttcagccagatatctcagggcattatgcttctcaagagaacttgagtgaccttcaccaatgctaaacccagttaaagtacaaagagagtcagaatgaattcccatttctctaacattaatttcccattctattttggtatacctttggaagctctgtctttgtcatgtaccaaaatttaatttattaaaaaattcaatgaatctttcattaagctaagagcagctaagagcaattcaaggctatatgcccagtagaagttcggttcttgttaattaacagtgatgagcaaagacttccagtactgattctcattgacataatctcagcaataaaatatttctctttgattttcttttcctcccatattaatactaaagctttccttgaattctgcccttatataatgttatctaggggaaaacttggtactgagcttctcttat

SEQ ID NO: 98903 - DNA, 1058 bp, Homo sapiens
tggtcagggctttctattttacaaaaaacaattgacaagctggagaggggtgtgaagacaccctgattaccaagagcgaaaggatactgtcctcctgataatagctcttcaaggtaaaattttgttgagagtctttcatgcgtaattaatggaagtaatccaacccccacagaattttcatatattctgatttatatttcaggaggctattgggggtgatgaataatgatttcattcttggatgaggagaggctcggcgggggaggaggtgactgcatattcgtgggaaaaactgtctccaggttgcttaatgtattgtcatattttgcttttgttatttttcatttcaaggtatgctagtttatatttttgctgtgcaatagaaaatcaggacaatgagctcttgacgctagagattgtgcatcgttacgtggagctgctggacaaatattttggaaatgtaagtgttgtccttgtcggttaggattagctacagtccccatctcagctcttacttcagttctgtctctggtcacatcccttctctctgtcacatctaaaatatgaattgaacttgaaccgaagatcaccttagtccccctaagattagaatacaagatttttctccctacctataattcttagtaaatgaaagacccaaagctttccttttttctttttaaatagatatggagtcctgctatgttgcccaggtgggtcttgaactcttggcctcaagcaattctcccacctcagcttcccaaagagctaggattataggcatgagctaccgtgcccagccacccaaagctttcaagaggtggatgtatctttatcttcataccacaaatacaccagagaccttatttcagtgaaccagaatttaactgtgaaggatttcttgatattctgttctttattcttcattggctttgtcgtctcttttctgttttgactttttatcctttctctggctttttttctaagctataagtattcttaattatttatgcataagaaaaatagcaacaaacaaaaaacccaaatccttttccttc

SEQ ID NO: 98904 - DNA, 1051 bp, Homo sapiens
gctggtaagaattttttcatccgttcagaattatctttctgtgtaaatccatcattgaatttcagtgtctttgcagaacggcagagtgacttggttgatcaggttctgttttttgtgtcctttgttctagatacatttcatattgctcttcagtcgacaagggaaattacggctacagaaatggtacatcactctccctgataaagagaggaagaagatcacccgggaaattgttcagattattctctcccgtggtcacaggacaagcagttttgttgactggaaggagctaaaacttgtttataaaaggtgtgagtaactttttgagagctcaatttctcagtcttactttggtttgttctaatcctgaacattttagattgctataccaattccatcatttactgaaatctttgaaggctggggcccagatatttgtaccaatagactaactagaaaagaactctcattttattgaaagaaattctaggtgccaggatggattctaggtaaataaactacaccttgatagtgcacgcatgcattcaagaaaagtggtatgaacacctgttacattcctggcattgttcttttttaatttgttggaggcggaatcttgctctgtcacccaggctggagtgcagtggcgtgatcttggctcactgcaacttccacctcctgggttcaagcgattctcttgcctcagcctcctgagtagctaggattgcaggcatctgccactatgcctgactaatttttgtattttaagagagacggggtttcaccatgttggccaggctggtctcaaactcctgtgctcaggtgatccacctgccttggcctcccaaagtgctgggattacaggcgtgagccatcatgtccggccattcctggcattgttctaatggctgtgatacatcattgaacaagacagatgacattcctgctgtcatgtagtatacatatttattaagtaaccaaatacaatattttcacttagtaacaagtgctttggaaaaactggaggttagtatgacagagagatggggat

SEQ ID NO: 98905 - DNA, 1010 bp, Homo sapiens
gcgctccggggaggcacctggggcgtccgggccgggcgcgcggccgggtgggggtgcgggccgagtcccgcctggccacccgaaccgtgcgtccctgtggccccgctgccccagacggtgcggacgcgccaggatcgcttgcccgggattcctgcggcaacgcggcgccgcggcgccgcggctccattcattcattcgatccgccttagccgagtgcttagtctgtgccgggctcggtgctgggcgctggggatgtcgcgggggaccaggaggagcccctgttctccaggaagcttaccttccaggagggggatgcggagggagggacacgtccaatatacaagtaaaatgaagagaacttctaaagtaagaagcgctgtaaagtctcaaatacaaccgggtggagtggcaacttttgatttggcaaagcctcttcaaggacatgacattctagctgctggaggtcctggaggggcgctacaggtggattagagagagcaaagcggaggggagaaggccttgtttgtggcaggagaggtgggcttctgccaggtgaggcgggtttttataggccaaaataaggagtttggttttggttccaactgagtaggggaaacctcggggacgttttagcaagaaaactgaccttacccgttgtgcacttttgtttttttgagactgatctcgctctgtcgcccaggctgaagtgcagtggtgtggtctcggctctgcctcccgggttcaagcgattctcctgcctcagcctcccgagtaacggggattacaggcgtgtgccaccacacccagctaatttttgtatttttagtagagacggggtttcaccatgttggccaggctggtctcgaactcctgacctcaggtgatccgcctgcctcggcctcccaaagtgtagggattacaggggtgagccactgcacccggcatggtgtgcagtttggctgtggttggagaatggactggggtgtgtaagggcaggggatagggggtca

SEQ ID NO: 98906 - DNA, 1090 bp, Homo sapiens
agcctggccaagatggtgaaaccctgtctctactaaaaatacaaaaaattagccaggcatggtagcaggcgcctgtaatcccagctactcaggaggcgaggcaggagaatcgcttgaactcgggaggcggaggttgcagtgagctgagatcgtgccactgcactctagcctgggcaacaagagcgtgactccatctcaataaaataataataataaaaaaggaaaagaaaaagatagaaccaaaaagtataaaacaagttgtttttaaaatcatctcatcccaccacctggagaaaacaccattaaacttatcctgtatatctttccaatgtttttataaatgtctccttacatatgtaacacacacttagagatacattgttttaatgggaccatacttgttttcccacttgatacattatggatagtttgcccgtgtcaaaaagtagaactccatgttagtattttttatggctgtgtagttgcagtagacatttgctcctgccatcatctggacacatgttgggatcccacgtctccatttgaggtcaagaaaggcccttgtaacttgctttagcaaatgaaacgtgggcagaagctctttactgcaggtgagcctctggtaccatgacactttcttccatgcccctcatgaagcatgtgttggtgaagtgtgacgctaagccattctacagatcacaaccgctctaggactgcagtggactttgcatgatcgagaaataaatcattgttttagcccactgtggtaggggtgtgtggtgtgtgtgtcagggatgggagagtggctagggatttgtgtgtgtgtgtcttacagcataatactagcatgtatagcagtatcccattgtcctatgtggctaagccatcatgcattttaccaatctcataaaattagattatatatgtttagattatcattgtaattaaaacactaaatatttttcaaatttttacatttaaaaatatacaagctcagcatgcttatatgtttatcttgcccacttttccaattattttctgaggataaagtcttaaaaagtgggaattgctaggtcagaatatgcatgtt

SEQ ID NO: 98907 - DNA, 1037 bp, Homo sapiens
tatgataaaactaaaggactaaatttgttttataatgatgtcttagagggactgaaaggtttaaggaggcgatcaaactaaaatgtcttaatggctgtgtgacacacgtaaggaaaggaaagggggtcacgcacatcatgtactggaatgatctgcattaaacatagacttgtcttcagaaataagactgaagggttttgttgttccttagagttttcgtgttacatcacctaaagagatttcttttaaaaactttctagactctttgcaaaatgtatattactaacatagtttggaagaaaaattgagtagtggtaagttttgttcaagcacaatgttgaatgttaagcttcctgtattaattttagttcagttaatggttcagcccatacaaaggtgctatcctagggattttatgaattcctgaaaggaaaatagaatatgatcaattccttgccctgtggaagagtgcagaactgtggttttgttttcctttgacttctgtaaaatgtgaccgtttgacatctgtggtagattgaacggaatatcacagctgctgagtttactccatagctttcaaaccttttttattttaagaaattcttgaaaaaccctatgttccatgggaacataaagttattatagtgcctcctaaggggttaatataaatcaaggaggaagtttatatttaaggaagaattggagtgacgtatcttagaaaaggaaaggctgatgtttccatatagcttgctctccaccaggcctatcatttttctttttagagacaaacgtgacaggctagtcttgtctctctcatatgctaggtagcaaatggggtgatatttttatagaagtgggcaaaaattattttctcaattttactgagtaggcacagaagaaaagtacagataggctgatggttattgccttattttgactgcatttctcttaaatggatcatttaaattagttcttcaagtaacagtttactggttgttccattcctgaatatgcaggctaatttgtacagataggga

SEQ ID NO: 98908 - DNA, 1024 bp, Homo sapiens
ccttttcaggtttaacagtcgtttgtttgtctgtgttgactcttgccgttagacctggttatcactgctgccttttctgcgtttcttccttccttgtagatctgggacatgacacctgtggtgggctgcagtctggcgactgggttttctccgcactgatctgagagctgggcggcgtccacacctaagaacagcagctccaccaaatgaagtccctctcacgcagctccacagcgctgtctcgtgaatggacagtagccacttacaaacaaatcaacatttttaaaaagaaaatgtaaaggtgtgttttggggcatttgtggaacttacccatggggactaatatggaaaaggtctgtccatagtggttccctgaagactggaattacttcagcaaaacttccccatgaacagctaatgtgtagtgaaagaatgagctagcaaatgagttttagcggggacaaaaaatcaaacaaaaaagtgaatgcttagaaccttctcaaagcagtcacaagtacagacacttcacttagcctagggggccttccagggttcttgtggctgttgtcagagcaggagctgggggagggaagacttgttctctctttcttgaggggtggcattaggaacttacgaaaccagagacctttccctatgacttggcagtatgtgaatatcctctacacttagttattgataaacttcttaaagagatctgttattttcaggtagtgccataatctgcacttagcattggcttgcttcagttgtttctcttcccagccagtatgccacaggtgaactttcggggttgtcattaagtaagttgtgaaatttctgtaataacaaaggcagtccgcattcttccctttcccccaaattcctagggcaaaacttttttatggtgctgttaacatgggagtcacacaagccgcctgactttttctcattgccattagtaatgactgatggaaaacccagccaccactgtgatgcgaaatgatcagtctgttgcctgaaacag

SEQ ID NO: 98909 - DNA, 1074 bp, Homo sapiens
ggaattttataaaacaatcttgtgatttaacatgctttctgtcatcattaaattataaggttagttttcaaaaccatagccacaattttaggagcaaattttaacactattatcataagcatttactttttttttttttttttttttgagactgagtcttggttgatcacctgggctggagtgcagtggtacaatctcggctcactgcagcccccacctcccaggttcaagcgattctcctgcctcagcctcccgagtagctgggattacaggcgtgtgccaccacacagagctaatttttatatttttagtagagacggggtttcaccatgttgaccaggctggtcttgaacccctgacctcaagtgatccacccgtctcggcctcccaaagtgctgggggtacagacatgagccactgcacctggccatatttgcttattttatgttgctaaaaaagcttaccccactagctctaggtacagtcaagtaaattttcagtgatctcttttctcttgttagtcggacttctctagcgacctttcatgaaggaaaacataacatttcccacatgtccatggacattgccaggggactgatggtgacctgtgggaccgaccgcattgtaaaggtaagctggctaattgtctgtcagcatctcagttgagattgcctattaccatgctgtgaatgtgcaggagacagtcactctttctgactggcaagctttataagcaaatgattgccagtttaaaaccttgagtaacaaattgcttgcctctgagtttccatgcattcattggtggtcagtcccagtggcacctccctctgcagtgtctgtctggcagagtgagtctggcaccctgtatatccctatgggtggagttgacctctgggttctcccttgctggcctgggtcctcacccctgacccatctcaagacattcctacgcttgccaatgttccttttcatcctgggcagaatgcgtcctcagtataaggaataaccacacattttaacaattaaatccctgggtcactaacacataaattgaaatgaagtgttttatactta

SEQ ID NO: 98910 - DNA, 1049 bp, Homo sapiens
tgagagatcaagcttgcagtgagccatgttcacgacactgcactcgagcctgagtgacagagtgagaccctgtctcaaaaaagacccccccccacacacaattaaacataatattgaatatgacaactagctagaatatttcgtggaattaaaaagaaatgctaactggccgggcatggttgctcatgcttataatcccagcactttgggaggtcaggagtttgagaccagcctggccaacatggcaaaaccccatgtctactaaaaatacagaaattagcctggagtggtagtgcatgcctgtagtcccagccacttgggagcctgaggcaggagagtcacttgaatccaggaggcagaggttgcagtgagccaagatcacacatactgcactccagcctgggagaccaaaaaaaaaaaaaaaagaagaaaagaaatactaaccttggcaaggtctagaactgttgtattaattttgaaacatgggagtaaatatagacacactgatggtggctttgactttctgctcccccaggctcctcagtggttggaaagtgattcttgtcagaaatgtgagcagccatttttctggaacataaagcagatgtgggacaccaagacgctggggctaagacaagtgagtagccactgtcgagtcatctctggcttgattgtgtatttcactatttgcatacttaatctggggtttttttgaaacacactttgtttttgcaaatgctattaattcctacattttctatgtctttatcattgtgtgactaacaatgaggaagacctttcccagggccagtgagactgttacctcacttttccattgcttgtcctgtattggaaaggcaggggtgcgtagaaaatcctgagagcctatttttaaacagataaaagatctttcagtttaagactattacttattaaagtcagtgttttatgctagccaagaacaaaattagaataaagtcatacagttatataccttatgctgtcacaaacagataaaaagtaataatttagtcctcacttgaatgcct

SEQ ID NO: 98911 - DNA, 1196 bp, Homo sapiens
ttattaaacacagatacattggctcaatagtataggatgtggccagcgcagtggctcatgcctgtaatcccagcgctttgggaggctgaggtgggtggatcacctgaggtcaggagttggagtccagcctggccaacatggtgaaacccagtctctactaaaaaatataaaaattagccaggcatggtggcaggtgcctataatcccagctacttgggaggctgaggcaggagaatcacttgaacccaggaggcagaggttgcagtgagccaagcttgcaccactgcgctccaacctgggcgacgagcaaaactccatctaaaaaatatgtatatatatatataaattataggatgcataatactatatttgcaaagatttattcgaactgtgttttacgtttatcagctactagttatatgcagcaagaaaagctagtaaactgttcttggctcttggcctattatttttcagtcttattctgagagagcggaaaactcagagaaaggctgtattccctggatgatgaggggaggagactgttggtgcccagcactgctggtggctttcccgagggtttcacaacttagattttaacctgctctttttatcgttggtaaattcttttagaaaaagtacttagaaagtagaagtgggattcctaccgtcaaagtgcatcactgtggagtgtatttctctatctagggaaagaaaaaatagtcccatcaatcaaggcatttcctgtgtgcacaattcactgcgtctgtagaagagacaggaaggcaaattgtgtcaaaaagatgcattatttttagtgggtttttttgtttgtttgttttttaataactgagaaaatgtattgcaaggataaacaggctataatctataaggttctgaccctgccttaggatttttgggctttttttttttttgagacggagtctagctctgtcactcaggctggagtgcagtggtgcgatctcggctcactgcaaccttcgcatcctagtttcaagtgattctcccacctcagcctcccaggtatctggggtgacaggcttatgccaccatacctgtacctggctaatattttatatttttagtagagacagggtttcaccatgttgaccaggctggtcacgagcccctgacctcaagtgatccgcccgcctcagcttcccaaagtgctgggatta

SEQ ID NO: 98912 - DNA, 1030 bp, Homo sapiens
gtttgtgtgtgcacactagtgatctttgtggtgtttgactccttgttcatatgaattgtggtcagtaggggagttatacctccttcgttcttgtttctgaacaagtaggtaaatcttatgcatctgaaagggaaatcatgttgattggtcccaaaaaccatagccctcatcaaatctctggcctacaattcttaatgaccgatttgaaagtagtcatatattttatagaaagtatcattctgtattatgagttataaaatgccaagtaaagtttatactagaattcattttaccatgctaaatagtcagtggtaaaataccacttgctgattttaatgaggagagcaatttgagcctaaatgaagacagttcctgtgtttttccgcatggagacaagtgactgttgtgtgtgctgtttgcagtgacaaggtgcagtcgctgtgctaccttcagctcaccaggcagctcgtctcctgttcctcggacggcggaattgcagtgtggaacatggatgttagcagagaagaggtaagagacaagggcaagtccaggctgatcgggggagacccccaggaacctggcttcttcttggcttttcaccccgcaagctgtaaatgctggtccaggtgcagacagtcccagcttccccttctgctaatgggttatttctgacaaggtcctttgtgtcattttgcattgcttcctctgctcatttgagagtttctaccaatgacatgcagtatatacaatcagcgtttaggctggttctcagccttgagcaatacactgagataacactttgagacagatttctggcatatccagtgatttggactgcatagaggtcctccgaagcaccattgtggtcccgtagcattcctgtaggaaaccctgagagatgcatcagtgactgctgtcagggacatagctaaacacttgacaggtttctgggaaaatatatttccatttctctgcttttacttcccattgagttctagttcactgaggccatgtcgacatagtattcttt

SEQ ID NO: 98913 - DNA, 1050 bp, Homo sapiens
tagccaacatggtgaaaccccatctctattaaaaatacaaaatttagctgggtgtggtggtgcacttctgtaatcccagctacttgggaggctgaggcaggagaatcacttgaacccaggaggcagaggttgcagtgagccgaggaagcaacaagagcgaaactctgtctctaaataaataaataaataaataaaatttggaaaatatgggatcataaaaagacaaaaaccacccacaatctcaaaatttctcttttgttgttgttgtgtttgtatattaaataggtgtactttcccccactaaattgctgagctacccagtgccctgtttttactgtagctgagagctctgttagtgaggggtctttgcagttttgctttaatatgcagtgtcttgagggattttttgtgtcactaagagaataaagttttgtagtaggagggagaaggaatatggagtgctgatctgggcaggaagaagtggacacaaatcccatgctgatcagcagcacttactttattcaattcggtctgttctcccaaacaatgttggcctgaggacaggtctggtgaaagaagcaattcatatcattcctaaataactcgccttaagtcctaggtcttgtgataatcatttttggattttacttcatttttgaaagtcaagtttctgttgttttttaaaaccataactcttttaattttttattttgtgcatttgcttttaggaatttcacgtttctgaagattttaataaaatgaactttatcaagacctacccaggtaattataatacacattatcttgcgtacacatacatgtagacatacacaaaactagaacatcatctcttatgatgaaaattagattttcacattaactttttagttttgttacccccactatgcaagagacttgtcttttagtgatatttcagctttttcttgctcattaacatttaaaattttgtatatcaggcacatgtatcagatttaattaaccattcttttattattggatatgtgtactgcttccattttttttttgata

SEQ ID NO: 98914 - DNA, 1073 bp, Homo sapiens
gctcacatctgtaatcccagcactttaggaggctgaggcgggcggatcgcttgagcccaggagtttgagaccagcctgggtaacatagtgagacctcatctcaacgaaaaatcaaaaaaattaattggtagtggtgcatgcctgtggtcccagctgcttaggagactgaggtgggaggatggcttgagcccaggaggtcaaggctgacagctagctgagattgcaccactgcactttcgcctgggcagcagagggaaaccatgtctcaaaaaaaaaaaaaaagtttaattcagtatagatattaggtcaaaaatggattaaattattgcttaattttaaactagttccttggagctcagaatgctgtcgtaattgatagctgggtgctcgggctgacccacagatcatagccttcatagagtgaatacgtcacctatagcagcccccatcccttagccgtgatggtggagagcctctgtcactctgtgtgtgtgtgtgtgtgtgtgtgtgtgtgtgtgtgtgtgtgtgtgtgtggtcattcagctagcaactcacagaactctttaaggcaatacttctcaaactatctttggcaaaggacctgatattcaagtttctagtctgttatagactggcatttttgtgcgtcaaattgtatgcatacatttgttttttcttaattgaaatataacttaaataacataattatatttaccattttaaagtatataattgtgtggtcttgtagcatattcataagattgtgcaaccattaccaccattctctaattccagaatattttcatcacccctccctgcaaaaaaatcccatacccattagcagtcactctccattgccccttcccccagctcctggaaatcactaatttactgaatccaaggatttgcctattttagacactttatataaatagactcatacaatatgtgtggccttttatgtctgtctttcacttaacataatgttttcaaggttcatgcctgtttgaattaattaattatttttgcagtggaatagcattctatactgcatttggttgatccgtttatta

SEQ ID NO: 98915 - DNA, 1035 bp, Homo sapiens
aaagtgttgcctagatcctccatggactccagcctgtctagattattcctgctcttcagtgattagagtggtttctaggcttcttgatggcacaaggatcacaaaaaattatttttatgctaacagtgaaaagattacagcaagaatggtttggagtaaaaaaaaaaaaaaaaaatctgcaggttttcagccaatctggcttctggaagggtgatatttgtttaaagggggtgcaaatgctggggccacccagtggcttcttccctggataaaatctgcctgtggtgacatcagcagtctaattcttggtcacagacccttgaagctgtcctgtgggaggggatggaaatttctgtttttctcagccaatctaattctcctctacaaaatgaggctggtttctctgccttttaatttagagaataaattcaataacaatctaacattttctctccctgttaccaaaggagaaagacttctttttgcagcaagaatgaacagggcagaattccagagactcgttggaaggaaattgctatttattcgataaaaacagatggcaatgatagctatgttgttcgttccccctttcaggcaaacgtcttaatgttatagaaaccatctagcatgccagaagtacactttttttttttcctgtatcccctggaggtactgtcagactaggaaaaaatatcctttgctataggtgacagaaatgttcacagatttaccaagatttgaaatagtatcagcatccctaagaatgaccagaaaatcagattttctcagaattactgtttgcccagagtttaaaagaaatcaggaccttggacttaatttgtaacatatagtatgcccttttaaaatgattaattgaatgatctctttttatcagtttagaatttaaggatggttaaattgctttaatttagctgtttttggagtgattagggtgtgtttttgagaaagtttaaaaaagatattcagtttcagagatattgctgtttcaggccaggtagaacttggtgtgatttt

SEQ ID NO: 98916 - DNA, 1045 bp, Homo sapiens
ttaaacctcatttttcaaagcctattaactggcttccctgagttccagcatactgtacttggatctgtcccactaatctcctatctttaactaggcttttattgtgtctttttcctgctcatgacctttcattagctccttatttaatcatgtctgtaaaaggactttgggggccgggcgcagtggctcatgcctgtaatcacagaacatggggaagctgaggcaggcagattgcttgaggccaggagttagagaccagcctggccaacatagtcaaactctgtctctactaaaaatacaaaaattagccaggtgtaggggctcatgcctgtaatcctcccaagaagctgggctgaggcacgagaattgcttgaacccaaggggcataggttgcagtgagccaagatcatgctgctgccctccagcttgggcaataaagcaagactctgtccccaaaaaaaaaaaaaaaaaaaaggactttgggaaccccataactgctccctgctaagctttatttccaccttctatctctcatttattatggttcttttgtgtccagtgaagtcagtgtgtgttctgtcccactcacacctggtacatttcccacctgggtgcctttgcctccctcaccaggaacctcacttgccctctctcctgtattcagaccctccttcatctcctagatccacttcaagttccacctcctccattgaataattcttcccagcccatcattctctgtcctttctgagcttccttcaacactcctagtatattactgatgatgcctagttaattacaatcaggtattagttcctgttgctttgtgtttattcatcttatcttcccacatagtctgtactccaccaggtactgcataactagctactggttgaatgatacagacttaaccatttctgcacagtagacatttcctctgctgtgtttagctttaataatctgctagttctttcctaagaagcagatggtaatataatgaatgatacttgtttctagaatttaggtattcatcttccctctctac

SEQ ID NO: 98917 - DNA, 1035 bp, Homo sapiens
cctttggccaggcgcagtggctcatgcctgtaatcccagcactttgggaggccgaggcgggtggataacaaggtcaggaggtcgagaccatcctggctaacacggcgaaacccagtctctactaaaaattcaaaaattagccaggtgtggtggcaggcgcctgtagtcccagctactcgggaagctgaggcaggagaatggcgtgaacctgggaggcagagcttgcagtgagccaagattgtgccactgcactccagcctgggcgatagagccagactccgtatcaaaaaaaaaaaaaagttagcagcctttattcggtcaaatattttattcatgaatcatgcgttttgggtaagttgctaaatatttgagattgctggtcaggagcagtgctgataaatgtttttggaaagtgattactaagctgctctgggactgaaacgttctgggggagcttgcatctgctcactttttcactcgtgcaccactgttattgcagagcccaggtagatgactggaccaggatggggttggcgtttgaggtttctgttgtgttcaggctcttgcaacttccttgaagggagaacaacctttttagtaggtgctacacttcatgagatgtaatgaaagcacatgggcgtgggttttttcttggtgttagccatggtggtttgttttcacattgtcataaatacgtgtcacgttcttcactcatttactcattcatttagaaaaagcttttttattgagtgtcaggccctgaggacacaacaggggtcaaaagccacactaccttggccaggcaaggtggctcacgcctgtaatcccagcacgtgtgtggggcccatgctagacctgtgggggagagacagctgacagctaagttgctctttcccaagggctgaacagtctagtgaagagatggcccctatgtattcagcatccagtgctgggaagacacaggaagaggaggctctttgggctggggccggggtttggggacagcctcctagagaaggtcgttgagctggtctt

SEQ ID NO: 98918 - DNA, 1055 bp, Homo sapiens
taatttaaaatactttattgctaaaaaatggtaacacagagacacaaagtgagcacatgcagaattgctacagaccttcagtttgtaaaaataaaatgcaataaatctgtgaagcacaatagaccgaagtacagtgaaacgaagtgtgcctgtactacaccatttatatgagagacttgagcatccatgaatttcagtatccaggagagtccttggaaccaatcccctacagatattgagggatgactgcaaatataacatactagtgtttatggcttgaatctgtgaaattaacatttatgcttcatacttaggtataaaacatagtatcatggttagagcagaaataaggaacctaaaagttaggctaatggcttggtcttttatattgaagaaccaatttcatgtgacaattggatcaaagggaaaattaatccagtcatatatgtagaatatagcaaaggactgccagtatttatctgactttagtcttaacatttagaatatcaacctggcattaaaaagaaatataaccttctttcatttcctttatataattaataacattacaacacagtgaacaatttttatatcacagtaacaggttgttctctttaccatctcttactgtctttacattttcagttcagagaagccgaactgggattaccatgcagaaatacaagcttttggacatcggttacaggaaaacttttccttagatcttctcaaaactgcatttgttaatagctgctatattaaaagtgaggaggccaaacgccaacaacttgggatagagaaagaagctgttcttctgaatcttaaaagtaatcaagaactatccgaacaagggacatctttttcacagacttgccttacacagtttcttgaagacgagtacccagacatgcccactgaaggcataaaaaatcttgttgactttctcactggtgaggaagtcgtgtgtcacgtggctagaaacttggctgtggagcagttaacactgagtgaagaattcccagtgcccccagctgtgttacagcagactttctttg

SEQ ID NO: 98919 - DNA, 1672 bp, Homo sapiens
tagtctcagctgctgaagaggctgagctaggaggattgcttgagcccaggaggtcgaggtttcagtctacttgtgatcacgcctctgcacctctagcctaggcaatagagtgaagccctgtctcaaaaaagaaaaaaaaaattataggattctaccttctgtggaattttggtagatcatactgcttgaaataggtttctcgggcttgcaaatttttttaatccaactatgatttttgcaataaaattagtgtaaaaactgtgggaatgaaaaagaatagtacatttttgtctttcgtttcccattaagttttaaatttctgttaaaaatgtactctgtggcttctctaatttaaaaagtgtaaaaaatgtattttgaattgtcctaatgttctttctactaattaaaatgtataaattatatttttatatgcaggacttcttaattactcaaatgactggaaaagagctctttgagatgtggaagataataaatcccatggggctattggtagaagaactgaagaaaaggaatgtttcagctcctgaatcaagacttactaggcagtctggtggcaccacagctttgcctttgtattttgttggcttatactggttagtgaaattttaatcttaactttataactttgaggaaatcctaaaaacagactcctcacaaagccttaaaaacactcttcacattccataaggaatgttaacataacctcttcagattccttaacgtaacttctaattgcatgaaaagattttttaaaaatctcttccccatggttattatttactacttcccttcccgctagttatgcttaggaagaatctgagttttgctaatagcttttgtcagccaactatttgctatagactttcagtgtgttatcttaaatttttctgtgtagaagtacaaatgttgacttgttcgtgttagagattcaaccttaatccattcttgtcagtagcttcaactgagcctagaactggaaaaggaagggccttagttatccatcaaaatgtgtaaatcaacccatgttgagagctttttagttttgttagtaaaaagttgacttgccccaaattaatctcagatgttaagattaaagtgttaaatgtaaatattgaatatttaagatagctagattaaaatttaggtaaatatttttctaatccttgtatcacgaaagactttataagtataaaagaaatagaagttaccacatggggaaaatggatagtgttgtataaagttttatctattgaaatgcaaaaacagtgagatactctttgttacttacctgattggcaaaccttttaaacatatcttttatcatcagtttatatactgctggtaggaaaaaaatgtaccatatttctgtgaataattttgacaaaatgccaagcatcttaaaattttttatgttctttgattttggtatttcaactttgggttgtttgccttagatttacaggcaaattttgtgaacaaagacgtttgttgtttacctctttatgctccatactttgaacagttgctgggacatggtggtcagtaaatagttgttgaactaaaaaacaattagaaataaatttgatattccacaagagggaaatgatacgtatacatgatggaatatagtacagctattacaggcgacatt

SEQ ID NO: 98920 - DNA, 1049 bp, Homo sapiens
caggcagtgtgtgtgggttaaccctcaggagacagcagtgagtacagacagactgaagacctgtaaccacaaagctcagaatctgtttcattaaagaaaagcatttcagtgagagaaattcctctaggacaggagtcagcaaacttctataaagagccaggtagtatgtatttcagatttgtgtgtcataccatctccattacagcttcttagctctttcactgtagcatgaaaacagcaatcaacaatacaagtaaacagatgtggctgtgttccaataaaactttatttataaaaacaggatttgtcctggtagacttgccttgaggaaaatagtttgctgacccctgctctcaggaggataaaacatgttctggcttcttactggcaaaaaagaccaatcttcagatttgaacataaaataaacaacaagtacttaaaggaaaataggcaatcaggtctatccaggataaaccgaagaattcgccagcatctgttgaattgcggcaggattgctgtacagccttccttgataattagaacatccacatctgcttcctcctcagtggtttacataatgaaggagaaaacagaacaatcgtaagtcagttttttcacccctcattatccgtaggaaaatagatgaatagatttggccaactctgtgagcccataaagtgaaaatcttagctacacttgcagctgggtcaaatatctctggtcattgaaacataccagttatactcacaatagatgtgttattgcctttctcgaataaacgttttaaaaattcctttaaagaagcatttaaaacaaagaccctgaaataagagggttggaaattttaagatgctttttgtcttttctaggtaattttaagtaacatctaaaagttattgaccagttttgctgagtgtaactatcaggaccagctacatagtttgtggggtcctgtgccaaatgaaaatatggagccccttgttcaaaatgtataagaatttcaagatagcaacagcagagtattaaacccagtgcagggccccatgtaa

SEQ ID NO: 98921 - DNA, 1966 bp, Homo sapiens
ggtaatgctttgatacatgtatacaatgtgtaatgatcaaattagagtaattaacatttcagttacctcaaacgtttctcatttctttatggtgggaacattcaaaatcctctcttctgttgtctctaatattagcaccttgcttgatgcctgacccataaacaaagacactgattttttgtttcctttcttctttaagcagttaggaggccttgtgatacccagagattccaaaataatgtttgatgtttctaaaatcttaagagaaatgaagcattcacccttaataacatacaggctgaagtgtttatttttgactgggattgaattaaaccaagtggagcaaaacaaaacaaaattgtttatcttgtactgaccagaaacccttactatcagtcatttattggcaaaaaaaagaaaagaagaagaagaaataattcattatcaaatgtagcttatttggatgagtaagatttttttaaagcctggacttgcagggaattgataataaaagaatttcttgatgaaaagttttgtaacccctagctaggggtttctaaagtcttttctgtttctcttttaacttctttttaactttaatatttagtgggggaggggaacctagaaagtacaaaagggtagtttaagaagattctctttaacactccttaaaaatcctttgatttttcagtctacctgatgacagctgccatttgccctcaagccggccaccagtcctgaggttatttttcccttgtttgttctttggcttcacagatatgattgacaatctgctgtccccagatcttattgatggtgtgctcaccagactggtcctcgtcaacgcagtgtatttcaagggtctgtggaaatcacggttccaacccgagaacacaaagaaacgcactttcgtggcagccgacgggaaatcctatcaagtgccaatgctggcccagctctccgtgttccggtgtggtgagttcatgctcagcgaagcctgttctaggatgtgctggcggcagaaaggcccttgagtgctttaacttaattccagagcaaatctaacttttcatcttttaaaaaactggggaacagagcagggtgctgagaggcaggatttttataaagctcatgtaaatctgtgttatgtacaaaagttaccatgcatagcataatatgcataatatatgcataagttatgtacaaaaagtattaatgcatggcgtgtgtagtaggctttttggttgaaaacttaaagatgaaaggacaattcatgaaatgagtataagtgagcattaaacacagcaactcattagcagtcttacattaccaaattaaaaattggatttctttttttacttagcagatcagcaaaaattaaaaacattggtaaaatccttcggtggctttggtggggaggaagcaggacccttgggcactgttcgtggcagggatctgtggtccgaggacttcctcggggtcctggctccagcagtcccgctccagggaatttatactgtgaacataagcacacaatgacaaataaatagaagccaaatacaaatatacagtggaacgtatgtgatcatgagacttagatttatataaatggaaagattatgcaatatatgattgatttcagaaaacgagatataaaacagcagatatcaatctcgcttatgtaaaattcttttctttatattcacacgtcaatagagataggtctcagaggatcttcagtaaaaaatattaatggtaggatttcagaaaaattatttctgaatttgaaaaaactttttcgagatagagtctcactgtgttacccaggctagactacagtggcacaaacatggctcaccgcagcctcgacctcttggactcaagctatcctcccacctcagcctctcatgtagctgggatcacaggcatgcaccaccacggccagctaatttttttactttttgta

SEQ ID NO: 98922 - DNA, 1052 bp, Homo sapiens
gcaaggggcgggcaggtgacctgtccctgggagaagcccttggccgtgccagtcttgtggtgggtacccccgtgtgctctcttttttttctgtgtgatgtgggcaggttccccaacctctctgcatctctgtgtgtaagagtctgtgaaatgatgtgttcacagagctgtgcacatagtaggggctttatgaaagtttcttcccccatcttctgtgcagctactcaccagccccattgttggggatcattgtctccataattggctgtgagtaactggggagatgttctcccctataaaatgcaacttcatgacaaaaagaagctcagcccccttcatccctaaagattcgttggtgcagtttcttataccagaggttagataaagctgagaaggagaacttccattgtcattgacttttaattctagaagtccctgttctcctatcttagctttggatgttggcagcagggcagcaggcgggtcttgtgaagaaaagttctgtggaacctaagagttattgacttgttcttcagcatcttcgcgtaatcctcatagcagctctctgaagttcattggtggggaaggaggcttatcactgatcttatagatgaggaaactgagttgcagatcaggtatgtgacttacccattgcaggcaggcccaggactagacaacaggcctgttccacagtagtgttaaatgggcataggtttcttctgggaaatagcaaacgtcccctggcccttaaatcccttcacaaggcattagcatcaactgtagcaaaggaaatggagtcaggttacaggacgaagctcagtagctgggtgactaaatccaggttcggaaccatgtttcccatcacttaacatggtttctgagctttgaagaacttttttcgtttgataggtgcttgcttggcaggaagaggtgggcagtgatcacctttttacaaaatttttttgagattttctttgcaaactctttgtactgaaggaagaaagcaaaaggcgcaaagagttggagataaaagcacaggaacctttcttaaag

SEQ ID NO: 98923 - DNA, 1029 bp, Homo sapiens
tgcgagccatgggccaggaaagtgctttctgtgcattgcctcaccacgtgagaggctgatagcccaagatggttctgtagctgaggaatctgggtgagtgacaggtgtcctcctatgcgagattaggggagtaacgcccagctttcagacagccagcaggggggctcagtagtgctaatgccaagcccttcatgcagagaagtgacttaagtgtcagttactactttgtgccagaggtaaatctctctgcagagggaaatgttggcacatagctggtaaacaccagtgtctaggtagccctcctgggcacaaccgtcctcattttttcttttacttgactctccactaaatcctttttgcccgaaactttgtagaattggtatttattgatttgtaccagctaagagttggctatttagtctctgacgtgctctttatggctgaagaaaaacaggtaactccttcacagaggagagattaattccctagaaaggaagacaaaagttttcatggacaactttggaaaggtgtgaagcattaaatatctatgacagcaagacacgggaatacacaagcctgtgttaaggcctgatcccttctgggccaggcacataagctgaaaatggtacctgagcaatttctgagtatgtcacgaaaaggcactgaaatacagaagtttctctatggaaaagagtgtcccggcttggaaactgtgtctgaagcaaaaaatttcctcaaaattgttcttcagaaagggagttgccgtctagtagggtccttacaaaatcattaagagttcgcaaaaaaactagatagatgagatccatgagtgactggctgagaacagatggggaaggcaaattcgcctgaaattctctcagtcaatgcatattatgaatgcttatcgaggttgcttcatgaaaaggggttaaattttaaaaaagagaggcaaagaaattgaatacagatttagtacttgttcttgaggttataacttcagagttgccagatattgaacgttgaattagt

SEQ ID NO: 98924 - DNA, 1118 bp, Homo sapiens
tcaatgcaagcgatctccaatgcttttcctcttgcgggtttggcaggtgactttgtagcccattctaccaggagaatagaggtcataagtatctcctcacgtcctcccccatctcccctgtacagacttttctgtgtttacccagtcatccaataaatcttcttaagcatctactgtgtctgggtactttgttggatactcataggtggtaaatagagcagatccttgctcgcttgaaactgtcattcttgtgggagaaaaccaactaaaagcaaacataatatgttgtaaaatgtatgataaatgaataaggtagaattataaagaaaaatcaagttagactgagaacttagagaaatatagagagatggcctccttggggcagtgactaatgtctccagctgtgtcctgaatcccaactcccagtgcctctctctccttgtgagtgttactcccttttcttacttttatcttcagtctctccctgtgagcttttttcttttttagtagtattttaagaatgccttaacctcccttgtccctgcatcctcagctcacctgtagtgacaaccacgtctctccaggcttcttaaactggtctgcccttcctgttcagctctttgcaagctggccagagtctcctcaaagttcaaggcctgtgacttcctgaacaagcaatcttttttttttttttttaatttttattaatatgctttaagctctggggtacatgtgcagaacgtgcaggtttgttacataggtatacacgtgccatggtggtttgctgcacccatcaacccatcacattaggtatttctcctaatgctatccctcccctacctcactccccgccccccaccacaggccccagtgtgtgatgtttccctccctgtgtccctgtgttctcatctgaacaagcaatcttatggatacccactaggtttctccgtggcatttgatgaggttcttctattcctttctgatggtttttttttttttttccatccctggttgccaccttctggttttccttattcctccctggcatctctgctacctcttggggttacccagggttcgctgtcatcccttttgtgctctgtgtatttgggtgaacc

SEQ ID NO: 98925 - DNA, 1041 bp, Homo sapiens
aagcactgttgatgttttgttcaccggatatgttgggtagcagaaaaggcctagaaccagttttaagattatgcctacatctctagaagactagtacactggcatcatcttaggtttctaaatattatttaattccttaatttggaaagcagttttaatgtttacagtttaagatactcattttcagtaactagtgttaaagatttttatctttgcctgtctactgtaacttaagactttcatagaataattttttatagagtatatggtatattgtgtcaatcttggaaggaaagctgttgcatatcaattgtaggtcatgtattttactatatgttgcatagtattttgcattctgtaaatacgaatgttaaaacatttcaggtcagcaaaattagaagtcatttctagtcctcaaagcagaaataattagaaatgttaacatttaagtgcttatcatatgccagatactattctgaatattttatgtatattcattcatttagttgtcatattggctttatgtgacataactgtcattataccagtgttgtccaaggttgctagcaggaaatggcagagccaggagttggacctaggtttaatcctatccatattccatgttacaaattgacatgattttccatattaaaaaattttcatttattttgtacctcattcacatgaatagtaatgtgacaaactaaagttaatacatgaagcattgcaatatggaattttgcacatttttgttagctttacattatttgctgataccaacttttggtaggaaggaaaacagggaaggtgattgctgctattctggaatgtgtccattgaaaagaaaataggcgctttgtctcctacaatcttagagaaagttttacatacttaagtgggtaccacagataggcatgtaccttaaattcaaatctacagttttacaaaatgttttcctttgtgtgcctttcctatgtcaaattagccagaaggaagaagagacgttaagaatggcagataaatttaacaggtaatgataca

SEQ ID NO: 98926 - DNA, 2302 bp, Homo sapiens
ttaacacatttagtgtacacaccagtgggccaaggtcccagagctagtagtggtagagctgagtttatccaggtactctgagtccggagtttgtgttctttaatacataggctacccaagttctgtgagttttgagtataactcagaattcagtagataacagcatcaaaacggttaaactataggtggcatatgctcacactactgtaattccaactaattcaattattcaactgctatccactttagcattcacattctgatttgaggaagtgtgttgtaaccataatattacattttcaaacagaacctttttaaagtttctgtgcttttatctttggtaatccagttagtaaagttcagtctctgagtgttaaaatgacatatcagttctgttcaaagatacgaatttttatgtgtttatataaaaatactatctactttcttttttaggtaactcagcagttgaaggcgcgattcttaccaagtccagttgttattaagaaacgtattgaaggacttattgagagagaatatttggcacgaacacctgaggatcgcaaagtatacacatatgtagcataaaatgcgttcagaaatttgatttattcttggactgtactcttcgcatggactgggaagttcttttaaatcattaaatattaagacgaccatctcttctattaaattacagtacatgttctagaccattgagatcaagcctttactccctttgagagtttccaacatcagttgattgagcttcaggctttacaacgtttatccctgtagagatcatctttacagttcctcgggaaaatgtgaatgtgctgcgttttgttttctttactgtatgaaaacaggaaaataaaagagaaatttagaaaatacagctcattacaataaaattgttggatttcatttccccaggtcttcagtgttgatgtaaatgtgttttgtagtgttgcttagcactttgcgcattgtgtaagttgggtaacaaaaatggcaaaagaaatgcagatttcccagttatcttgctctgaagacatttctttagctagtcttatttaattttaaaggtttgataaatatacaaagacccaagcatacaatttgagcatgctgtattctaccacttgcacttactcatcttctagccttatgaccaggaacctttgttttgggctcaagtacacatcctgatttggtttctccctgttgtaatttgagatttcccaaattaagtcttataatgattaggttttgttctgagttatttctagagaaagaaagtattttagtatgtgtaaattgtacaataatttttttgctgttgtactcactgctaatagtggattgtatagggtggtgtttttatttcatttattgtagacaaaaataatgaatttagtatacacatacccactaattcaagtatgtcagagcacaaagttggcagctggttatatttaattcagcccctctgaaaagcacatacagtctatactttgtttataaataccctaggtcctccctgcccctaaatatatattttggtgaagctgtggtgcactattaattttctgtttcaaaatgcaatctaaagatgcaataaatatgatgaccttgatagttttaatgaaatcttcaattcttgcagctgtgttttggaaagtgattaagcaatatttctcaaacctgatgattcttggatatttagctattgtcctccaaagagtcatcgtttcacgttttcaaacatgtgctttgtgctgaagattcttgtcagatatcctgtgcttccagagtatttttatcttcaattttatttaattttgtttcattttgttttcataagacaatgtttcagatatgtaatggggcaaaccactatagatttctgttggatagaaaaatgaaatgttactaataagtttaaattgacccttcgttgactatcagtactgttgatacatttattagaatgtatgtctcagaagatggtttctgtttaaatttatggtcaagttacaacaactgaattctaatatggattaaaaactccacataaatatttttccccatgcgtcttgggttataattttccttttagacttgcaaatatgcttttattgcaattttgtctccatctgtactgtagaattacaagccttgtgctctttatctctacattttccacttctacatgatgcaattaagatgccaatgaaaagtattgtgaacattattctcaggacacttttaccatacttgagtagtactaagtcaggtgtaacat

SEQ ID NO: 98927 - DNA, 1052 bp, Homo sapiens
ggtatgaatttgtgatgaggttgtgacataaaaagcataataaaatatatgacaagaaatggttagataacagaactctagggagatttttggcaaggagattttaggaactgacatcctagtggtacttttaaattatttatttcactgactgaatcttggcagtacatactcttgtctcctcataaagccttagagattacagctacattttgagttagtaagacaacagatacctatctgagataattttggtgagttttaacttggagccatggtaataaaataatcaattgacctctgatagtcataagcaatgaaaattatttactggtaattttactactgaatattttcagctactgtttttcttccaggtaagaaattatattctgcataaaaacaaaatcaactttattatctcaaagttaaattcctcatttttgaaaaggataatttagtattcaagtaaacattaagacagtttctgaatgcgtacttgaattaataagtgtgtatattcagaggctgaaattggtttttatctgtggattacattgaattataataagcttgcttataaaccaaattttaaaattagatttatgataaatgtctttatttctattttagttgctgccaaacaaggtgaatccgacccagagaggaaagaaacaaggcagaaagtagacgacgacagaaaacatgagatagaagctgctatagtgcggataatgaaatctagaaagaagatgcagcacaatgttctagtagcggaggtgaggactcttcactactgggctaatatagaaaaaacagtaacattattaacaaaattattgtattcaactaattttaaaaacaattttacaattaagaaatcctagtgatgtaacacttatgaaatgtatggcactcacttggtaactaaacatggtgatacatccaaatatgtgcacactctcggaaccaatgtgtttataactaaaatgatagtagaatattgtcacatgaagtattaagaaaagattttcactgctattaataccttt

SEQ ID NO: 98928 - DNA, 1035 bp, Homo sapiens
aagaaaaaattacataaacttttcccagaggaatattttataaatgtgcattgagtatttttcgtactgtggtataggagtatattttgtactgttgatgtctgctactgacttagaacaaattgattattgggttactatggagaaaggtggtcttaagaacagcaagggctgagcagcagtaggttggggcagagtgtacagtagaaattatttagtgtggggcctttgtcatttaatatctagctgagttacttaggactctctcaaggtcttgcctatagaaagttgaaactgaacttgattcctaaagtttcctttaagttttaaagtccatacacacacacacacacacacaaatgtttaagggatgttatcctgtagtttgtaatttcaaatgtgtaagtttgtttgattttctaaaacctggtttgatttactgaaggttctacttagccaaacacagtggtcgacagctcacactccagcatcatatgggttctgcagatctcaatgccacattttatggaccagttaaaaaggtaaatattgatagtttgaacgtattaagtaacttaaagttagtctattagagctgatgtgtgatttatgttgacctgggtaaattacttacttctgtttctctgcctgtctcacatgttagaaaggttaaaaatcctagctttgatttattacttctgttctctcagttgctaactgcacctttgaaaatatgaagactataccagtatagtcttccctaaggactaaacattaggataattacatattttattcataaaattaggtttgagaaaatattgcataaaatagtaaaatgtaagttgatttcagtgcatacaaagccatgagccccttttcaaaattctgtcacctataatctttatttctaataaatcaagattgggaaaattaacatttgtgatttgttagatatataaatgttattaaagtaatttaaaaaattagtattagaccagtgatttgccttcatttttaaaaagcaatcgcatt

SEQ ID NO: 98929 - DNA, 1167 bp, Homo sapiens
aaaaaaatagaaataaaaaaataaagtaagggcaatggcctttttactgtttggattataacaaattattgccttttgtttgcacagttgaggctttcagtgagcttaaatgaaaaattccgtcttttggctgtgtaagtttttgcctgcatatgcaaaggcttcataaaataatctctgtgactaaaatttcatttcatctgttctcaatcatcccttaacccagcgctatattaccttatgcctccaattcagtggtagccctctacggaatagaattccactccaacccctcattcatgatgcactaaatgagaatgtaagaatgatgctactgtgtgaagtaggagacactttctcaaaccgtatccctttttttgatgtatgtcaaccagatatctatgttttcaaacaatagtgtttttaagctgtaaatgaaccgtagtactgcttttgtagaactaaaattgtataattgttacatcatcttaattttgcagctaacagaacaagaagtagaaacaatattggataaagcaatggtcctttttaggtttatgcaagaaaaagatgtatttgaacgttattataaacaacacttggcaaggagacttctcacaaataaaagtgtttctgatgactctgaaaaaaacatgatatctaagttaaaggtaaggtgtgttttagatgaaatagagtgcacctaactgaggtttattatgattgtgtactgacaacgtgattggaaattaatttggtagattattaagtgtttatttctagaaataaaggtagattgttttggagaagaacacagactacactaacatttgttcaagttcagggacattcagagtttgctggaatttctgttggtgtgtcaggatacattcatggaggcctggaagggaggattagtaaaagggaaacaataaagaggctatgctgtgtagttctttttcacaaagtgtggtccatagaatacttgcacgtgaatcacctgagatgctagttaaaaacagttctgggccctgcctttcatgggggtatattggaatctctgaaagaatctgggaatttgcattttaaaatcctaaagtttgataaccacaggcacagagcaactgttggaaaaatttacaggaagattatcagggatagcaataa

SEQ ID NO: 98930 - DNA, 3556 bp, Homo sapiens
cagatagcactatgaaatgaagttcagaggtatctttttttttttttgagacgaagtcttgctctgtcgcccaggctggagtgcagtggtgggatctcagctcactgcaagctctgcctcccaggttcatgccattctcctgcctcagcctcatgagtagctgggactgcaggctcccgccaccacgcccggctaattttttgtatttttattaaagacaggggggtttcaccgtgttagccagggtggtctcgatatcctgaccttgtgatccgcccgtctcagcctcccaaagtgttgggattacaggcgtgagccaccgtgtctcgccagtatcttattattttattaagtgtatgtagaaataatgatatttaatttttgcatgccaaattattttcatttacttttacattccctttaccccaacatttaaatacaatgaaattgtagtaatttatgtacaactaaatacacaacatgtaatatctaagcaaaacttacaacaacataggattgaaatagacaagttgtgaaccattttgttagaagtatttggtgtgccacatttactgtagtatgtgtccatagattgttgcatttgtaatacctgttctaaatatgggaaacttggttgtaatttatgctaagtatgtgagaagctataaaattgccatgtgtaggttactatgggcatatattattaatggaaactaactaaaatttgctgctgaaagtcactgaaataaagtttagtaaaactttgtaaatcttgctttgaaatattttaaaaatgtatacaactttaagctctaaactactcttagaactgtagaccaaggtaggcaaattagggcctgcctggtgcactaccagttttgttaaaaaaaaaaaaaaaatcaagagtatttacacatgaaaatttatataaattttcagggtccatgaagttttatttgaaacatagtcacactgaataatttatgtattatctgtggctactttcttgctacagcgtcagagtagttgagtcagagctctatggctcacattttaaaatatttattatctgatactttacagaaaaaacattggtcagcctctgatctagaaactcttaatgccattttaaaaagttattgattgtaaaacttttaaaattatcattgtaaagttctgacactgtgttctcccagtaagttgttattgcaaagaaacactagacatatgggaaaactgtattttaaaatctgtattttagtcttgtgaaaaatgatattaaaaaatggataggatccagagttttcattctaaatttaaaaagtatagtgagatagaccaaattttgaagtacagatattggcttaggatgctacctgggaaacattagggattgctctcaggaaaatattgaagaagtggtatttatattatacatttcataaaaactttacctgaggtgtaatgaagtaaatcctagtatagttcatttgatttgttttcatgattatcagttaaacctttggaaatacccataagacttaaactggctttaaaatttcttcctcattacagggactaccaattacctcttaattagtgaccctttttgtagacgttttgtagtgtcattaggtctgcattagagttatgtaggataaagtatttatgaactcaaaactgcagttgccatgtttttgtgacattacttgtttattatggtttttgacatctcttccatgtaaatttaaatttgctaggacatttaattgatggtttcaaagcatctcatctaaaagttgtgttttataaattacaataataaccattaactagcctacttcttcatgttttcatatcaatatatgtatatttttaatagtcatgtggtcagcaaatgggggtaatggagaaataagcttctctcagtattatagcgtgaacagagattcgtgtttttttctttaatctttaatgtagccaatttgtgttttctgatttgtagaccttggttgcatgtacaagttatttagtcgtgtgccaaatggtttgaaaacaatgtgtgagtgtatgagttcctatttgagggagcaaggtaaagctcttgtttctgaagaaggagaaggaaagaatcctgttgactatatccaggtaagtaaacccagaagattctctgtgtttatgataaaggcattttgacaagtgctaaaaaggccacttttaccatgctgtgtattgtgtactttcaacttaattgtcccagtagtaaattaatatttgtaattatcctacatattttaggattttgcaaggtgtgcgtatttatatcagggagctaaaattcagctgctacttttcatttaacttctttgatgaagaccttgtttaaatagcctcaatagtgaatgtgaggttctttggtatgccttagtgtttgtatactgtagtatattggaaaaaacaactggtttaagtattttttgtttgaaaatgttttgttttcaaggagtactatgaataaattatgtgccatgttttgtgttttaacataatcagctttttttggtacattttttaagctaatttttttcactggctaacccattccatcaagacaggagaatgagaaacagtgaggaggttctttggttcgtttgcattgtattaatacatatatggaagttataatacttctctcattgacatttttaatagaggcttagatataggcttgaaaataatatcaaaactgtaagtttaaaaatgaatatacatgtttattaccagcaaagttaagataaacatacatggtcataagtgtattatttatggaaaaattattataatgtgtcctaaattttgtttttatttctaagggcttattggatctgaagagtaggttcgatcgcttcctcctggaatcattcaacaatgaccgtctctttaaacaaactattgcgggtgactttgagtattttctcaacctcaactccaggtctcctgaatacctctcattatttattgatgataagctgaaaaagggagtcaaaggggtaagtagtaatgcatttgaaaataacatttaattttatttaaagatataaaattatatgtaaaattaggacatttcacagataaaaattaagcatgacccattgctgtgcttaaatgggtgccatggtctattaaaaaatattgtttgaaatacttgacatgcccaaacgtagttagacatttcacttaatgtgtaattggcttcaaaaacaagcaactggatgggcttggtggctcatgcctataatcccagcatttggggaggccaagacaggaggctctcttgaggccaggagtttgaaattagccttgttaacttagtgagactccatctctacaaaaaaaaagaaaaaagaaaaaaattagtggcacacagtggtatacacctgttgtcccagaagctgaggcagaggatcacttgagctcaggagttcaaggctgcagtgagctgtgatcgcgtgactgcactctatgctgggcgacagagcaagaccttgtctca

SEQ ID NO: 98931 - DNA, 1535 bp, Homo sapiens
ttcctggggtaaaagaaaaattgtgacaagtatcctagaagaaattacaagttaaaagaacaataaccatatcctctattcttagtttctgatgctttgttttaaaactttgcctttaccacttatatggtattaggaaataaaaaacatggtactttgttctcctgcttcctagacgaaatctaagcaatattttatccacttctttttagtaaaagaaatacatattgcctgttggggtcatgagctatgtagggaatgaaaaaattttttaaaggagaattataaagagaaggaggatacaagagaaaggaaaacgaaagctggtgggaagttgagccatgtttatctctagtggaatccttaccttgtgttttaaaattgttaaatgtttgtatatatgagaaatccctgaaaagttatatgtaatttaaaaaaacaaaaaaaaaacaaaaaaaactagagaggcttcctttttaaaagactcttcagttaaaccttttttgtaaaagccaaaaaaaaaaaaaaaacagaagtcatctagtatatttgctgtgttttctaaaattgaggtccaagtcaggggttggcaagcttttttgttgttgaataaaatggcttgtgagccacgcagtcatagtgagaaaatagtcctagacaataacaaatgaataatcctgtgtttctataagactttatttatgggccctgaaacttgaatttcatataatttttatgtgtcactaaatagcattctttacagtttttcctcagccattaaaaatgtgaaaaccatccttagttcatgagctgtacataaatagatggcaggctgtatttgccccacgggttctaattcgatgacccttctctaagtggtctctggtagactgggactttatgcaaagcatttgccctgcttaaacaaaatgagtattgataaattatgtaatgtactgtttaggtattgaatgaatgctttcttacctaccttaggggataggaaatgtttgatggagaggttgttgggcatacctgaattacagcatctctgtaacctgtgtggagatgtatgtaaaaggtgtcaggtatgcctatcatggcgagcacttacgtgaatgaaggaataccataatagtactcaccagagttctcctttatttagtaccttaggtttccaacaacacagtagctatctgtgattctaaattaaattttaaaatcctgcttttgtccaggcagggtggcaaacgcctgtaatctcagtatttttgggaggctgaagcaggtggatcgcttgagctcaggagtttaagaccaacctgggcaaattggtgaaaccctgtctctatgaaaaatacaaaaattagctgggcatgatggcacatgcctagtcccagccacttgggaggttgaggtgagaggatcatttgaatctggctggggaggtcaaggctgcagtgaaccaagatgatgccactgcactccagcctgggctacagagggagatcctgtcttaagaaaaaaaaggtggg

SEQ ID NO: 98932 - DNA, 1689 bp, Homo sapiens
ctggtactaatctgtaatgaaatgatgataacaacaataattgagtactagtaaacataagatagtagttataaggtaactgtaacaaggcatttttcctgaaaaccgtaactacctgagcagttaacagtaggaattttgtagtgttgccaaaacagatgtattcgtaggaagctaaagtgttggccgggcacagtggctcacgcctgtaatcccagcactttgggaggctgagacgagtggatcactatatcaggagattgagaccatcctggctaacacggtgaaaccccatttctactaaaaatacaaaaaaattagccgggcgtggtggcgggcgcctgtagtcccagctactcgggaggctgaggcaggagaatggtgtggacccgggaggtggagcttgcagtgagctgagatcgcgccactgcactctagcctgggtgacagagcgagactctgtctcaaaaaaaaaaagaaaaaaaagatgaatagttatttaaaagctcttattttcaaactttagtgtacatgtttactctttgagactgggagtgggatggcactggaagacttaattaaccagcagtatgccagcaaagcttatgataaacatgatgaatctttctggttataattttacattaaaacaaatcaaaaaagaatgtcccactgtatcttggagtcagatgcttctaagcttttgaccctcactggcgtgtatatacttgttctgctattttttggagtacattggcacagtttgaaaaacattgcttacagataatgttttaatttagtattatgtaaataccaaaggctttaaaggatataattcagactatatcagtctttcgtgtaatgagaaattacacaaaatgctaatagtacttattttatttaggctgatttattataaacactgtagaaacccagctaaaagcaaaaacactcttttcttctatgtttaaaaaatatatatatttttaaatggcagatggaaagccagaaatttttagcagaaaatagtgcttcagtatatataaagaaagtagaagctagaattaatgaagaaatagaacgagtgatgcactgccttgacaaatcaacggaagaaccaattgtaaaggtggttgaaagggaactcatttccaagcacatgaagactatagtagaaatggagaattctgggctagtacatatgttgaaaaatggaaagacagaaggtaagtgttaccgattgaaaaataattaaatccttactctgccttatcgatatttttaaaattttcctacaattaaagcagataatatcagctttcaagaagttttggtgtgtattgttaatttgtctccattgttaactttaatgggatttccaagcttgattctgtcttactaacgaagattttagatatttctaatgaattgagcatttcctgtctttaagtctcattttacatttaatccagaagataaaaggtgtaatagtattggtgagcccagtgagctcctcattcattcctgtacttcctgtataccaaagggtgtgggctctctttagtcctacatactctcttggggttttgtgattctcttaaaaccttaagtttccaccttaagatttttgtagactttcctttgggatttagttgtgacagggtgctgaaaatgcaaaaatatttgtgt

SEQ ID NO: 98933 - DNA, 1074 bp, Homo sapiens
gccttttaaatatttatcagtaacaatcaatctaagttgtataaatccgtactttattcaactctcagttttacttcaaagaatatgatcttcaactacagtatttaagaacgaaccatgtttgagtatgctgtagctttggggagaaagtgtgctaccttactatttacctttttttactctgtttttttcttcctggctatgatgcttactttttaccctttttctttaggtaaatgggccaccatttatagccattgtcaattgtaaaaacttaactttatataacttgagaggtgctggaaagttgcacattgcttaagatcatttgaagtgtttctcacctgaaaaatgattgcttttggaattttatttcctttatttgttattgtagcacacaataattattatgctcacaagaactgtactcatatttatatgactttaactgtaggaccgtgtgtatgtacaacaaaataatgtggagaacgtctacaatttgggattaattatttttcgagatcaagttgtacgttatgggtgtattagggatcatctacggcaaactctattggatatgattgcaagagagcggaaaggagaagtcgtagacaggtaaaatttctctctttactcttgtggttttggttttagtgattatatcttgagaacgattcactgtcttagttttattaaaataaataaaagtttgaatgttgagcacattgggaaaatcctcagaaacttagtatcagagttaacagttacccaaaatttaatttgaaagcacacatcttttatatttttagaagagactatcctaagcttttatttaatatgcttttcagctagccgtcacttttggcttttcatttatttttcatgccagcatttttttctttttttctgtgtaataacatttgtatttttttttctttaagggcttttgtctgtccttcattcctaacatttttgaagaaaactattgaacatagtctaaaatgactaagaactcctgtgccccttttaagtcagatttcatcccccttcataacaatgattgcagtgtcattt

SEQ ID NO: 98934 - DNA, 1055 bp, Homo sapiens
agacggtgtctcacgctgtcacccaggctggagtgcagtggcaggatcttgactcactgcaagctccgcctcccgggttcatatcattctcctgcctcagcctcccaagtagctgggctacaggctcccgccaccacgcctggctaatttttttgtattttttagtagagatggggtttcactgtgttagccaggatggtctcgatctcctgacctcatgatccgcccgcctcggcctcccaagaaagattttaagaaaatttttactgtggtggaaactctgagctttttagtagtggctaagtccaccaggttttttgacaccatatcatatgcttctctaccaaatttatcagtaatatttttatatctagaaatgtttatctgtacaatttactaattcatatgttactggtgctgttttagaagtgtagtcagttactggtatcatggaaagtattgagaaagttctttaaacttcgatctaattataattagactttttttcccccactatgattctgcagtagaaactttttactacttttctgctcatttaaaatttttctatttctgtcttcattgtgttaaacctttttaaatctgtatttatttcatgatttgaaagtgaactctgaaaatattttattacttgttaatagaggattaccttagtgattaaatttggtaaggcaagttctaacatgttctgacagacttgtcatagagttatttgcctcttttttttttttttttaattttaaatgtgagtttaacttttcagggtttatctctagcttactagcagaataagtatttaatatttataaagatttttttaaccctgtttacatttgtcttttcgtattctcttttacagtagtagacaaaaacagttacagatgttcttagtatgaggataagaaactgaaagaagaactatttaagagtttgattaaccagcttgacagttagcttaaaagaccaactttcacagcaattcacacattgttaaaccttttttttttttcctaaataaatagctactgctggcc

SEQ ID NO: 98935 - DNA, 1603 bp, Homo sapiens
acagacctgtggtcaacccttcacactgcccagcagtttcactctttttctttagtcagcttgctccagcagttatttctcttcagacctccatctctcccttgggtttcctcccttgtagtaaatgatcttactttctatttctcagagaaaagagaaagcatcaggtaggaactatgctcattttttgccgctaaatctagaactttacttgtattttctccccttttatgtttttctttttccctcctcttttagtggagggtggtgtcctcttctgtcaggccacatctcaacctgtgctatgggtcaatccctttctaccttgtcatgaaccttaagtattttagggttctacctttcatattggatcttactcaaccagcattaaacatgttcaagccactcactcaatcctcagaatacaattctgttaaattctctggtgaacccctgcactgtctcccaggatctgtcgtgtgtcattcataactaaatgtgttgtaagaaatgttgacatttgccatcttccttttctcatctttcatacactttgaatacattacagttaagcttctacctcaactattatgttaagttttgcccttactagtatcaccatggtatcttttcatctcagaatagagagactgctaatccccattctccttgtttttttttttttttaagcagcatttgccacagttggtcattccttcgttcttctaacatgtttccttgatttctgtaacaaagaactctctttgtatgcctcctacctaccttcttactgtttcttagcctctcctcctccttcaatgactactaactgcccccaccatccccccttaaatagaggcattcttggggtttagtcctagttgttcttctcatggtacactctcttcaccttatgtagcttcatgtgcctctgtgcagatgattcccaaattgtgtctctagcttcatttcctgagattcagactcatatatgcatttgtctagttaatggagccttcattctctgaagtacttcaaacttggcatgtccaaatgagctcataatcactatcattcagttgataatcactatcatactgaaacctgagaattattcttataagttctttttttctccctacatcatctgttgctagactctccagttttctctttattgtctgttactcaacatcaaaccaccttcatttctctcttgaaatattcagtgttgctagtcttacagtgttcactgggctcttctctgttttccatattgctcccaggattactattttaaagccaaatctgatcatgtcactgccctgttgaaatccttatctctcatcttggaattcttttacatatcttctgtctggaaatgtttctagaattttttttttctttaatgtcacttgctctacttattctttatgtcttaccttatatttctggtaagctttccctgacccacgtactccccactggctgcagttgctctcattgtacctagtactattcctttgcaacatttatcacagtcattaaccaactattcagtgtgtagtttgcccagtggagtgtatgaggatggaaacagtgt

SEQ ID NO: 98936 - DNA, 1089 bp, Homo sapiens
catttggaaaacactgactttgatctcagctgtttaataactttcagagagattaaattccagttaaaaaaaatttggtgctatagaatgacgctagattcattaagtttaattactgtatcactccaaaattaataagttaatgacttgttttacatcagtgtttatgtttgtgtattggatataattatttttcccaaagttttacctttttatatttttgtttctagtttttttagttttaatgtagtgatgagagcttgtcctagtttcttttacttggtagaataaagcaatgtttgggaagaatttccaatgagaacaaacagctgtaaagttttttgttctgctctgtgaattcagtcaggcctattacccctggttttgtaagggcttagtggcaagggggtcagggagaggccacttcacttttaagggatttgataaaaggtataacaaattatttagcttttctgagcattatttttctcatccggttataaattaaccttgtgttatcattttgaagttaaatgagatggtatgtgacaacatatattatctggcatataaatttgaaataagttagcttgttgttttcgaagttctagatatggtgagtctttaaatcgcatcctaactatctaacattaagatagaaaaccacttgtaatcttacggtttattcttttgacaaaagaagaactttaaaattttatacacacgcagactctgatgttatttttaaagtgtgttttgtttcagtcctcctcctccctttttttctttcttttttctttttttttgcaacaaaatctcaaaccttgaattctgactctacacatggtcaagaagttaattagttcacccctcaggttcctcatctataaaatgaaaataatattgggtagagtagtcatgaggcttcagtggaacaattcatgtaaaccacttgtagggcttggcccatagtaacatgctcattagagattaactggtattatttcttgtcccttcatcttttcatcaaacccattcggtagtaccacagtgctgcatgaactgaaaattcatacagggtagattgat

SEQ ID NO: 98937 - DNA, 4171 bp, Homo sapiens
gaataaagaaatcttacttaaccaaagaacaatgatcaaaatcaggcagtttaacaatataatactgttgcctaatacattccttattcagatttcaccaattgtcctgtttagtggtgatttcctttatagcaatttgttttctgatccaggatccagtccaggatctcatgttcagttcctcagcctttctttgtctttcagcacattgacatatttgaagagtataggtcagttgttttgtagattatccctcagtttttggtgtgtctgattgtttcctcatgactagtttcaggttatgcatttttggcaggaataatacataagtgatgttgtgtcctcagtgcatcacatcaggaggcacttgatgtcagtttatcccattattggtgatgttaactttgatcattggtgtccgccagatttctccactgtaaaggtaccttttttccctttgtaattcataagtaatctgttcagatatattttgacactgtatgaatatcctgttccctagaaactttcatgtgatggttttagcatccattgatgattcttgcatgaatcattattactatggtggttccagaacagtaattttctatttctgctctttcttctgtaatttctttctcttaaagggaattacatgagccacgcagttagtatcttatgaagcaaggtgattgtgtttttcacacaatcagcagttttttattaagtgcctattatgcacagctttcagtcataatgtagtggatgcaaagagataagatactatcctttcctggggtttttattgtgatgtgagagatggatgatacacacatttagataaccgtgtgaggcattatataattaagtggcaagtgagttgcataggcaataaatggcttaagaattcaaacggaggagaggttgccttgggatgtaagattttatgggaaagaatgaaattgaattgagccttgaaaaatatttgggatatatatgaacagtgtggtggaaggcattccatgatggcagatgttgtgaaattatatagagatgaactggttggttaaacttaggtggtaagtagagtttgactgaggcatataataattacagggattagtggattgtagtgttacaaagatggtttgggaacagattgtagaaaaatttgggtgccagactaagtaatttggactaaactgtagacagttattggaggtttttaagtgggtgaaaatgtgacagaatatttgaagatgtgattttaagtgggtgattatgtggcagcatattatgaggatgctataaatgtaaaattgagaggaggtttataaaatcaggagaagacctggaaagatctgggtaaagtgataggctagaaatgaatggatgatgtcagaaattctaaacttaagtctagacaaagattgcttactgggagaattatagtgccaccaattgcaaatactgtgaagtaatagtgggaaactgatttgaaatgggtagagaatatgataagttttgtttagattatattgaaaatgtttatccttggaagataccttagaaatcattttgcatgtgaggaaaattgagtgtgagatcatagtaagatgcccaagtagagatatcgtatgtttggagacacatagatttagagcttgggcaggaactcaaaattagatgtggagatttggcatttggtaacgtatactgaggaacaagtgttggagttcagaaaatgaagagcccagagccaagggatgaatcttaggagcaaactatagtaagtaggtgtgggaaatggaaaagaccaatttaagaaatttggcatcaaaaggacaagtggaagagttttgtttaaagctgctgaaggagagaagattggaacagctgagttattggatatagagagtatgggattaagaacaatggaaaagaagtaaacttggaagaggggcatgttctcattcgtcagaggttctatagggaatgataattaacacaattaacttttatttagcatttactgtgtgctaggcccagttctagtgcttttacatgttttaacttagctaacagtcacagcccaatgttgcagatactactattatgtctgttttacaaatgaagaaaccaaggcacagataattggtcatttgtccaggtccatatagctgttaagtggcctagccggaactgaattcaggcaatgtggctttagtctgagcccttgaattctctgtagatctgctcctaaggtagaatgatcaagttgtagtatgctgaaattcagtgtaaggggcttcaagttaatggacttactgtctgtaaacctccagtcctttaaattctaggaatcctttaaatttacttaataatggagttggaaataatatccctgagattctttatttctaaaattattatgaatctaataaaccatccatcttctgaaaacgagacgaagagacttggagtagcctttgtaagggatatactaaggaattggcaagtgcagaagaagatagcttcataggagttggcctgaatgtgtgctatgtcagtttttttaaaccttgggcacaggtgcagaaaaaaacatcagtagttgtgtgttagggttgagaagtggctcgtccaaagagtgaggagaagagagaaggccagagtgtgagatcagtgtttcggtgaccaagttttgggctccagtatggtcaattggatgttgaagatatggtccagtagatattgaagttacgtgagcagtcactccatgagaactctgagtttcagtatattataagttgcttaaagtggtcccatatttaaggttaactgttgtcttcctcatcttaagctactgtaacaaatcccataaaccaggtggcttaaacaaatatttctcaccattctggcaagtgagaagtccaagatcaaggtgcttgcaggttcatttttctggtgagagtccccttcctggtctatagacaaccacctccttgctgtgtcttcacagggcagggagggagagaggtcatgtctctcatgtatcttataatggttccatcctgttaatgagggtaccattctcaagatttaattgcctcccaaaggccccacctctaaatactatcacatttgggattagggtttcataatatgaatttgaataacacaaacattcagtccataacaattatcatttcagaatataggcagtttttataatatattcccccaaaacatgcattcaagttgattgtactaaataaattttaaaatatacagtatatgctaaattcttaaatttactttccttatacatagtcattaatgatcattgccggcatctgaaaatgttcttttatttattcttttctttcacgctcatttgaccagtcaatttttgactaggaaatgtagcaatttcagcatgtctgttcattgattatttacagtgaattaggttttgaagcctctgctagtttctgtgcttttgttttcatgtttactcctattttataaaacaattttaataatcatataaacacagtactactgtattgaaggggacactatcgaaagaactattaactgataggtaggaccatctgacatgtttgtttcctaaggtaggacctctgacatgtttgtttcctaaggtagtaagtctcagtttgttctactaaatgagacttagagatgttactgatacaatgtgcaaaagcatagtttgcatgaaaatcagtactgcctatctctgcattgcatcttttgactagaaggtgagatattctttcagggttctgtggtatcagaatacctatctttaatctcacagaatatacctttttttgttgttctgaaagcattactgtttggtctgctcatcagtttttaattcacaatgcttttggcagttagctgaactgcctgacgaaccatatatttatttattttaaagcaaagtgcttttagtgctatggtatacatagccaagacccatcttttcacattgaagaattccaaggaaatataatttttacatggattgagggctggtttgttatatagtttgttggtactttgatttcaaggtgaggatagtgaacaaagtcaaacattttggtaaagtagcgcaacacagactaccagacagcagatgacg

SEQ ID NO: 98938 - DNA, 3108 bp, Homo sapiens
aacttgagctttaggattggaggtttaggtgataattaagagccagtaaaacagatgaataggagacagaagtagaagaaaaacaagagattgtagtgcttggaagttaagtgaggaatttgtttcttttttttcttcttcttttttgagacagggtcttgctctgtcatccaggctggtgtgtagtggcgcagtctccactcactgcagcctcgacctcccgggctcaagcgatcctcccgcctcagccccactaaggagctgggactacaggtgcatgccaccatgcccgactaatttttgtatttttagtagagatgggtttttgccatattgcccaacctggtcttgaaaccctggactcaagtgatcctcccgctttgactttccaaagtgctgggattatgggtgtgaggcaccatgccttgccaaatttgtttcaaggagtaggagtgatcagctctttcaaatgctgctggataggtaagtaagaggagaactgagactttgcccattagattttggcaatatagaagtcactggtggccttctcaagagtagttgcagtgaaatggtagagatgaaagccctactggagtagattcaagatataatggaaagatggaacttggagacagtgcatgtacaatctcctcttcttgcctgtgattttgccataaatggaaagagagattagatggtgctgaaggaatatatgggtttgtgaggatttgtttttgacataggaaactgacatttttttttttttttttttttgagacacaatcttgctctgtcacctaggctggagtgcagtgttgtgatcttggatccctgcaaactctgcctccgggctcaagtgattctcctccctcagcctcccgggtagctgggactataggcatgcgccaccacgctcagctaattcttaaaaaatttttttgtagagacagggtctcactgtattgcccaggctggtctcaaactcctaagctccagtgatccttctgcctcagtctcccaaaatgctaggtaggattacaggcatgagccagtccatgtggtgaaactgacagttttcagtatgaatggaaattatctaccagaggaaaaattttgatgatgcttagatgtgtgattactaaggggaggagttttctttctttttttttttgagacagagtcttgctctgttgcccaggctggagtgcagtggcgggatcttggctcactgcaagctctgcctcccgggctcacaccattctcctgccacagcctcccaagtagctgggactacaggcgcccaccaccacgcctggctaatcttttttttgtatatttagtatattttttgtatatttagtagagaccgtattagccaggatggtctcgatctcctgacctcatgatccgcccgcctcggcctcccatagtgctgggattccagacgtgagccactgcgcccagccaagggaggccttttcaataggtggtttggcatagaactagagatttacttgtcaaatttcattctgtataatattacattgggttcttgttaaaatgtcgattctgtttctgtaggtctggagtagggcccgaaattctgcacttctaacaagttcctaggtgttgcttatgtgtctggtccttatgctatacttcgagtacaataacttggcactttgagcacaagaacctagcaggttttattggcataaaatcaggtcggttggtgtgtgaatatgatgggaatttgtatagtgtctcatcgggttgtttttattttctcagtggaataggaagcagtcataatcatagagtgaggatggaggaggtggtataaaatcatctagaagagtagagtgagtagactgactagtggaattgtggggttgcatgaaggctgcacttaacgttagtggttatgaatttaaactcagatggaccaaaaatatgggcatatgttattctttgttttctttcagctatacggatatatgtcaggagtatgtgggctgttgggatttaacttggcaagtattttggtgggagagagataaggggtaagtgacttacgggtatataaatcattatgattttatttaaagtgaagagttctgctccaggtaagattggagggaggtcttaaaagatgagaaagtgcttctaacagatctagaacctatttttaaatgtatcctttttttccccctgttaaaataggttgttaatgttcttatgtgtcatagatttataatcatatctatataatacaatatttactatatatggacaaatatagaaagactttcaaccattggttttttttttttttttttttttgtctcttctctctcttggatattacagatgaccatggatgaaaaatatgtaaacagcatttgggaccttctgaaaaatgcaattcaagaaatccagcgtaagaataacagtggtcttagttttgaggagctctatagaaatgcatatacaatggttttgcataaacatggagaaaagctctacactggactaagagaagttgttaccgaacatctcataaataaggtatcaaactttaaaggactgttgctaatactatattgaatgtagaaaatcctttataccatattgcactttgaccggaagtgttctttttaaaggtgccagaagcctatagaaattactaattcgtgactgttaataagcactcatgaaaaatttataatcagctaaatcgaaaatttggatatttgagagatgaagtttgtgagctataataaatgctttctttaaatcataatgaagcaaactcagtaattcacaaatgcttattaatatgttaattacaaggaatttttttccttaaaatgatttaatcagcccatttttactttctcatttttctgtatatttgaaaacaataaaactacgttgtttaaaatatatttctaagatggatcactaactaaaattgactttattttaactgagttctgtggtacatttgaattttttttaaagataaattattgttgggctgttcacattattaaaaatggttctctgatttcagaaagatgtatttttttagaacaaatgttt

SEQ ID NO: 98939 - DNA, 1423 bp, Homo sapiens
gggattatagctgtgagccaccgcgtttcagccttagtgcgtattttaagtataccttcatcattgtctgtagaagttataatacacaacagtttaatgcacaatttgcatttttaaatagaccttttcctagaagttctttttaagatggaagacaataaggacgtttctgtatttgtaagctgttgacaaaggaaaagtttattccagtttataagctttcccgccttgcacaaaatgtatcatttcacatctttttgataatgtttaaattttaatttgtatgcagaggaacaaggaccacaaaactttttaaagaaagcaggctgtaattgtgaaacttctggaaataatgtgggtctggatcaaataattctgccccagggagtctcttccttactcctgggctttgttccactatgtaggattagttgctttcaggtgaaccttttattatctttatctttgaaaaatcatttcttaccatttttactgtctggggttttgcccacatgggtttgatgagcttgattagaattggagaggatacgtttgaatgaaaatgctgtcctttcctgtatcaaacggtaataaagcctttcttggcctagccttcagagtttgggaaacctgttatgaaggtgactgtctccagaatgtaatcaggctcttaagatctctaccctggggtcctggaagtagcttcagttagtttataaaagcttgctaactcatcaggagaaagagtgttatgataaaatgcccactccctaatgctagaggaactccacttgtgtagcatggacagcaactgtttggaagtgattgttagctggaacatacagggcgactcacattagtgaaggagttttatgttcatttgtgatatacttaagaacaggaagagtcttaaggacagatgggtacagttaatctttttttttttttcttttcttcgagctacagaaatgtttgccagatttgagggaacagctttcatcttcatagtaggtttctctttcttagggaaggtagttgttggcatagtactacctggactggtacatagaggaaagctggatggtagtcttgcagatcacactgagcagagaattaattataaatttgcttttcatttttcatgttatgaaacaaagtgaaacagattcattaaagtgttacttatacttaaactaatactgtttatagttttgggacagccagtattgtcatagctgttagtactactatgactttagaagttagaaaaataaaagcatacggttgttattaacaaagtatttattttgtcttgtctttctagatagcagttcagaggaacctggaaaattattagtaccaatattgaattagaaactatttaagtaatatgaaatataatgtaaaaatttggctttttaag

SEQ ID NO: 98940 - DNA, 2176 bp, Homo sapiens
cggcggccgccgggctccccctcccgtcctcccacctccctcccccggcatctctcactctccggctctcctccctccctcctcccccctccaccctctgggccggatctcgtctcgctcaggcggaggaggagaaggaggaggaggaggacgacgttcggcctgcgcagtgagatgtttgtccgtcgccgccgccgccgccatcgcggaggagcgcgataaagggagccgagccggacgtgagggggaccccgcggagccgccgcgccagcgcagccccccagccgcatcggagtcgccagagtccgagccgccgccgccgccgccgccgcccccgccgccgccgcggctgcccaggggccggccagctccccagccctgcccgggggtcgcgccgccgccgcccccagcgtcgcccctagcctgcctgcccgccttaaatgtgacaccggcgtcgcggagcgcgacctgaagccgccgccggggaggggacgagcaccatgtcgaatctgagcaaaggcacgggcagccggaaggacaccaagatgcggatccgggcctttccggtgagtctctcctcggcgtccgggaccccggggccgggggccgggccgagagccgcacgcgaggcccgggctgaagtcccccaacaggccgcaggcccggcctcccctcccccacgcccgccggccgcggggcgcgagccttcccggcaaccgggcggcgcggggccccggcgcggccgccctcccgggccgttccccgcgccgggagcccgggcctggcgccgcgcccccgtccgggagctgctccttcagccgctccgcgggcgtcggctgcggccggggcccctcggccgccccacgcctccccacgttgccggggttgtaggcccagtctccggcgctgctagcagccgcggagtcctccctgtgtggggcgtgtgtggaacttttcacgtggggtttcgctacactttgaaaatttacccagcctagcttttagggtgatgaaggggctgccctctctctctgcccccctccccaggaaggtctatgccatcaacctgcccccgacgcagtgacagtggttccacggaatgctccgtggtcataaactagtaacattgggtgtatttatagcgtctttcatcctacaagcttcctaagcactttacaaactcttgtgcaggattgcctcgccactcggaggaaggccgggtgggggggaagcaacagagagcaaaccggccaattggttctccatttctcagccttgggagcccaaagaatgagtgtagtcgccttgcggagtagctttgtttcatcgctttcagtgacagcaaacgtgttctgctcagaaactttttcttttttggcattacgttgagtcgtacccttgcgatgtttagtatataggatataactttgggtgtcaaatctggttcagcttccccgtggcaagcaattaaaatgtactgttaacgaactgggcatacttgcctatgtcgctacaataaaaggcatacgtcaagacagacgaactagcaatcggacagaagattttaaaaagtaaaattagagaaagatcttggtcttcccttcttagattcataaatacttcatatgatgtaccagcgaaagagggggatttgttgtcactttttaaagcatgcttttcctgaagcgcagttgcagtgaggaaagacttaccttgatgtgattgccccagttgagtcaagtgatttagtttcagagaacatgaggacctctctgaattcctaaaatttaaaaggatacacctcatgcagaattctgaaattgtaagaacataaatactaaagtcagtgtgcgaaaacctctgctttgtgtaaataggtacgatggaatttaggagaataagtgttttgataataattaaagattttttgaatgtttcaaacttttttctaagtaaacgtgagaaatgttgacaagcgagtactaacgaagcttactagtatgttttcccttataattgggcagagctgggttatgcatttgtgagtgatattaattttcctactaaattctgaccactttagagtttagaattacttagaattttatgaagttaatagttgtatacaacagattttctttttttttgagacaagagtttcgctcctgttgcccag

SEQ ID NO: 98941 - DNA, 1031 bp, Homo sapiens
aaataataacttctaatagcatttttgaatcggttccaatgcattgtgaaaatgcttagaattccaaagtaccatagtttttttttttaaatccaccagtaattaccaaagatatttgcatttgcagtcaccttgtatattttgtgctatgattagctttttcttaaggacaaacttcagacgattcagaggttaaatttagctaaattgttaggataggaaaaacatctaaatttttttctacatgtaatttcatcaaatttgtaccaatgtgattccctttccccagtcctattttcttcaaagcatctttcttaatgcaaaatagtattgcacctccatattcctctcttcaattttcaaacaatcccaaaggtgaatatatattaagaaattcttctacttcttttacttgtctactgacgtcactggactttaccagccaagtaactttggtaaaagttaagtcaatcaaagtatgtattactttctaaggaaatccaaacttctgtaaatctgtgaattcctaatgtagacaattgtttctggcagcctgagacatttttaatttttagaaaataatttttagaaggtatttcatgttaagactaaaaattcaatagatattattgaatgtctactacatgtgggtatcatgacaggtgttattgggaagagtgggtgtggtaaaattctagaaagaaaaaaatgatctcctccatctaagatttatatatgtatactaggggaagatagatatgtaaatgaaagtctgatacaaaccaaaatgtactgttaaaaattggaagcataatggagatatgaaggagagaaagatgaaaaccaagtgggtgagtttaagctatatttcttaactaaaagggcatttgagctagcacttgaaggaatgtagataagtgaacttcattcaaaatggacatgccgaggaaggaaaatagcataaaggaatattgaggcacaaaaatgcaggcttcatagaaaggcgagtatttgcgtgattgggacatagg

SEQ ID NO: 98942 - DNA, 1151 bp, Homo sapiens
agccttccttctcctggctattattttagaacaagtgtgaaaaagaggagacccagatttttgagaagcttggctgctctgcttggaaaataaattagcagtgagaggtagactgtaaaaccaagagggtattcagcactcctatgctcctggcaacagcggcctctgaaagaatagctaagggtaggagctatgggagtgcatgagctgaaaagaaaactgccagctattagtgattctgtaggaggtaaatgttctaagctttgatgctactgagaattctctgaaggcctgtgcaaacagccccagtgtgaggagcaggcaggcgcaggcactgagccttgcctgctgctgagctgggcttatggtattaggtacacttgatctctgcttccaaatcccactgattttctccatggagaaatttgtgtctcataaataacctctgaaataacctccgggtttgtttccaggcattgctcatctaaattcattgtactcgttcaaagcaattgtagctattttataatgcagaataagaaacccatcagggcctactttgtaggtgagttggctggagaccatgctctctttgaggttctgataggatattctcccttcacagttcaacctccctgggccctcccctttgggaaaattatcagataccagccattaactcctcctccctacagatctgagttccagctattccctagaattccctacatttaaacattttaaatgggaagggccctacagttaagggaactttagccagtagtgcaggagaacaccactgggattggaaaacatatgagtagcacttttgaaattataggtagacaaaagtcacatattgctgtctggtaatcaaggccagcctggtgctcttatctcctccagtttagattctcttgaacaccctctggggaatgagtaggctttccctggctgcacttccctctcattgggaaggagaatattggcatagtctctgctttgcaccaggagtcagtaaatgctggcctggccttggccacaagctagtatttcggcaggaagtaaatggagtggacagtgcacatacatgagatctctcaggaacactggtcttcaggcccatgatggccctcacagctcccctggac

SEQ ID NO: 98943 - DNA, 1077 bp, Homo sapiens
tcatgccagaaatagtttggggtcatgctaatccctttcttccaatattatggagaatagagattttgcaaaatggggtacatattttggtagttttgcaccctaaaacagaaaaagaggaagcattcaagggtggtgtcagtatctaatactgtgtcatagatgatggtctgggctgagaaagtaactagttgccttattatggataggaaacttttcagagaagaaaacatactgaaattatactgaagagtatggcatctgccacttctttgagttgtttggctctttctcaaatccagggcatgactttacagttcttactaataggaacatgtgttctccctctaggtccaacttcaaactggcttaaggtttgagagtaaacataactgatctcataagcatacaatctagtctccagatcataagtgtatggacaaaccagagagtagcctcttgactctggaattcaaaatgccattggtgtcaatcaagatggttacaaagttgaaggaaaatgatatctaatccagggatttgttaaataatgattaatttagaggcttctactgtgttatctcaggcatgtaaataatgtataaaacaatatgagagagagatattggtagcctctaatttgaggtgaagataacaaaactgaacgaattaatgtgcctggggtcacaaaactagtttgtaatagagctagaattgtatgttgaatttttcaaattggccgttgggatatctgaaaacagcattccatcatacatttttttttgtttcaacagtgaaagcaattattagctaatcatacctaagcctcatagtatcattgtagtttttctttccaatgagagcttgaaaatgcctatcccaaaataattcaaaaagaaaagtttctgaaactacctagcagtttttactgggtcacatctttctctctcttccactatctctacccactttccacttgctacaaacaatgcatggtctgtgctctcaaggagctcacagaccagtggaggagatcaaatcagagaacacacctgaagggtgtgataaaggaggtgc

SEQ ID NO: 98944 - DNA, 1075 bp, Homo sapiens
gggaatttctatatgcttaaatattgtttcaagaagcaagctttagctctttgccatgaaaggtacttatattttctaatctattctaatttattgttttaaaatgctggttacaaactctaattttattttacaactagtggattgaaatgaacacttcaaagaacagtagttctgattaaagtcccttgttgtatatatagcaaaagtgagtgtaaataaaaatatacttcaaagtaattttccaatgttctgcatcctgactgaggcagagaagggattagaattatgtcttctagtttaagccaagaccctttcagtcccacttgactttttgaccacactgttgagccagttccatgccttacttcatctggttccaccaaaatgttcatctgagttctctactttcactgtcgccagatccaggactgtaacacaggtcctacaactttgaacccgatcctttttgtacatgattacactttcttattcctactataaacagactaaggccatttgcaacttccattccttaacaaacatcttaattaaaaaaaaatagtggatagtattgtggggcttgtgactgtgaaaataaaaatatccttcagagtcatggagttgtgagttgtgaaaagagttattgtgagcacagttctgctgaaagtgggaaatgtgtctctcaccttccagaatcagccagttccagtatcacacagtgtagacattattttccttcaatggattcacattttcctgcttgaattacttatttaaatataactctaaaacatgataagcaaagttatagtgctgctatggaaaggactgtttaaaaggatactttatgccatatacaaaataatgaattgcatagctttttcctttatgggtttctttgtttcaaagggtgtggaattaaatttaagttttgagattctcttagatattgtggttagtaaggaattcatatttgttcattagtaatatatggaatctgggctggatatctcaaagagcccttcgtattctgggattctgtggccacagtctttctaggaagggacaaggc

SEQ ID NO: 98945 - DNA, 1035 bp, Homo sapiens
tgtgacgtgttactcctcatgcctttgagtttgatagtgccaatcagctgagacctcttagataatgaactaaagccacctctaccctagattttcatacattcattaccagcatcaccgaggcttattttaggggtggctccaaaaggtttcttttttagtcttgccacagcggcaggctgcactagcttctgagatacccattggtcaaaccaggccctttgcgtattgccaccagagttcagtcctagttccaggcctgtctggatgcttggccacccaggttatgatcattaatgcattccttgcaagacatgtgtgctctggtttctttaaagcaggatctcaattctataaagaatggctaagggcccttttgttgggggtggggtgtaaggtgctcattttaagcctccaccaaacattccagctatcaagaatttatcccagttcttttgtattttgagttggcctttttttattttggaaaccatgtcacctgacgtgacccattctctcattggcccttattatggcttgcgcttatttcagcactctttttatcttaagtggtttttaggttatgtgatccaaatttagccttgctgataacacttggctgccatttgactggcactgtgtagaagtctgtatgttttaggaagtagagtattagttcattttaatcctttaatcttcctgtaggctagatactattctgctctaacacctacatatcaggccttttttctggtgacatgcaaaacctgtagtagaaacatttggcactaatcaggtaaatgtgagtttgctttgaccttcattgccttttttttttttaacttgattttactaacttcctggaaaattatgttggctgagtaaacttttaatgatgttttttattataccatttgcttttaggtgttaattctgtgatcattcttgttttgagctgctctcgacagctggctctatggtttcatgaaggcatgctagtgggttgatgaaaccgaatcctaccatatggaatgg

SEQ ID NO: 98946 - DNA, 1077 bp, Homo sapiens
cggctgataccatgtgcttgggaacaggaaaggggacccagctataaactcctcagcagccatgccatgccctatcaccgtcatccttccccaacaccttctgaccttgataaacacagtcaggaccaagaatgtgctcatatttacatataccactccctcccataaaaatagggtaacctttaaaatcacaaacaacacagcccacactaccaacgttcttccgtcactgacagtgacaggatctagctagttctcatgctccaaaagttatatatatatacatgaactttaaagagagagggtctcactctgatgcccaggctggagtgctgtggcatcatcatagcttaccccaaactcttgtgctcaagagatcctcccacctcagccttccaaagagtccagtttattgagaaaaatattcgagttaaaagtatccctaaagataataaagctcagaatgttctttctacagacaaatagactcaggaccatacagtgtaagtaacttggttaagatgatacagctgttacatggtagagttagcaaacaaaaacaaaaataaaaaccctgatattctatctccaggttaatgttttctcccatgctatactacatcaggttgtacatgtgtaaaatgctttgtctgttttgtatctttatatacaacatgttgtacatatatgttgcatattcacatatatatgtgtccaaagactgtatgttatagatgtcattgttcattcatttgatcctcaaatatttgtaaagccattcactattttggctttactatttgctgggaatagggctaggaataagacttcgtttccacacttctgagcttatgttctagagggagaaataggcactaaacagatcaagttaattcagatagtggtaagtactcttaggaaaaattaggcagggtggaggagtttatgaacaatgtatcatactaaatttatcaaagaagctaagtagaccacactcatatttagttttattgtttttgaagtttcttttgaaaaattctattgggcaagatgccattcagcaattcacacatgttt

SEQ ID NO: 98947 - DNA, 1033 bp, Homo sapiens
atttaaatctttactactttattttcttttcctgttcactttcatggtacttaggcattcattcccccaagactgagtgaataactagttcttaatatggtataatgggattaagtattaaggttaaggatctttttgaagactttctggataccaatgtctcatatttttcagtgctcaaaagaattaatgctttttattggaatagtctttcaacatttcaaattctgggagcaatttattttatacataagactacatacaactaattaatgaaatttatttacactagtgatgtcctgtcacttattttctccaaagttattaacactggacaggaatggaataaggagaatctaccctgtctcctaaggaaagtgtgtattgctgagataatttctaccttgaagcaaagaggagcttctctagtggtcaaaaacatttatgactggtaccctgctattcttgctaattgtggtccaggaagaggatgaatagaatggggtagctcttgctacaaaatagaaactttcgagaatgtggtaacagataacatttgaattagaggctgggcatggtggctcatgcctgtaatcccagcactttgggaggctgaggtgggtggatcacctgaggtcaggagttcgagaccagcctggccatcatggcgaaaccccgtctctactaaaaatacaaaaattagctgcacgtggtggcaggcgcctgtaatcccagctactcgggaggctcaggcgggagaatcacttgaacctgacaggcagagattgcagtgagccaagatcacacccttgcactctagcctgaaagacaagagcgaaactctatctaaaaaataaaaaataaaataaaaataaaaaaattaaaaaaaaacatttgaattagaatcgtcagtgtttgatcgtttttttggtgacttaccaataagagtatagtaatagcagtagtgttagttttcttccagattaaagtaaggaggaatgaaattcatccatatgaaggaaatttttaaaaa

SEQ ID NO: 98948 - DNA, 1029 bp, Homo sapiens
gaatcataagatcccagggcagcgctttttctgaggggccaagtgaaacatcacaggtggaaacgtaccaagcaggtgcaaatgttatgacccaaaactgctactgagcagtgggagagagtttctctgttgttccagaaaagtttgagcagctaataatttgcttaatgtttgcaattgtttaggtatctttttatagtaaaaataaatccataaaatgttgcatatattgtagtcatttctctgagttccccctcaataaatactatctccagcattgccctacaggaagagacttgggatccaaagggcatgccaccttttttttttttttaaatcacaattccaggaaaatagctttgtgctatcttaaatgatgcaatggaaaaagcagttcttgggagccagagatcttgggctccaacacagcctgtgcccttcactagcagagtgaccttgggcaagtcacttaatttctctggacctatttcttcatcagtaacttgaggattttgttctaaattattctaacctcctttgcagctctaaacataggaatgttgtggagaaaatgactgatactctttaatgggtcagttgcaatgaggattctttccgaagaagctgttgacagggtcatgataaagcatgagaatagcctgttctgtccatttctagcctttggatcagacattctttatggacagactggggcctggaaggaaaacattgtttgattcaggcctgacattaacttttcttgcttcaagggggcattttcgagttttaacaaaccctaagacaaaccctcctgatcgaccagcctaagtttttggaaccatctctagactgaattatgctcctcttccttccgcctttttaaaaataaaatgtgtgtgggaatgcaaggcacctgctagttcctacatcctaaggtcagctctcagaaacatcccacccctccccacactatagagtaagctttaaccagtgcacactgtggaaattaacacatgcatcctgttggaa

SEQ ID NO: 98949 - DNA, 1067 bp, Homo sapiens
gtccctacctccgtccctccaccccccaccccccaaaaaaagctaaataaaggtactgtacctctatgggggaaaaatactcttttctggaaggaggggagggttggaaaatttatttgcacgtacctcacaattatcttcataggaaggattttgatcataaaaagctaattatgataataaaccttttaaaaaatatatctctcagtgttaaagcatttctgctttaaaaaacacaatttcagttgctaaatattcgataaaaattatgaaataagcctcactgctgtgacaaattatgttcagaccaatgggtttcctatggaagataatcactgatcataggatattagtgccattttttctacttgctgatgttttactaccaatttaaaggtggttaatatttgttataattatactacagtaaattcaattgttctctacaattgttttattaatgggctaactggaaattcatttacatttggttcatgtaatatatagaatagaaagagacgcgtttgtgggaactcactgaagtaatgctgagcaggtatgggtattattctgtcacctaagctaaattagtcttttggtgtattgtaatgaaatacactgtatgaaaaatttactccccactgaaaattcacggaacagaagaacaagctattaccaaaatctgttgctcaatgctgccatctataggagagttagagccgatttgtgtaatatgctaaggttcattttaaaagagggctaaaatagtgatttcatcacaacattgcaacagctacgttgatgtcactaatacagtcctaattcaaggagttaagggtttacatgctatggacgcactttggggcaataggtctacaactagctttaaaattgagttattggtttatgtatgatactatcaggaaaataatgcaaaatttatagattattacatatatctgtaaagtgcttgagttgggtggatgtaaaactaaacatttcaaaattataaaacactttttgtatcaaaacatatgttttccttaagatgtatgggtcataactgg

SEQ ID NO: 98950 - DNA, 1053 bp, Homo sapiens
aaaggcttctggtttgctgcaggcctgccgtcgctgtggaaagcaagtattctttcaaagaagaatagaagtgcattggtttctaaataatcccaggacgctaggatcagcatcacttgggaacttcttggaaatgcacattttggggtcttatcccaaacttactgaatcagaaatatattttaacaagccttccagttgataccaatgcacctggacgctaaagtttgagaattaatggcgtagtgataacacccattgtggaatcacatataatggaatttgaattgaagtaattcctagatggaaaaacttggacatgttacctcacagggctggaatatgaagatgcaagaaaaatgtttaacacaaaacacatagaaaaccctcaaagatgttattaagtaacttattagaactgcataaaataagtacatagtttgtgctggaaggattcttcagcggggtagatatgagctgtagcgcatggatattgggactgctgcttagagggtattttgtttacctcgggattctcaattctgtgtagtcaaggttgttggatgcaggatattcagttaaaagttaaagcagtgcatactaatgctattgtggttgtaggatttttaagaatagcattagtatttatgttgaagagtagtttttaattctttggccttctgatctcttcagctttgtttggagacagtctctttctgccacccaggctggagtgcaatggtgcaatcttggatcactgtaaccgctgcctccagggttcaaacgattctcctgcctcagcttcccaggtagctgggattacaggcgtctgccaccacgcccagctaatttttgtatttttagtagagacggtttcaccacgtttgccaagctggtcccgaactcctgacctcaggtaatccacctgcctcgtcttcagtttagttataccttctttgacccagaatttggtaaagaccagaggtaagcactagttttagagttgagaattattgtaacatagtgacttgcaagcgaaagccaaggctgaat

SEQ ID NO: 98951 - DNA, 1027 bp, Homo sapiens
agtcaccctagggggttgaagcattgtctcctctctgattatgttcaggaaataaaacaacttaactcctttgaaacaaggaacaagaagtgtgccctatgcctttctttctgtttttctctgagcctaataactctgcctcacctgtggaagatggtcagtatgttatttgttttgggtcccattgatgaccttgttaacattcagcctcttccagtaaggaagacgctaaacttttttccatcaaggagagttgataaattcctctccatttctctctgtgtgtttccatgtctctttctccatctatgtctctgcatttggggtatgtgtgggttctaaacacatacccccccaatgcagagacaacagatggagaaagattttcagtcttaagactagaattagagttcctgagctccgtgtgcagcagagcaacttgatgatccaactgagcctaaagaaaccagttgttcaggaggttgatgaccttgaatatccaggaccacaaatctaggagccgaattaggatgggcagaatcaggacaactagcaaaagtagaggtggaagcgtcacctctctgggaaatagtccctccagttattttttatcatctttgcttttttttaacctcaagtttccaaattgcctggggatcccctgcacctcgctcaccactaccaaggcctcatcttttcctctcactttggcaaaagtctctagtcccttggaatgaattaattgtgaatcttataccttcactctgtgtaatttagttaaactgacacatgagcctttttgttgttgttgctattgttgttgaaagtagtttagagcatttcctaaatctgcagttcccttcctcagccttttgcctttacctgaaaccaatgctcatgtagttcctttggatcttttaccctcaacagccagtcgtcagtgtagtaaagcttggcgtttgttgcggtggtgttggtggctttttgttggcttgttttaccttttagttcttcagccattctatcc

SEQ ID NO: 98952 - DNA, 3400 bp, Homo sapiens
ttattttttaaatttaattaatcttattttatttttagctatccactatcatagctcaccacagcctcaaagtcctaggctcaagtgatcctcctgcctcagcctcctaagtacctaggattataggtgtgtgccactgcacctggctaatttattattattattattattattattattattattattattattatttgtagagatgaggtcttgctatgttttccaggctggtcttgaattcctggcctcaagcagtcctcctacattggccttacaaaatgctgggattataggcgagagccactgagccaagcctgcagattttcttttcttattattaaattctaattaaattttacactgcatattacagatggatgttgagctaaaatgaagcattgttttggtcccttttactacttttaaaacattcaaacttcagcttatcctccaggaagcatttatgtgaaagaaaagtcactgacatctcttctaaatgttcctggtctagtgacttaagttaaaaaatattggccacgaagcagaacattgaactatttcctggcatgcctctagatcacagcctagaattttagaagatttttatttaactacttatagccatttgaggcatctggtacatgctgtggaagtgcagaatgtggaactcggctttcttgaggcaggccaggctgctggggcggctcacaggcataggggtctcgcaagggtcacagctgggaggcaggaaactgcagggcttcacggcggaacagcactgtctggtgggaagagctgagtttgagtccttatactccagcttctgggcatcatcaccttggtttctttatctgtgtaataaagtggaatttctgtctgtctttcatggtttcacaccaaaactactggaaggacttttactaaattgggcacaagatgtaatgtgtgggatgcatgtgaaatttactttcgtcccctcttgtggtgagagagtccatgtgactgcccatctgtgggaatggccttgcttattaagcacgttggacagagaaagtgaaggactgaaatttcagcatccccagaaagtctgaagggccgaagctccatggatgtacatctcacgtgggcaactctacggagtgtgctttagaatgggcagctggacagttaagtgattttcttggccggtggtgggtagacccgctaatcgataaggtggaactaatttcttctacaggattgtgagaattaagtgaaatgaagcaaattgtatgtaattacttttaaactataattgcataaaagttattattgggaggtatgtaaatattataagaccttgattcctgggatgaatagcttgaagttgatcagatgatgttgataaatatttaatatctgctaatacttatatggtacttatgtttcaggcattattctaagtgttttacctatattactcatcaacaactctatgaggtggtccttattattatttagtatctgttttataaatgaggagactgaggtagagattgattaacaacttaacctaagggccgggcgtggtggctcacacctgtaatcccagcactttaggaggctgaggcaggcggatcacccaaggttaggggttcaaaaccagactggccaacatggtgaaaccctgtctctactaaaaaatacaaaaattagctgggtatgctggcgcgcgcctgtaatcctagctactcaggaggttgaggcagaataattgcttaaacctgggaggcggaggttgcagtgagccaagatcgcagatcgcaccactgcacaccagcctgggtgacagagccagactctgtttcgaaaaaaaaaaaaaaaaaaggcgcttacctaatgtcatatagctcccaagcaattaagcaggatttgaacctaagtcatttgactccagagtccattccattaattatgacactattcatcgtttttttaaatctacttaaagatattttttccataaagagtatcactacctgagatactatgcagtgttttaaccatgaatatagaaagtcattgagtggattgaggtggggggcacaacatagtgaaattggattttaagcaaattgagtcaggtgctgtgtaagtagactaggggaagagtgtaaggtgataaaggcctgatttctgttgagatctttcagtgtataatacatgttcttattaatggcttatctgtctagaacattcttcatatgtccaatttagtggtcttaaatcccaactcctcagaggttacatattttgcctatacatgccttccacatgggtggcactgatactaaaggcaggctattataaaggacatctggacattatcccactaagggatcagaaattttgtatttgtattcatctggggagatggtgtatgaaggaaaaaaggaaggaggagcttttatgtcttaagaactctaggtttgagcttgggtatggtggctcacacctgtaatctcaatactttgggaggccaaagtgggaggattgcttgaagcaaggcgctcaagagcagcctggacaacacagcaagaccccatctctacaaaaaataaaaaactagctgggtgtggtgacacttgcatgtagtcccagcttgggaggctgcagtgggaggaccacttgagcctaggaattcaaggctgctgtgagctatgattgtaccactgcactccagcctggcagcagaatgagaccctgtctctaaaaaacaaaaaaccctctaggtttgataaattaaagtcagaaagatacagccagttgtcattagagagatagtctaatggttgtgtcaagctgggtgagaaagtttcttaatatggttataacaataaagtgtatgaagttggagaaccattgtattaaaggtctcagtaggcttcaaaaggagaaaatgctctcagttcccaatttcttctggaatacagtctaagttgtagatatttctgtgaatagatactggaatataattattgagagagtgtcacagtagtcataaagacgagattcccattaccatcctaatataatttgattccagtttttattttatatgcatgaagtcagttttcattcattttgattgtcttcatttctttgtatctctgccattaatgtgaaggaaggaaacagagatccctactctaattccctctgattttatcattaatgtagctctggaagacatttaatggattagatagccggaaaaaaatgtcatttatgtgcaactagtcatcaaataattatgctgtctaactaagattccacactatacccccaggactccctgtttactaatcaactcaggtagaatatgcattctggtaaattgaacatggtgtaatgatgt

SEQ ID NO: 98953 - DNA, 1054 bp, Homo sapiens
tgggattacaggcgtgtgccaccacacctggctaatttttatatttttagtagagttggggtttcaccatgttggccaggatggtctcgatctcttgaccttgtgatctgccggccttggcctcccaaagtgctgggattacaggcatgagccaccgcacccggccgatctaatgcttttaagccattttagctgtcaattgtcttggtagtagaactttttaaacaaaaggctttacttaacactcaaaatgtgaaatggatcagctctgaagtcttttgggttgagaagtggaatggggcccctttcaccttactcccatgttgctgtggcttcctcagaggaggcacctccacaaaaccctagagctccaggaagtacagtttcagaactgctgatttagatgaattttttcccttacagagaaggacttggaaattcggaaggttaagagacttatcaacaaacagtttgtggtagacaccagccttgtgaggattcaggccccctgactcctgtctggggctcctgcccattcatgctgcactttcttcctttggttcttttctctgctttttgtttagaaaaaggaagataagttgtgttattttttccacctcttccaccagcttcactttccttaatctgtcttgtgcaactggaaatgcataatgtttgtttttactgtgggactggacgttggcaaagggtgagattcaggaaggttcagaaagaaggaagatttctatttgctactgttctttacagacagtttttattttggttttgatttgtgtgactgtgctgggtgtcttaccttatttgagagtattctcatggggctgtgtgtcagcccggtaactccaggtccttctttaatgctaatttcccatcacgggcagccactggcagctggcccataaatgacagtgacgtggcccctgagtaccactcatttacaattgtattgctacttttgacagttccacgaagaaagcctaacaaaatcttcaaagttttctttgagaaagcatccggtaatgtctgtccctta

SEQ ID NO: 98954 - DNA, 1029 bp, Homo sapiens
ataacagtgcgtttaatattcttatgcaactatttctgaagtgctttttatgcatttcattttttagggttccccccaacttacatggaaaagggatggttgcatttctgtgtcatatgcatattctttgtggaggcaccggtaattctgagcttgggaagtaaatgaaatttcctgtctttgaacttaaagtcttttgatttttaagatttgactgctttgaatgataaacttctaatatacaagcatctacttacacatgtatccaaataaagactacgctaaacactggcccaggaaacctaagcagtgaatgcttctttgagatggatctcggaagaatggctgaaactagagctctctttgcaatgcattgttatttgcttgatggttgtcaattagaattttcattgggaaaacactgtaaatctttagaacaaagcttgctttattgcaggactgtatgggctgcccttcgggaggaaaaaaaatctgccaaagcaaacatttggtggacctctgtgttttatgaaagccacggaattagtaatttcccccagttacagagttttatgaaggaaagccaccccaaataggcatcgtgaggagtatgaggcatgtggacttgatgccagagtgaagcaatctccctcattcacgtggtgcttttgcttctcacagtgtctgtgtgtacttacttcagaggttgctctgcttcacatccggctttccattttccttcgtgtcctgagaccctgataggtgatagtgtctgaaggggtgtcccaggagggagatgtgcaggccacctctggtgcctccttcctagaccaggcttctgtcccttcccacctcctacccccaccaagattctgttgatgggaggaagggggatatgttgcctggttttaccttctagcgagattatgaacctctgtgtgttctcgtctgagccttaggctatctagacagaaaaccaaagtggagaatcatgaacatcacccagagtaagacagccactcagcgact

SEQ ID NO: 98955 - DNA, 1111 bp, Homo sapiens
atacggaggaggctaggtccactttgaggatgatgtatattttgggagagaataactttttctgttctaagactgttttaaaagagtcgctgttggtttggagtttttaaaagttgttgactaatattataaaaacttttctttttaaaagaaagcatcactgagatatgatccagtcagtatttataatataattattaaaatgtctttgagtttctctgatgtgttctaattgcatctgtagttgtagatttcattcaatgagttcttacccagagaacattcaattatagtgtcagtttgttgagggcttatgatcctgtaatttttgagggagaattcctcagtgtaactgacattgaacagattttgatggaccagttaattttagttaaagggtggtataaattcactgcgtgatatataccaagtaatttgaactctcaacagagggtcacatttcctcctctttcaggcagttttgtgaagtgtgatgcaccagtaggtaaaaatactttaggacttgctaatgaaagacagtgtgtacagaatctgcttttctagcacatatttttatagatgttgaaaatgctcttgtcaaacagtattttaaaaactgtcaggtgtatgtgtgtttttcaaatgagttttaaataattcagtactatgcaggcagcagaaaaatgactttataaacttgcaatgctcttttgtattgaatgtgcaagtagagtctatgaattaaaaatgaatactatctgatccatctttttactaataaccaatgtagtgttgatggaaatttattgtttactaatgtttggtatttttccattaaagaataaccttaaagtcatttaaacagatacaacacgtatgcagatggtgaagtagttttctaatagaagtcctgtctggtttatacagcttgatggccgactcagggtggcctccttcccttttcttccctactatgagctgctgaatcggaagtgaggacatgttagacatggaagatagtttacttctagtgagtaagtgttagattccttagtgcttgcccatacagccacgtagttggtgagcagcattggtggaatatttaaacttc

SEQ ID NO: 98956 - DNA, 1096 bp, Homo sapiens
gaagaaatacctgagacagagtaatttataaagaaaagaggtttaattgactcacagttccacattgctggggaggcctcaagaagcttacaatcatggtggaaggcaaaggagaagcaggcacgttcttcgcagggtggcaggacagagtaagtgcaagcaggggaaatgccagaggcttataaaaccatcagatctcatgagacctcactcactatcacgagaacagcatggaagaaaccgcccctgtgatctaattaccaccgtgtggggattatgaggattacaattcaagatgagatttgggtgggggcacatccaaaccctctcagtggtttttgctcttctttcaggcatgtaaggcattattccataggctatctaggggagaaggatctgggcagcctttcatacatttcctggagtgggtgctgttcttttcccacaggactgtaccatagtgataaaggatgctttctctggactctccctagtctctcttgtgagaccagatgaggttctgagaaaacctgaaagtgggtgtgaatttctttatatcatagccctccggggattctgggttcccttgctggcttacagtcagcctttaccaatcttcttacaatttggccgaaattttttcactggtgtccagcagagactgtcctaggtgaggaagtgctcatgtgtcattttagatttatatttgtttagttggctgatctgctacctcaggtctttgatgggttcaagaaaagttattaggtagtctctctgagcctactctggcttgggaggctgcccaattaaaaaaaacaagttaatttaaggattatgtagcatttatgttttttataaggatgaaagtgatgccctttccagctttctacatcccaagaggaagctaggagcattccttattcttcactggggtttgaattatcatttcttgcatactatttatcaattttgttttcttacataaagaggatttttccatcatgaaatagatagaaactatagtttctttttaaaagtctgggtaaatctctcttggattccaaggttttagactaaggagttaatgtaatagtta

SEQ ID NO: 98957 - DNA, 1069 bp, Homo sapiens
agtcatgcattacataatgtttcgctcagcaacagaccacatatgtgacagtggtcccataacattataaaactatatttttattataccttttctatgtttagatacacaaatacttaccattgcattacacttgcttatggtattcaccacagaaacatgctatagaggtttgtagcctaggagcaataggctataccatatagcctatatgtgtagtaggctatgccatgtaggtttgtgtaactacactttataatgactgcacaatgacaaaattgcctaatgacacattttttcagaacatatccctgtggttaagtgatgcatgactgtcctctcaaacttttctttagttaaataaattgtaagggtacattgaaaaatcaaggtagctagcaacttttaacctcagaatttgctattatcgtatttcataatagtacctggccataattacaagtcctaaagatcatgccaggaataataatgcctaagttgcctttgtagaagaaatattgaaatttatattatttcaaggggcttgaacatttactactactaacaaaaatcttgtcttgttctgttggcagtctcagcttttataaatgaatccaagaggcagctgataccacagtaatagaaaaattttggaaaggagccatgtttttctttgagtcaaaaggcagatgccaactaggaacattagctccttgcattttttttctcccccaaccccacatccctctgtgcataatttatgcctttttcttttctttttttttttaaatagcctgccaccaggttaagttggtgctgggtacaaagctctgtccttttcaatttctatctgccagcgtgcagcatgggtactggttgaagccggaaatccttactgacatgtggagtaacttgtgcttcttttcttagattcttctgaaaggcaaatggccacaatcacactttggctgtcttgtgaaaaaatcaagcagaattgtcacccccagctctgcactacacagttgaggttgctaggtagcatatatgaaactatggtggaatatactac

SEQ ID NO: 98958 - DNA, 1006 bp, Homo sapiens
ttcttggtctgtaggcccacctgtgcagtggacttctggatttctctgtgtgctctgaggaagggatccaagtggccattgttgacaggccattggcctgtgttgacagcttgtttctgttatgcctttgctcagtatagtcttgctggtggtagcgacagggggaagtgaaagaccactgagtgcctcttaaatcagttgtcattttggcagattcaatctaaaccaaggatgacttccatatgcaatggctgtgcaggatgttttggcccaagcaaataatacttaatcagcagtgtggttcatcttattactctaaggagaaaataacctactaccaaattctactctattgtagataggattttttaaaacgaaaataaaaacatctgctgttttgtagctgcttgaacctgaggctctgtgcccctagaggagcagcggttgtacaattgctgtgcgttctgtgtctcttagaccttgccaccaggctagggggacactgtcagagttaataagcaattaggacgttctgtcctgtcaattaactggcagaataatgagaccgcaggagcactctccttaaaaatgccgagacttgtgttctgaaaagcgtgtctttctctgctgtttgcagttacacgaatagacaactacttaacacttaaaaaaatacagtgaaaattatacctacagcaaacagaaaagagaggtatacaaatgggatatcattcactctaaactcagaattcatagattttcctcctgagtggctgtagtgatattataatattttctgtcaccttatttggcttaaagattgacagaatacttaggtagtgaacatcctttgttgtataaatcaatgtttaaagtctaagttttggacaatctgggtattgatgccaaatttgaattagtgagttcctggccatggtctattgatggatttttgtttccccttgaatgtgatgagaccttagtgaaggattttcatagaggagcg

SEQ ID NO: 98959 - DNA, 1032 bp, Homo sapiens
agggagggagggagagggggtggagggaactagtaaggcatcaacaaaaatagctactacctataaactaatgctaaccaaagagaagggcagcagatggttgggaatgtttagggatggggtgggatgggacaggtggatggatggatgaaaggaaagtggtaatggtttccttatttgtctccatgatgaaaaaagaagccattaagaccaactttcatcacattccagttcttattggaattgatgcaattaagaaaatgtaaaatagcgtgttttttgtgtattctttaggcttgagtctttacttttgaggaatgttaacacaatacggtgaattttaatgattactgcttgtgttcctttcagaaaaatgccttttaacatgtttcttattagagaggaatgaaatttttttttcaggtctttagtggttaggaaagttgcagttcacatgagcaccagttagagacgattataacccaacggtgtggttgtgccatttaaggagagctcagctgacactttttgaaattgtggaaaaatgttagtttgagagccaaatggcagcggtttggccctagaagaattacacagagttctcagtaatatagttattctaaggccttagaaatggcctggcccagactgccttggcactctgcaccctggaaagagaggttgttatgagctcagagccacatggcctctcaatccctgggcttatcctggaatctatatcattacactccccattcaaagctgtttctaccttatcacctaagtttgttttaactataatatacaatcaaaaaagttaagttcttcaggaagcagtaaggcacgtgctgaccatcgtgagctattctccagctaccttaaaggattgtcagtaagatcctctggtacttacattcgctttgagaagcatctgtgaacaactacagagaggtgggaagatcattattttaaaacttattttaagttttaatgggttccagcgatcattttggtgatgcgttcttaagaccc

SEQ ID NO: 98960 - DNA, 1001 bp, Homo sapiens
gaatgggttctcctgcagagcctccagaaggaaccaaccctgccaacaaccttgatgtcagacttctggcttcccaaattgcaagagaataaagttctgttgttttaaggaactcagtttgcaataatttgttatagcaaccctaggaaactgatacaagcatcaagggtaaaagcagaaggccagtaggagtccattgcagtaatccaggcaagagaggactgcggctccacttagtagctgtggaggaggtgtgaagaggtcagcttctggacacattttgcagtaaaatgaaaggattttttgacagaatgcctgcaattgtgagagagagaagtgaagaatgactaaggtttttggccaaaaccactggaaagttgaaagtagttcaggtttacaggaattagagttcagtctcagaggtgtatacattgagagaattagtagagctccatgtgccatcatcctggagccctgttgacttttagggatggcaccatgtttgagaggctacagaggagacccagagccagtaagcaagacatagagtttatagagaggacttacagcatagtccagtggcagcgggctagacaggagaaccgcaattgcttgaaaaagcacgaagtttatagcaaagacacaatgaaaaaaaaaacatgggccgatatcactgatgaacatagacagaaaaatcctcaaaaaaatactagcaaactgaatatagcagcacatcaaaaagttaatttaccatgatcaagtaggcatcattcctggggtataaggttggttcaacatacgcaaatcaataaatgtgactcgccacataaaaaccatatgattgtctcaataaattgctagtttttccagcattatttgggtgagtagttaactactctcctaaataaatagatccttgatgctactcatcttggagctatggagagttccccaggtgagaagcaggtcaatcacaagaaatgcctgcaatttggaccatc

SEQ ID NO: 98961 - DNA, 1014 bp, Homo sapiens
agactacaggcataggccaccacattctttttaattttttttttttttggtagaaatgggagtggggtgggttgtggggaggttgggagcatgggagatctactgcaccagaagctttgcgtgtgagacccgggattatgtgttttaataagctctgcagatgattctgttgtacaataaaatttgagaaccattgctgggtcccactctcagagttcatgatttagttgttctgggatgaggtctgagaatttgcttttctaacaaattccctgatgatgctgtgatgcagatctggaaatcatctgagaacctgttatagaagatggaccaactctttgtgaagtggcccccgttcccaagagtaaattgcataaatcccacataacaaatatttcaagtcaggatctcccaagtgtaccctccatacttgatgaaaatcttcctagcttttttcccatgatctggtaacaaactgtgtctggcttataggagggctgttaagtacttgttgaattaataaagagattatataaatcagcctgaataaaatatctgaagttgagaattctttttttctttattttattattattatactttaaattttagggtacatgtgcacaatgtgcaggtttgttacatatgtatacatgtgccatgttggtgtgctgcacccattaactcgtcatttaacattaggtatatctcctaatgctatccctcccccctcccttatcccacctctaactttctgcatgtgatggctttttggccttcatgataacctattagtggaattccacttttctgatccgtaattctacaactcgttgtagaagtcattgttgtagtaatttttctgtctgtagcttgataaattttaattgttatagtggaaagaaggtaattcttaactagagaagagtgtagtatgtccacacccccaagaggcatttgcaaatgtgtgtgtgagagggcttttgggttgttgaaatgataggagtcagggta

SEQ ID NO: 98962 - DNA, 1029 bp, Homo sapiens
agtcaaaccaagttctgagtgtccttagacagcagtgtgcactctgaaccaggcatcaggcacagtcagaatgagagctagatgggccttttatctcacttccgcccttctgatgctctcctgggggttggggtgggggagggggaggaggggcagaagcaaagaggaggattgggggcaagtacaagtggggggtttgagtgaaaatgtgagccagtaaccagtaccacctgattaggcctaacatagatcattttgagtattactgcatccaggattgattgtcttattaccatagattatgtctgtttatctcctctgatttggagttagcatatttaggaggctccggatcattcctgcaaagcactcactaacacgaggcagcatgcacaatagcaggaggaaattcaggattagaactggttaaactatctacattcatatccatatctgtatctatatctctcccagtgccttgtcagtctcctctgctctggaagaattctgatatgacatagaaactgctagatgctggcaaataactcctgggtttcgggccatctagacaataaacaactccataatattcaatgcagcagcctctgtagcgcccatctgtttcaaaataaccctaattctgcttacgatgcggaatgctttgttgactggaatttgtcctagttttcttcagcagatttaatgtcataggcctctggttccacctgctggcagatataaataccagaatgaaactcgggtggatatgttcagttgcaagaaaaatccgagctgtagctcaatggttctcaaaggctgatgtacatcggagtcacccgggagctcattaaaactacagcggcctgggctctgtgggaagcccacccaatcagcaactatttcttaaacagccctcctggtgattcacacacccacaccaacgttagcagaccccacttcacctggaatgaggggtgcagaacccagcaaggttagggatgattccagaccactatatcctactcatgc

SEQ ID NO: 98963 - DNA, 1065 bp, Homo sapiens
ttacactcatggggacacctcctaccaccccaaggaagcttgtccagattctttcctgtgtgctgaacaaatgtgagtacatatcagaaacacaaagataagacccttcgagaaagcctgcaaaggatgctggaggttaaggagagaggtagtagatcatatgacacaagtggaaactatagaaacaatttgacacatgaatgcaaaggtggggaagtagaagacagagtgtacctgagactgagtggacagccaggaagccttgtgccgagtgtggctccaacgcagagcacacacacagtagtcggtgtaggttaggggctgacatcaactttgtgattctcttcgaaataagtttttatgcttaaaaacattctcctcagatcaactcatattcaaaacagtgtagttttcagagttggaaacaaagcaattcggccattcttcagagagtaagatggcttttgtatcaataacactgagttggaaggatttaaaatacccttaagagctggcatgattacaaatcgggcattattgtggtttgggttgtattgttatacccaaggtcttcttggttctagaaagccgaaccatgctagtagccagtggaatttaaggagacccacgtgggaactttagagttacgtctttgatatcagcagagtcccacagaattgagaacttagactggaacttcttatttttctgttttcagatagcagtgagcttcccacatgtccatatccatgaagaaaagggacactgggtttgggcaggaagggcgggaatggtgagaggtgcaaccctgaacacttgcggtgtgagaaccgatggccacgtggggaagtgggaaaagactcagaaggttcgctgttcttcatgctagctcagtgacctcagatgtgtccctaacaccttctgagcctctgtttcctcttctgcaaaactgagatgattctattgggagtgaaagctaagtggagaagtgtaccttgaaagggctttataaagaagagtgtgatgattattcttctcatgacatgagttttctacttcagcatg

SEQ ID NO: 98964 - DNA, 1049 bp, Homo sapiens
ttcattacctttaggttgctggttccttgagatcaaggactatgtatttttctccctttattactactcatgatgcctgggagaatgctttcttatgtagtgattgaaattcttgtatcattacaaactgtgtttttggtaagtttgcatccctaagaaactcttttcagtaacgatttccacagtccttcatatgatcttgaaatatgatgcctacatctttgtttacctgcccagatattgatcagtatggtaactctgctccagtggttgcttgtgtgtttcaatcacgcatgattcttattggccacattggggcaggaggcggcacattagagggaagaaaaggagcacccaaaggctgatcagaagaagccaaaccagcctagttggtggggaagttagtaaaggtggcaacaagttatatatgggcataaaaaaaaaaagacaataagcccttgagatactgtgtaagcctaaatgatgcaaattatggagcacgatggaaggaaaaatacaagtgggaagattatcaagaagcctcaaaatgagtcaaatcagattcatggctgaaccactctaaaaatatttacttgacgttgaaatttagtactgacagctgaagttgaaaaatctttgttatatttctgttttgtgttaaaatgaagatgacacccaagctatcactttgttcccttggaatcctagggtacacatgccttgtcacgtcagaatgattgatttttcctttggctttctcactacaggaaataccagaaatagcccaccaccctacgggtttcatctctcaccagaagaaatgaggagacagcggcttcacagattcgatagccagtgaggtggcatcttgggaagacatggcctattcgtgtaattattgcccatttggctcattccccaagcccctaattcattttaattcattttaaacaaaagcagagtacaccggtattgctccagatcgctcacatcacctgggacagtcccatggcccctatgagtcaactcacagcttgcggggagtgggc

SEQ ID NO: 98965 - DNA, 1063 bp, Homo sapiens
tttttccgttgatacattcagcaaatttggagcacattgaccatggagttttgtgtccaaatccaatctgaatttacctggaagaggccttgacacctgcatggaaatgagctaagaaaaccactggagccttgggagctctttggcctcctggctggcccagtaatatctgagctcctttggttaatttataactgatataaaactacatcttctttataatataaattgtacctgtgagtctagaagctttaaatgtgtttaaattaaaatattcaagctaaatgttactgctctctcccaaattctgtaagtttgactcccgttaccccaattagaagtaacttctttgtttcatgccacttttatagcatttggtaattctgctataacacatcttgcccctattattaactgtgcacagctacacaaaggtgtgccttctacgtgggaacatggattgtgaatgactctgtaatgaggcctgagtcttagttatctttccactcactccccgtctcccctttccaaccccaaaggctcacgataggggctcactaaatgtcagtgtttcaccaaagtattttttccattgtattaagagtccagtcactgtatatggaagtattttattttttatttttttatatcacttgagtccactagtagtacttccttgctctgtttgacttgtcagatacaaagacacgggattagattttgggtggtaaaattgtgatacgcatggctgttgatggagtggaacatcttagtgatgtgagaaaggtcattttagttataaatgtaaaccaattactttagcacaacaataaagatgttctggaaattattataattattttagttaatggacttgcctgtaacaagtgcttatgtttggaatgtccattttattttattttcctctacaataaggaatccctaaagttatgccaacaaactggaattggattgagaaagacaaaagcaagtgagcaagtgtattagactaattatctctagtagggaataagcacttagagctaattttttaatttggttt

SEQ ID NO: 98966 - DNA, 1042 bp, Homo sapiens
tgtcattgaaaaaaatgaattggcagtaatgtgttcaactctgtgctaggcattaggcatacaaaaacgagtcaagcatggtccctgccctcaaggggcttgcattttggcaatggaatgaaggaagtgcactgagacattaaagaagcaatggggaacggagaaaatgaggacagccccgtgcactgcacaagagcagcagaagggagcctaagtttcccccagggaattcacctcccacgcagggtaaactgaccccagggaggacatcactggtgaagcaggagcaaagtcgaagaggtgctgggagtgtctgcagagctgcacacagttcatcatgacaggaaatactcctagagggaaccctcgaacagtccccactggacctttcaccccataggaagtcatttggacttcatgggcagcggagtcacagaaggattctaatccagagggtgacaaaatcaagtttgggtggatcttagatggcaactgggatttgaaactaaggcaccaactgggagatgcctactgcaagggtggaggtggaaaacaaaggctgtgtgagacgggcacggggctaaagaggaggtagccatccaaagcagcgatgactcagctttcaatgtggggagtgtgagagcagaacgaaagggccactcatagcatggaaacctgcctggatgaatgggctccactcactgagaatcagaacccagaaggaagcatcccagatttccagcacgggcacagaacagaacagttcccattagggcaatctaggcacgttccagtctacaaggttggtggggaggcagggagagaagggtttgataaggatcatctccaataatgggttaggagaacaacttaaaagctttgttcatcacctccacagagaaagggtaattgaaggcacattgatatataaccaggtgaagaaaataatggtttaaggtaacaggatcttctattccaagaagttatttttccgcccttttgatcctttaaaatacttttgtaaaattagagggcagtgtta

SEQ ID NO: 98967 - DNA, 2873 bp, Homo sapiens
taatttttaattttatatttttaaagtccaagcagctttccctcaaattgatgaggaaattttaagtttaaattttattgcaggcatttttttagttacaagcagcatgcatgtttacgcagagagtatgtgtgtatgtgtgtgtacacatttgtgttgtaattctataataatttaaaaaatttgctcctaagcaatatcctcaaggtacaatttcagctgataattaagaaggcattttgttgaggaagacattttctttcatcttttatttttgctttgtatgtgttcagtacttgcaaatgagaagtttcctttcgctctttctataaggtattgtcttctaacttcactgcgtagaggagactgacattttaacagtcagccctgtctttaaatttttctcccacagggtgagcagggcagcatttccttctcccactgctgctgagatggcagaaattagtcgaattcagtacgaaatggaatatactgaaggcattagtcagcgaatgagggtcccagaaaagttaaaagtagcaccgccaaacgctgacctggaacaaggattccaagaaggagttccaaatgctagtgtgataatgcaagttccggagaggattgttgtagcaggtatttcacctttacttagaaggttgcctgttaaatctttgttttatatgtttctatgaaaacttttgagtttttctaaatgttatttagaaaaggagttggaaaatgcaactttatacttttgaaatttctattcattattatagtctgaattgcaaacagtattttttagtaattcaactaattattgaggttttacacacataaaatgtatacatttttaagtgtgtacttgatgagttttgacaaaagtgaacacccatataaccaccaccacagtccaaatagagaccatttttgttactctgcaaggttcctttgtgcctctttctcactcagtccctacccctcaactctaggcaaccatgatctcctttctatagccagagaatagatttgtctttcctagagtttcatgtaaatggaatcatagagtatatactcttatctgtcttcttttgttcagtgtaatgtttttgagattcttctgttgttgcatatatcagttgttcattcagttttattgctgggtaatatttcagtttggatacaccataatttgtttttccttcatcttcattcgttgattgctttttgtttgaagctgttaggattaaagccactgtgaatattcaggttcaagtctttgtgaggacatatggtttcatatctttaggagtgaaattgctggattatatacaagttattttcaactttgaaaaactgctaaactgttttccaaattcttgtactatgttgcattccatcagtgatgaataagttacagttgctccacatccttgccaacattttgtattgtcagtctttttaattttagctgtttgagtgggcgtgtagtgccatcttgcgatgttaattctatttccctgattattaataattttgaacatctgctcatgtgctttttgtccatttatatatatttgttgtgaagtatctattcaaatgttgtgtcagtttaaaaaattggctgttgtaagagttttaaatattctagatatcagttttttggttatatattgtacattgcataatttcttatttctgtatgacagtgataaatattagtgaaatgtcaatacgctggaagcattttttttttttttttttttttttttttttgagacggagtctcgctctgtcgcccaggctggagtgcagtggcgggatctcggctcactgcaagctccgcctcccgggttcacgccattctcctgcctcagcctcccaagtagctgggactacaggcgcccgccactacgcccggctaatttttttgtatttttagtagagacggggtttcaccgttttagccgggatggtctcgatctcttgacctcgtgatccgcccgcctcggcctcccaaagtgctgggattacaggcgtgagccaccgcgcccggcctggaagcatattttgaaagaaactaatgcttattgggtggtataattcaaaagcagaagaaggtaaatacattttaacaaaaatcactgtctttttaaaaaacctcccgcttttctcttctttgtctcttttcttgaaaactcctaggaaataatgaagatgtttcattttcaagaccagcagatcttgaccttattcagtcaactccctttaaacccctggcactgaaaacaccacctcgtgtacttacgctgagtgaaagaccactagattttctggatttagaaagacctcctacaacccctcaaaatgaagaagtaagtagaactttagtatcaccggaatttgaaataatgtagacaaaggtaaaagagaagagcaaagaggctttatcatatctttagcaatatgtcatgaaagctttccatatggaacattactaataattctaatttacaaatgtgccaaataagttattatgctatttttaaaatttgaatattatgttttaggaaaaatgtaagttttgtggtaagtattattaagttcctgtggtttgaagaaagagcctttatgggtaggtgttacttgttaaataataagaaaatgttgggaagtttagcaataagaagtaaatgtatcactttgttataaaatcagtctagcaaacagggcaaagaaaaccctttttcgcttgacactacccattctcgctacttgattaaaagtttctactgagctactctactgcatcacgttaatgtgccagttgacctaaatgtagcagtgtagactaacaaggtgttagtaacaga

SEQ ID NO: 98968 - DNA, 1104 bp, Homo sapiens
tggtgattctgtctgctgggaactaacaaagcaactgttcaataaaccatgtgatctgggcatgaaatacaaaatgcccaagtcatgacagttttcagtgttcctacagtagactaggcagtgtgaatgaggagaaagaagctgtaacactgacattaccagctcttctcaaaaaggaatccgaactggagccagtggggaaggatcttccagagaacaagaaagaagaactgtaaagaaagagttggaaaatgctgcctgtaagaagatttgacacaaccttgaacagtgtgactaagtcaaagatgtggactctgccgttaaatcctatcaatcaagccgtgatatgctttgaaaaaatcagctacaataaaccctaagagctttgtgagaaggccattgaagttggaagaaaaaacagactggtctaaagatagagagtaaaagcttttgcccaagttggcatctcttacttcaaagaggagaaatacgagaatactattcatttctataataaatctttggaagagcactgaaccccagatatacacaagaatcgtcaatagttaggaattaatctggaaagagcaaaatcagttggcatatataaaatctgacctgattttggaggagaagagtaaaggcattgagtggtttcagaaatggaactatctccaagccatgccagctttatacagaagccatcaaatggcatcctccacaggatgccaaattctacagcagttatatccaaagtgtacagccagagctggaggagtagaagaaatatctagctagatccacccttaacacagattatacttagaaagcagcagccttagaatctgaaggatgacacaaaagccatgaatgtctagcagaaggccctagacctgtaattctaccgtaaagaagtagcagatggttattggtgcccagttcaattgatatgacaacgctaaggatgtgaagcaaaaaaccatagctatatgacatatcctaaaacaaatgcagaagggctcccagggactcagtgaatatttaaaagggtcctgtggaagcttagaaaatcaagaacttcatgaatatgggtctgatcacact

SEQ ID NO: 98969 - DNA, 3948 bp, Homo sapiens
tagaagccaggaaggtttatttataatacagatgctctccatttcctatatgtgcctgtaaacacttttataaattgttcttataaataagtatataccataaggttaaacaaataataattgtaccaagtaaaattgatacttaaaaagaaactagagtagcgttcttaaagtaaatagacattcctgtttatctgcattatagtaagtagggtgtgtgtgtgtgtgtgtcttgttttgtttttaaagcaagtctgtcagtaatacactgcctggcagcaattcttggttgccttttcttagttcgttgtaagttttttgagtagccttgtatcgaggttcttttgatgctaagcagctactagcctactaagaatatttctatttccttccctctctttgtgccttaacagatccgagcagttggcagactaaaaagagagcggtctatgagtgaaaatgctgttcgccaaaatggacagctggtcagaaatgattctctgtgagtagaagcactagcattttatctcgtttgtaagttttctcaggatattttctgtacccatgtttttctaaataattacttcatgtagtttttaaaatttgttttacatcaattttatatttttgtaatactttttgtaatcttaaaatctggccattttgttggtcctgagaatttttcagtcaccttatcctttcctgtgtagtatgatttgctaattaagttgtcataagatggtgaactggtcctttccagctttgcttctaatgagctatgttaaacagtgtagcaagacaaatagaatttttttctttccaaaagtattttttagctttctcccttacgattcattgaattttttggtccttttcattttcagaacatacaagtatgttgtttaaaagactatttgtttaaacctttctttttcatttggttgtattatcaaattctgatcttaaagctaccacaagattattaatgtcagtgcttttttacttttttattaaaattaatggatttttacaaacaaaatgttcttcgaaaactggtcagaattttaatcagaaagtcattgtcagtagtggctttttaaatataaattaatatttcttcctcattaatgttttggccaattttcgtaaactcatgaaccacatgtgatggcaagtatcatgtaagcgtctgtggaaactgaaagaatcaggagatgatacatctcttctgagagctagcaaatctaaatagaagcaaagcatttaattttatttacaaaataactagaggacaatacagtgatttatattacagcatattaatctctagtttggacctctctaaagagtataggggtacagaaggggttttgttggggttagggtcattgatattaaaggtagagagaggttttttttttttcaaatccttgctttgaaagaacaaggaagttctaatttctatataaattatttgcttgccttactgaaattccattctcttgtgttaggtgaaaggagaactaaaactgctctgatttcttatagaatattgaaatatctcctaaggtagttaaaattattctgaaaggctgtgtaggaagagagcaggttaaaatgaatatatatctccttcagggaatgcttatgcaagattcaaccattagtaatataaaattttttgattgtgttttccctaaaggtatctggttagcagtgatgtcagcaggcccatgaaatccattttttctagactatttccaaatgtattacacaaacggtaaagaggctgtatcatttatggctaaggtggcttcttgatctgctttagagtgattaaacatacactcaagagctttaattattttctttttgtaacattatcctaaggcaacaaagatttctagtaagcttttccactttataaagatgtggcttactatttaggttcttagctactttgacattttatattaataaaaacaagattattgtaatatagcaccactcttattttttctcccgaagtatatattatttatagctgcattcagctgaagagaaaggaaacccctttattatgtacgaaaaccagtccagtgaagtataatttagagtagatgatatagatgtttttgtatttactcaataacataagttcctcataacagaaaagatttacagtgttaactaatacttgattttctttttttttctttaagttgctttaatgacattttctaaatttttagtaaaactgaaaatctcatttttgatagtaaaagtaatgaatctttatacattttcacagtgaaacacttaacattgcttaaccatatttttcattatggttgtaaagtatattaccatgttatgtatgtattttgttaataatgtaactttgccctttcttttcctactgttgttaattttataatttacaatttatctttaagaatctacatcttactaactttagaattttgtataatgaacatattattcagtgttgttaacgtagtgaggaaaaaacaattgatataatacctctattaaaataattattaaactcttactatctttacctactttagtgttttctttgtaacatgaaattgttgtgcgtcatagtgcatgaaactttgcctgtctccactttattttattccatggctttaagaataaaagtgcgaacgggtatgagagcaggagcactagcctttgttttcttaattacttcgaagaggcaataagattgtggtcagctattagcgcaaaagtgaattctaaacagtaaaatcagatctagctttttctttgtgttataaaagctgaatatgtaaaagaagcataattattatttaaggtggcacagatcagattctgccccaagaaataaaatttcaaggttccaggcaccgatttctgcaccggagtacacgtaagattttatctgctctgcttttgacaagtagttgttttgattttgaaggattatgttaatactaatctattcaccaggtaattgacgtatgctatcctaattatcttcctgtttggctttttagtacctctgtttcaggatttctcaaactgtcattatatgctttattaaggaaaaaaaaaaactagaccatctaaggaagttgtatatgattttgcatgtgttggtgaaaggaacctgaaatataatatgcacataaggaccaagcatccttttttgtttattttgctttggttggtataatagttctcaacagattcaacgtcacctggtgcagtgatcccaatttttttttttttaatttcagcgcactgtcttttcttcttctatcttgtttctgaaggagaatggagcataagtgtggtttgtcatttattttataatcccatagatgaaaacgatgcttggaagcacttttttgctattattaaacccactctttccatgtgacaaaataaggtatgagaatgactcactcatggagcacaacgttttggtatataatacaggtattcaatagctaatacacttcttaagcaacagaagaaactgcaccgaaagccaacagttttcctcttattctggttctattattatgcttccaggaactattcagttgccatagatagtggcaatatattaaaatttcctctgtatttacaattccaagagaaattaatatatttgtgttttagtgaaaattttttctctttattgttttaccctattttttggaagagtgatacctcaccgaagaggttaaattcacaggttgggaaacattattcctatgaaaactcaaagaggtacttgattttgaacttacttttaataatgatatagttatgccaagtaaatttttatttaaattttaattctgacaattggctggtgtttttttggttgttttgtttttttcttttgagacggagtctcactgtgac

SEQ ID NO: 98970 - DNA, 2780 bp, Homo sapiens
gattaagattattgtcactaagaagcccagaaatggttatcagccattgataatttaagaagtgtccttgccttcttttgctgtattcacagatttgggaatatttttatgctttagtcatttaactagagaacatatgcttactataattaaacaatcaaaatgctttgttaccattttctaagactaattcatccttaaatcagtgtcatttattcgtcataaacttcaacttcattggctttacgaagtgtttgaaatggtgtttttatggaatcacacttttgattcatgtgtttaaactttgacatctgtatgtgagaattccctgtcctactcttctaatcatccataagtcgacagcagtgttgtttcttagaagttggtttattgaattggaatataaacacgaagtaaagaatgctgcttctccatgggaggggttgaacacattcattgctgtagttctcttccctctctacagttctttcatattcagtttatttattttgatgtttagggttacaaagttataagtgctgccttgtagctagtttttggaaacaattcaaaatatttattctttgactgttttcttgtggggagagtgaagggtgggaaaggggcaagaacactaagaaaattaagataaagactgctcagctgaagttttataaaaatctgacttgagtgtttttctcttcatttgctgtgcttgtgtaaacagtgtgacaccatcgccacaacaggctcgggtctgtcctccccatatgttacctgaagatggagctaatctttcctctgctcgtggcattttgtcgcttatccagtcttctactcgtagggcataccagcagatcttggatgtgctggatgaaaatcgcaggtgattggccatccgtgactcttgacagctttattgcatattttttggcctcttgtttagtggactgtggtgtctttcttttctgtttttaccttctagcctctttctaagatgcaatgatttgaaacagcttgctttactttcttttaatttgaaattattgtccaaaattcacatttcacaagattacattagctttccttctgtcagggagagtatacatagaaagtgtagtgatttttttcaaaggcttttctagcctactctaagtacttgattccacttagggatatgccaaggggccccgtcccattggattgagtgttagactgaagtttactagtcctcgttagtcttttgatttaatcatttatgctgctgatatgattggattaataaagcaaatctgaggaggtgatgtcagcgcagctgccaggacacttttttcctttcctctcagctacggatttctaggcttgttttgaaaattccaggtgctatcatctttttgataatactgatatttttcagtgttgataatttatctcacttttgaacatctccaggtaaaatcatcagtagtatacttagacttattcatacaaataatttttttgcagttatctcaagtactttttgtccttgctttattactacataatgttttaaaggaaattcagggagcttttttggcatagtgtgggaaagatagagtcaatttcatttcaactctgaacatttatctagtggcttctggtagtcagggtttgaattttcatgattatttaattgttactttttgcattttgaagaatttcacaataaattaagctatcccttctaataaatcctgtttcttaccttaggaacgaatatgacttctgacttgcactggacaaactttttcttgttgagtgcttgtagtcctcacacaggccctgggtatgtcaccatacttcgtaagcacctgtccatgctacttatcattgttgaatccagggcctttctgagccttcccagagttgacctagtgctatgcatttgggcccaaggactgaaagctgcactaagaagagcttaaaaagaaagctcatggcatgagggtgtggggaggggaattatatatacatgtatatgtatagatctgttttgtttgtttttccccaagggtttagactcccttttatgctttttgaagcttcaaagccattcttggactattgggaagctgtaagaagcagcaaggttcagaacaaaaagcatggattcagggagtcagttagaattaacccggatccaccccactacatagctgcatgatggccttgaacaaattgcttagcttcttttggcctcacttttctcatctgttgagaaatagagaggaagggtaataatatctagctttgtgaattcttgtgaggatcttctcccctcccccacctttaattataatatagggataatggcctccaattctttatttagtatggtaggagatctttcaaacgatattgcatataaagtagctggcacttaagagctaatatttacaagggcctgttttctcttccctccttaaaacagatttattgtccatcagctaacttgtttaactttttaattacaataagtccttagtggagaccagattattaggtgcgagtatatcatatcaaatgctattacatttaaaatatctgaatgagagagatatttccaaatcttgtataaaaagtaataatagctagatggcagagtcacagtacattaaaattatatgtcccaaaaagtaaaaaaagaaaaaaaattatttgtcccaattccccctcaccagcatatacacagttcattgcaataatgtggaacttataaaaatatggattttttcctc

SEQ ID NO: 98971 - DNA, 1095 bp, Homo sapiens
tgcttctatgttccttgctctgtagatcattttttcttttctattttattactcttggctattatgctaatgcaataccttatctttggtcatatgccatcacattaggtgtagttaatttaaactagaactatttggcagaaaaagaaaaaagctttctgcttgctttatcactatgaagtaatgcagattcacaattccttgacataagaactgtgttcagtttacattttaaaggacgctgtcaaaaggtttgtgtaccatatatttttttcttacaagaatgtagatgatctaaaccaaactcaacgtgaaaaccaagttaaatcctaggtacatgttagaaaagtttatttacacaggtgagtgttacgcatttggagaactgatacactgaaaatttaccaaagcaccaggtgtgtcatttgctcaggtgcagcagaaattaaaatactattatgatttggtccttaactggttagaaaatgccggtctctccctgtatctgttagagctatgtatctcattttacaatgtaaaatattcgcatcttcaaaaagaaacttagttcctgtgtaagaaccttatttaaatattgatagatgagtcatgcttagctctcatttttacgaggggcttgattatttttatgcagtttttccttaacagattgtaccagctttgagtgcatagaataagaaaccaatgtatgaataatttatatttttggcaagtatccctataaatatacagcttggaagacctagaaatccagagttgcagtggatacagcgtttgttatttataatttttctctttaaaaaagtgtataattcctgatccccaattaaactttattttctgtagcagattacatttttatagcaaagaaacacatattctgttacgtcagagtgtatttactcaaaaaatgtcagtacgcaagttaatggcggagcttggtggtagccttggatttctttcccttttgccactctacaaaacatactgttgagaagattttatgtattaaatcatacttatcgtagaaaatggtacttgaatgaagtttctaactttgccacatacctgtct

SEQ ID NO: 98972 - DNA, 2340 bp, Homo sapiens
tcatatccttatatttctttgcaaatcgagatttcagatatctaaaccttagttaattcaggatataaattgtgagtaatcgctttcatttgtacttcattctgtatgttcagttcagatccctttaacaattgcttctgtttgatttttttcctaattattcctctgttatgtggcctcagagaaagagaagagttttattttgaggatgaagtgaaggaaaagggaatcttctacctttattttttccactaatcatttgtaaacccatagttccagcatctactaacttagaagtttacttctctaactggtataattaccctaactgctccaggttgtttactgtgttctcatgaaataaggagacagttaatgagaaagcaggataatttagccatagaaggaatatttggagatggttgtagattatctagagtcagtacacaccatctattgtttaaggttttttgcatactttattaaagtatttttattacttttaacaatatttaaaacaaaaggattttctgagtagacttgtctttaacatgtctggatgaaaagtataattctgcttcatatccctttttgtgggtatgtactttttgtagtggggacttgctgggataggtattagaatagatgatccatttgccaattctctggactacacaggaataacttttaatttagtttatttatattctgctcatttagaaaatttactatgccattttactaaaataaccatttagggtataaaatacatgtgaggtgaattatgtggttatataagttgtatctcaatgaagctattaattaaactaaattttaaaatgtggaaatccaggcaaagaagaggaatggcgtttgtctttgtttttcagaggtttagtgtcattcacctagaaattagtgccgctttagaagtaactacattggaacaaaaagtacttttttaatatgctttctctggattttgtcttaatggtttttcagtattattttatacacagcattttattcattattgggccaattctggagctaaatgtagtggtaagatgtattcaggagattttataattgtttctgcgggagaacacagtagagcataagtaattggaaataagtaaagaataggccaggcgtggttgctcaggcctgtaatcccagcaatttaggaggctgaggtgggtggatcacctgaggtcaggactttgagaccagcctggccaaaatggtgaaaccccatctctactaaaagtacaaaaattagccgggcatggtggcaggtgcctgtaattccagctacttgggaggctgaggtaggagaatcacttgaaccccagaggtggaggttgcaatgagccgagattgtgccattgcactccagcctgggcaacaaaagtgaaactctgtctcaaaaaaataaaaagacaagaagtaaagaataaaaatggcaagacaagaggcagtgagaagaggtgatgagtctttctttttttagagttagtctactttgtgttccctgctagtgagtctgtgcctatgggcttacatatggacataagtttgtgtaagaattatattttgttctatcctaagtggcagctctcaaaccttttcagccagggaccctttttagcatcgccaatccttctggcttgagaattttctatgtgtttctttagtcaggatttttttcccattctccagtttttagtgccctttttcaatattgtagacagttgtcattttaagcttttttctttcctttattagtacaaattcaggtagtaaaatattttagtaattcatattattaagtaccaattttctgaatactactttgagcattacacaaagcatgatgtggcgtgccatttactctgagttctactttactattcatttgtatttctatctcttatctgcaggtatggcatttcaaatatagatacaaccattgaaggaacgtcagatgacctgactgttgtagatgcagcttcactaagacgacaggtatttagtgtaccaaataagatatatttctcagttatattcatacaatattttaaagtgatagttctcaacattttattattttctctcctgtgggactatcaaactagtaagccatcattgattttctcattttgattaaagatatattaaactaccatttacatgttttgatcaccgtaaaacagtattaccaagatagattaatgtaattctggccagtaacaaagaatctttagcaaaccagtacagccatcagttgcttgtttggcttttgaaatgtggaacaattactttggaacctttgttact

SEQ ID NO: 98973 - DNA, 1011 bp, Homo sapiens
ggctctgcattttatttattgtgtttttattaaattttttaaattgtaaatgtaatatttgctcatggttgacaaatttaattagttcagaagtgtagaaagtaaatgttctcttcactctcataaagggaatcccctatttccattctccaaggatgaaagttaagtttctggtgtatatttgcataattttttaatatacatacacatatgtaactgtagatttttgaaagacaagcataagccatttgagatcaactagtccttttagacaatatctaaaagtccttttagagcattgtaaatctaatgattcctccattttgatgtggagttgtgctaactggcgttaatgtactaaaattcctaagaatccgtttgtcccggcagttgcatcaaataaaaacatggcattgttccagtactgcattaatctaatcaaactagttcaactgtgtgagacagtaagcctgtgaaaatcaagttacttacctgatgtttttcaatgaaaattcacaattggcattactgttgcttggagaattacacatgagaggaccttttaagagagcctggatggatatcagcatgcaatacagagcaccaatgactgtgatcacactgaaaagtgatgaaagaaacatctgaaaaataaaatagagccatttgcacatgttatgacatgttcttgatctgtttcaagcttcaggagcgtatacagtcttttttaaatccagtcgccctaaaatcctggatcttaagatcacagtttattaggtgtgaatgatacaaaaaggcagagggcagtctctgctatttgattacactcaataaaagatggttggggctgggcatggtggctcacacctgtaatctcagcactgtgggaggccaaggtgggtggatcacctgaggtcaggagttcaagaccagcctggccaacatggcaaaaccccctctctactaaaaatacaaaaacttagccaggcttggtggtggatgcctgtgatc

SEQ ID NO: 98974 - DNA, 1099 bp, Homo sapiens
gctttgcatatataagcgctcaataaatactgtctattattaatattattatcaccattgtgtctaccctacttggctccagacccggcccatgcctcagcgaggccgcagtgactcctcctggccagcagagggcgccagcggacacttggctaccggccgcccagggcgggcctcctcttgccgtccccttcctcgtcttttcccctcaggagaagtcgggaaggtggcggcggcggcggcggttgtcccggctgtgccggttggtgtggcccgtcagcccgcgtaccacagcgcccgggccgcgtcgagcccagtacagccaagccgctgcggccgggtccggcgcgggcggcgcgcgcagacggagggcggcggccgcggccagggcggcccgtgggaccgcgggcccccggcgcagcgctgcccggctcccggccctgccggcctcctcccttggcgccgcggccatggcggccagcgcgaagcggaagcaggaggagaagcacctgaagatgctgcgggacatgaccggcctcccgcacaaccgaaagtgcttcgactgcgaccagcgcggccccacctacgttaacatgacggtcggctccttcgtgtgtacctcctgctccggcagcctgtgagtgcggggcggccgggcgggtgtcgggcccttcccgggaggtgggggagcgggcggcgggaccgggacccttccggggctgggaaagagccgggtgccgtgggaggcggtcgggggcggccgttgggcgccggctggcgggcgcggcgtgggaggctgcgggctggatgcgcagggcccgggcagccgggctggggatgcgttttcggttttgccgggcgagggtttacgttctgggcagccttcgtgggtgggacgtgggcggggttggggtcagggagggggcgaccggggcgagcgtccctggtctccgtcgagcctgcggccgccgccctcgctctccagctacccggggcgccgggctgtggggggtgggggaagacgctaggaggccgggggggaggtccatgcgggtcctttgtgtgccccgcctctcagcggcccgggagccgcggtgcg

SEQ ID NO: 98975 - DNA, 1595 bp, Homo sapiens
aagacctttaacgagaaattctgcttcatatgtttgaaagatcaagtacttatgagctaggtacacatggctttgaatcctgactccaagtattagttatacggtattgagaatgtcactcaatctatttgagcttgatttttctcttatatgaaacagtgaggataagatttcccttgtaagttttggatgtagatttgttttcagtattaaaaataatgtatgttaaacatctcacgtaatgcctggtatatagcaagtgccctatagatgagaagcatcaaggaagaggacatgccatgagtaagggaacagtactgtatgtgaaagatattaaataagaaatatcctaataaaaatctgtcactttggattttatggttgtaactcaaaaccggaatctaattggtttaaaaatatgaagggtttattgattgattttaaagtaaaactatacagtggcttaataatattgcctagattttcctcattcgagcatggttgtccccagctcctgggtatactgccttaattatgtcgttggtccaatactttcagaagttctgcatttccctctgattgggttagcttagatcatgccacaactggacacatgttctaacctgacttcattgtcacaaggatccccaaatagagttcccaaatctgaaatctagaattcttgggatgtagggaatgaagactagagtggcaaccatcaaatgtctactgcagaacgttggagggacaatagcttctgaagatttttttctttgacaagcaatagtgcaggaaaataatttaggaagaataatataactcttgggtttaataattatgtatctgatgtttagatgacatggtataattgaaagaatatgaattttgaagtcagattttgacaatgctactagcttcgtggcttagggcaaggtgttatgctaggccactacatgcagattggcccagatccatccttgtagcctcagtttctttatttatgttaagaagatatcatatagctcagggttgttaagaggattcaatgatacacatcgttactgtatttacttattgagcacataccgtatttgaggatagggctaagcactggagttacaaatattgaaataaggcatgctagctgccgttccttgatttacctggaaaatatgaatacatagcaaatagtatccactatcatgaattctaaattttaggatagtgacataccttctatcatttatactaatacctttttttaaaataaattgaactagcatcttgttgttaatgttactagacttggagctaatctttcttgtttcttttttttcagatgactgtcctatatgcttgaatgatgttcattcagagtgtaactgaatttagattgtaaaactttaaaatgaacttcagagttagatgcagttaaactatttgttactgaggcagaatgatgaaggcatcctaactgattggtttgtcactatctttcactgtctttctggttgtatttatggaaatccctaaaattctgaatggacacttcagacatttaaaatatagccaacagtaaaaatggccttcatgtt

SEQ ID NO: 98976 - DNA, 1056 bp, Homo sapiens
aaatattcgggactaggttttactactccccctcattttttcccccacttgaatgtgttttctaattcaaatcaaagtgatgattgtctagggaaatacaacttggatacctttaatgtatgtaaaaacgttttaaaatcagttataactttgagtacttacattaatagcatgttccttgtgacattttttacaaccttacacacgagaactattgctaaagacacctgattgaacattagaatgaaattcatgagctattcagtggggacaggaaacttatttgagttgtttgaaatacagagaattaatttttgtttgtgttagaacatactttgctcaaagacttctgactaagatagcaatctttttgattgacaccatacatgttttgtagaggtcataattataccttacttttattctggttgcttgttttaagaggaatgttaacaaactggagcatgctccaaggaatctgatcaagatggtaaggaagtttgaaactatgtattagaggaacatttgcaggaaccaaaaatgctactagcttaaagaagaaaagattagacagtgggggagctgtacacatgatcactgtcattgggtaatttaaggcattgggagaggtaatacatttatttttacgactctagggggagatgcaacaccagtgtttgtaagttatggagaaacagtgtatgttcagaaaaggaaagaggaattttccttgtaattgtcagattccaaaaattcttgtctttccatatttcttattttattttattttatttttgagatggagtctcactccatctcccaggctggagtgcagtggcgccaactcagctcactacaactttcatctgtcaggttcaggtgattctcctgcctcagcctccctggtagctgggattacaggcatgagctgcaatgaacttccttcaatatgatcagatgcatcagctactttttttttttttttaactgtttctgggtacttttataatcttctgctctggaaatgctgctgtctaggcctgctgtgcggctctc

SEQ ID NO: 98977 - DNA, 2014 bp, Homo sapiens
attttcattccagttgcttttaagatcttctctgtctttgaagtttcaccgaatcgtttctttttttttttttttttttgagacagagtctcgctcaggctagagtgcaatggcgtgatcttagctcactgcaacctccaactcccaggttcaagtgattctcctgcctaagcctcctgagtagctaggattacaggcacccgccaccatgcccagctaatttttttttttttttttttccagtagagatggggtttcaccaggttggccaggaactcctgacctcaggtgatccacctgcctcagcctcccaaagtactgggattacaggtgtgagccaccgcacccagcccaaattgtttttaaattggattttatttatccagattttgatgagctgtgctttttatatctgtagatgcatgacttttattggatctgaaaaaaatctcagtcattatcacttcagtgttaccttccagttcattaattctctctagttatgtctaatctgctctctacctgatttggtgaatttttaatttccacatttataatttttcatttctgaaaattctgatttttaaatttgcctcattctgataattacatatttcctgctcatttttactccatctttcatttaatgtttcctatatactatatttcgtaactggtaattcagatagctagtcttggagggaggtggtgttaatcttttgcatttactgactcaagctcattggtttgtttcatttttgtgcgataatttttactgcagcctcatattttattgaacttaatatttggaaatcttgatagcttaaattgaaaatgcattcctttagagagaatttgcgtgttcatgggatcctaggatcctatgtaacctgaaggtattttatttcccatccagggtcttaggtttaacttaagagagatatctgaggttgagctctctcatctcgccttggctattgttggcacttgctttctgaacaacattgcttcttgtgtataacatgggacacatttctggtttcagcttaatttttaattttttgtctttcttttctgtggggtgggggatccttagagatttccctttctgaaaagttcaatagtatgttaatagtcgtagggttttcggggggtaatttatggactatcatattgtagtagaggagccttttcagtttgccatactgttggaagtagaaattaatgagattaaatatgtaaagtgccagtctagatactgtatacatattaatttcctactgccttattaacttacattttgccaaccagttcatataagagtgctttatattatatagtttatttttggttatttgttgtggacactttccttagtctgttttctaacttaaattttaatatatattctatatggattttaaacatgtatgtttactttgttgtttattgtttcagagagagaaatatttattctgttttctgttgttctgaaaagaaagttatgcaagattgaaccttggtagagtttatatcttagtagagagccaaagaacttccatgaatttcttttgcttggtaatttacatatttattatatttagagcagtggttctcaactgcaggggttttaccctgtgggggatatttggcagtgtctggaaacatttttgattgtcactgtttgatgaagggtgctactgacatttagtgagtagagccaggaatgcagatgctgctcaacatcgtacaatgcataggacacccctccacaataaagaattatccaacccaaaatgtcaatagtgtcaaagttaagaagccttgatttagagaaatcaagataaggtgttgatgctggtgggtatcacaggatttgcgagggaaggttttccaggttttagaaaaatggaaagaaagccttagaatggaaaaccgccctccttctgttaatttctttttctaattcttcagcatagacgttcacattcataaagccaagactaaaaatcta

SEQ ID NO: 98978 - DNA, 1211 bp, Homo sapiens
gaagtcactgaagatggagcaaacagtacaaaaagaaaaagggaaacttgcaataggttgctaggaaatatactaaccttgtaaatgcttgttaaggaagacaaacataccttcttatagtataccaaagaacatcttagaaccaaaataatggacaggtatgtttggttctttacagtattaacagtatctgtgttcttaaaattttgagaggtgtgtagagggtgatgaagatacgaagtgtgggacagttggtacagctttataaccaaatctttatggatttcacgtgcaagtgttctattatcagtttatcttttttaaacctttaaatggtaaatatcacttgcatagggaatagtaccagaacgtaagtttacatttcaaaataagttgccatattctctcgtcaccttttaatagtttggaaagggccatattcagtcacataagttttggattaaaaaggctctatcatacatcttgtgcatgaatgagttcatgcctgaagatgagtatttccaaaattaaaagatcagaaagtatattggctttggcagcagccttggatctttgatccccaccagggagttttagtgagctgtggggcatgtttggttgttgtcactattggaagatgttgctggcttaagcaggcaagcaccatgaatgatgaatgacttgtaatgtgttgaacagaattaacctgcatgccatatgctatgaatgttcctccagacatttatatgtgggaaacatctgtgtatggtcttctgcatatataatttaattctgtcttaatacttgcattgtagttgaacatcctattgccaaagaaagtcatgctccaagcccagaatcagagtgagaggggctaccaagttacagggcaaagggcatggatacaatcacacaactgatggcaatacgaattgtattttagtcatcaataaagtatatctgtattggtagctgtggtaagcaaataatgttattactatttatagatatgcatagagaccatacttacagagtagatcattagtttctacagatgtggtttacaaatttcttgactattactttagtgtttatagacttctacagtgtgtttggtggaggagatatgtatatcattaagttacagcacataatatgccagatgctagtaaaatatttcgcattggagcactttgtatttatttgctgaa

SEQ ID NO: 98979 - DNA, 1072 bp, Homo sapiens
aaaaagagaatttctattgtgcatacatttgagggctgttaaggaagttgctttcactcatacaccaggtattaagtgcttactgtgtgtcaggtaccaagcatacaaatagtgttgaatcagagaggaggttcctgcctcatgacatagcatttaaaaattatgagataaaggtagtgaaaataatgtgagagtgcgtatctgcgatttggtagagggattattgtccctttggattgggtggttagggaagactttctgaggaggccagtaggctggaaagagtttagaaattagtttggagggctaatcaggggtcacattctgttaagcctaataggctgtgatgaagaatttgatttttacgttaaggaagctgttataaggtagtttgtgcttaaataaattacttttaaagaaaccctaggacaaaataaacaagtcggatttcatatcgcctaagtctgatactaccttacctgtccatttatgtggctggttcacaaaggcactatgcctcagagatctcacatacagcttgtgtgtgcctatttttagttactcagttgcataagttctaattcttgctagcacattttataaaaccaaatgttaagatagagtatactgtaaagttcctaaaaaagatgtatgtaaatgcaaaaccatcagtttctcttgtataaagcacatgtggatagtgtttttgtttgtgcaggcatcattcagtttatgtattgtttagatatgtgtcagtcagaaatactaatcagctggtggtctagcaatacagtcaaagtaatgtaggctggatccgtgtaggaaatgttaataatgtacttaataatgtacttgtttttccagtattttacttgagtcatggcatatatttgagattatttctctgagtatggactttttctccctcgtttattccttttagggcaaaataatatgttggtaatagaattttgtataggtccacggtacctgtttagagagcttctaatggtatttactgtttgttaatatttatttttgttcagtttttctacttccaaaaagtggatat

SEQ ID NO: 98980 - DNA, 1282 bp, Homo sapiens
ctgtgattatatcttacatacaaaaggaggcaggattacctagaggattactccatctctactaatagagaaaggacaaaaaagaaagtatgaaatctagttggatgtatgtagattggcttagtgaaaaaagattctctaaattccagatcctctgtcctttccttattcttttatctttctatatagaggttataagcagagtcatgccatgtggtttattctttttatcctttttatgaaaataaggttttctccaaataaaggtgaatatccatttcaacaagtttccactccaatttgctgtccccctcaaggattactgatataatactgattcttacctttccttttatatatgagtaattgggaatgagtatggaggtttcctatttttggtattcataactgagtttgttaaattgctagccctgtatatatttattatcatgagttggctgctgtgctggatagctgctatctgcacttctcactccagtcttttccctgctctggctccaagcagctggtctgtctggatatacaaatgggcttcttgtccctgctttctagttgggttcagctggtggggaacattttcagctgattgaaggaaaggaggagagagaggttaggatttttacttttcatgacttcttcctgtgggatttctgtagcctggccgcatccttccattgaagtttccagttcctatcaggcagctgacatttttctttcttcccctgctttactgccaatgggtagtgatatgccctgctgttactaaccctgggatataacactctcacttgtgatttccttacaacccacctatgcttcgtaacagtctccttattaaacttccttcaaattatccaaattgactgtgccatccatttctatagtaactgactgataaaatatgctttaacatgttttagattctgtcagtgtctgttatgattccaattatagagtggattaggactaagggaaaaaattatcaattttatgaatttattctgttgtctggtgtgattttatttttagttcttccataatatctggctttgagtattgccagtttattgaacacttaatatggcacagcccattatttgaagcattatggggaatccaaaagtaaatgagacacatgctccgtgattctactactaggcagtttggaatgagtttcctgtgagagctacaaaatgctagaagttcagaggagggagagtgctctgtcaagaccactatgattgtgtctgcagcaggaatg

SEQ ID NO: 98981 - DNA, 1052 bp, Homo sapiens
atcatgaaaccactaccacaataacaagatagcatatattttcattgtgcaaccctttgtaatgaatccactgatctgcttttcatcgctgtagactggtttacattaaaaatttaaatgaatggaaatatgcagtatatacgttttggtgggggggtgcacatgtttctttcagcataatcttgaggtttattcatgtttcttgtattaatggttttctccttttaattgctgaataatgttcttctttggatattctcccatttgtttattcacttgtttatgaacaattgggtgatttccagtttggggttattatcagtaaagctgctacaaatatttatgtacagtctgagtgtggaaaagtgcttttatttttcttgaataaatacctagaagtagaatggctacatcatatgctaggtctatgtttaactcttgagaaactgccaaatgttttccaaagtgcttacaccattttacattctaaagaattccggttgttccacattgttaccaacacatgatgcagtcacactttgttttcggcttttctagtagtatatgcatgtctgtcttgtggagtctcagtgtctttttttttttttttttttttttaaagacagagttttgctcttgtcgcccaggctggagtgcaatgacatgatcttggctcactgcaacctccccttcctgggttcaagccattcttctgactcagcctcctgagtagctgggattacaggcatgcaccactacgcctggctaatttttttgtatttttagtagagatggggtttcaccattttggccagtctagtcccgaactcctgacctcaggtgatccgcctgcacccggcctcagtgtcattttaatttgcattttatgcatgactaatgatagtgggctgctgatatctttggtgaagtgtttgttcagaccttttgcccccgctttaaacaagtgttggctgggcatggtggctcgcgcctgtaatcccagcactttgggaggctgaggcgggcagatcgcttgagctcatgagttcgag

SEQ ID NO: 98982 - DNA, 1076 bp, Homo sapiens
atggtgagtgaagagtttgtatgtagaataaagcctccccaaatcacatattaactatgggtaaggttagtctgacacaatgaaggataaaagacagacagtgagaactagataggtatataattcattatcccttggctttttgttggtttggtttctgaaaacctttacttctactttatcttaactcatctgttcctggcagcaggctttttgttgtaataattaccaggaaagttagggattcttccttctaatcattccctatctctgttagcttctttaaatatgttttgccctacaaagcctccgttcttaaaaatcattaatttagcaagtatttactgagtcatatctttttttaatttattgagtttcatcttctgtatactaggcactatgctaaagctctggtgtagtaatccatctacttaattgtctgttgtagcctttgctcaaaatattttttcttttgacctaagaaatcagtttactttctggttaagaagggagcatttacttttccctaactaaatctatcagatgttaatttttaaaaattaattccaacaggttgtacatatagctagtaagccccttgctatggaatagggactatatctataaagctagtgttcagctactgagggttcttcatttttagctatatgagcacaatttaagttactaagactcattaactatgaacttttggttatttctttaatagtattgcatagtggatactttcatcttgggaggttaacaagatggggcagagagtcaaaatagagggaataaataatggggaagtaacgagcttcttgtttgcttgaggaactctgtttcaacccaagagaatctgttcagagcctgttttggtcctgagggaacatttgttgtggtttacagcagaggtctttaccttcattcaggagcacattagctctgacttgcatgctctatcaaaatttgtattcttactactttccaaaatagactacatttttcttttttttttggagactgagttttgcttttgtcacctaggctggagtgcaatggtgcgatctcgg

SEQ ID NO: 98983 - DNA, 1006 bp, Homo sapiens
attactttgccaggtgagtcttttgaaccaataactatcatttgattttatcctttgataagacttggctatactgaagaatttgtattagtagtatgctaaattatgggaaaatataacttcttgtattcattctcatacatcttttatctctcccatttacttgaaagcagttgtttgtgattattatgtagtttagtgacagtgaacacttagttaacacgtataccaggaattgttctcagtgctttacaaatgttaacttgtttaaacctaggcaactctgcctctccattttataaatgaaaaaaatggaagcacaaagagttgaagtattaatagtttgcccaaggtttcacagccatttagtggtagagctgggatttgaactcttgtctctggaacaggtgctcttaagcatggttttccttctttcctcacctacttcatatggggaataagaaggagggtaggacaaaacccagaattacaaagagcaaaagctctcacataatcccacacctagaggtcaggattgcctatgtttggacattattatatccttgctacctctcctttcttgactcgcctcctcacataaatcatgtgtttatatgactggaatcaaatctgaaagacctgtgaagtttcctctttccatgtcaaagcagagtagctatgagtattgtattatcgtaaattttttttccttgatagatgttgggtttgtttcccagtttttgtgaaattataaagagaggactgtggttaacatccatgtgtacatgcatctgtatacacttaccaattcttaaggatgtttctggaagtggcacttctggtgcacaaagcacacctatttatatattttagtaggtagcaataaaaaattgtaaagttcacacttagctcataggtgaataaaaccttaatttgcatttttgtcaggttaaaagtgttttcatttttgtgtctcctgtcttctgtgaattgcttcttttgttca

SEQ ID NO: 98984 - DNA, 1112 bp, Homo sapiens
gttccaatggtttgttatacattaagaaattgttggttaagtggttgaaatgtatatatacttgttctttttgctattgctaatatgagtttctttgacttctctgcaactttgtaaaggtgagttatacaggaatgttgctatagctatatatatgtgtgtgtgtgtatacatgtatatatcatgtgttatacaatttgtaaaacatgaatctatggtgaccatcagagttagaatgtatagtctctttgatacacttttctaggaagggatttctttagtagtagagttttcccacatgtgtgattgtgaagcatgttgatcattgaaacacaagggactttgcattataccttattcttaaaaatgaacaaaatggaatattttcataagttgctacctaaagtttgtcttctacactttattatagttgatggggctgtgacagatctgttactgtgtggcattgcagcctctatcctatacaagaatggttcagaggcgtagtactgtggattaaatcctgccctttttgatgacacatactaagacatttagataaatttctctgttttcacaaaagattgagtgaaaaatgagaaaggttaactcagcatactgtaactcttcgtatgtataagtgtgttttaagtttgcagatagttttgtataaagattttgcagatccgactggaatatctttatagttaatatgtggtttgtagtccccagttgtaggtcgttctcaagggcagcagcaggagaagaagcaatttgaccttttaagtgatctcggctcagacatctttgctgctccagctcctcagtcaacagctacagccaattttgctaactttgcacatttcaacagtcatgcaggtaagtgttttttcccaacagcttttgctggggatgcatataaaacaccaagaaacatcaattctttatcacactttgaggatcagtaaacattttttgttgaaaatgttttgtcacttgtaactgttgagctgtaatatgtaaccatataattgtgttgctttttaatcacagaagagattatatttaatgtcggttggcatgacctctttccgtggaaaaatggggaaagg

SEQ ID NO: 98985 - DNA, 4854 bp, Homo sapiens
atttgctgagggctgctagtttgcgtcctatgatctatcttcctgtctcatgaatatgtgtttttctttgaagaggaatgacaactattagcaagactcaggctcattaatttggggtcttaagttccacactaagttgactcctttgtactttttgaaatacgattattcaagaaacagctttaccattgtgttacattctgcttagcttggatttctttgtacagagattgcctgagtgtccagacagtaatttttgtattactgaatttattagtgttgaatttgcaaagttgtgttttccaaagtttcattctgcagcacttataatcgattgttgaagatagtgaatagatcagtacctagaagtaaaaatggatacaagtactacaaagtcctgtcttgcctatttaataggtattctattaatgtttggggctctgaattatatgctataatttctatgctagcattcattgtttcttaaattttaatgagtttaaaattgcaggcttctaatagaatatgaatatcttcaatttatttggtgatcttgtcctttttttaaatttttatatatgaccatggtgagacatttgtaaacttaaaaaaagctctattaattaaaccatttttgtattattattttaagtatttcagttattattcagattcacatagttgattaccatttttaatcagtgaatttttccaggatgttttctacatctttgtctgctttcctataactcagtactgtaactcagtactctgaaatagtttcctttgttaatagagtcacttttatagtactgtgcttgaggtcatatacagagtattgtgtccaaatttatcattgcacaaagtgtttttggaaattcttggttactccttagtaaattacctgtaattgggttacatgctggtagggtttaaaatctgattgctaagtgaattctctataaagtgagttttgatacatagaaacttttcatataattcttaaactcatgtgtcatgtattttcatttatagttttcatattcattaacatatgttgttccttaccatttacagctcagaattctgcaaatgcagattttgcaaactttgatgcatttggacagtctagtggttcgagtaattttggaggtttccccacagcaagtcactctccttttcagccccaaactacaggtagagcttctccagcattgtgcttaaatgtttactttacaaaacaaaactctctaaatgtagttttgaaaaattagtctaaacttaaattctgtaattatctgactttaaaatggttctatcttcaaaagctctggggaaacctgaactctttatttttttctatgttcatttgtttttctgcattatttggtatattgtctgtttgacaacatccattctcctccttttcctgcgcatgaatcttccttatatctaccatgcacacaggacagaggcatgacactactataagtatttctctctctctgtctctttttttttttttttggcaatcctcctgcctcaggatggaatacaggcacatgccaccactcccagctaaattttttttttttttttggtagcagctgggtctcactatgttgcccaggctggtcttgaactcctggcctcaagttatcctcctgccttgacctcccacagtgctgggattacaggtgtgagccactgtgcccagccagtactataagttttttaaggttcatagaatccattgatttaggctgacattatacctcttaataaaggaagctggttgcttctgtagagctaaaaatgtaagtaattttcggggcaacaagcctgagaaaaatttttatatgtttattagacaagagtagattaatgatcacttcagtcaaacttggaaatagttttctgtgcaggaattggtgtttaaacattgaatactctttccataaattgtgctgttttcgtaaactcatggaacccttatttagatttttggctgattacttttctttcaacttttaactctgtgtattgtcttaaagccttttctttcaattttcttttttgttttttctttaactttcatcatttacataatttctggctgtccagcatttagaatgctttcatctagctgcagttttggtgaatttacttcagcttttcctcttcaggctacccacagtaagttctgttgtcaagtaggcatcttatactaatttgtatatttttgctatacttcaagggtttttccagttatagattgttaataattctttagtgataatccttcataaaaatctcttccaactctatttattaaactcagagttagagaacacaatagtagacaatcaaagagttacttggtttaataataatttgaaataatattctttatataaattttgaaagtttagtatgtactttgtttgccagctccttgtaacaggtcacaatattttacatacaaacatatattacttacctttaattgaaaccaccatgatttaactcttgaaagaaatttgatcagtgtatattttttttagaatgtataaaaacctgcttgatagaaagtgttcgtgtttttttaatagaagttcatgcattctgttttaaaattatctgtagttgtcttttctatcactttaatatataactgtgtatatatactgttttgatttctgaaactaaagtttagaaataaagaactaatatcccaaaaatgtaggatcaaaagcatagaatgaaatatactggttttagtcttttgatagtactttaaggaggtctctataatagagaacagattttaaagatgtaacaggatatatataatagtggccattaggtgaattgtggtttataaagtcaaaaattgctataatgtattatgtactgtaattttaatgccttgaactatatggtacggcatgattttacagtggacatcttgatattgtatacacattaaactattatgtggaattaaatagtagctcttcaagtgaagtaagtataaatgtcaacgaccatcttttaaggaattttggatcaccgtaacacattttacacattgttaatcgctacccctgggattgtttaaactgtttcgtcatggagccacaaaagtttgaaatcctcctagtaagatactttgcatcttgtttgcagtctgttcagggagaactagtgaaaggctgtagtatatttggactagaaagtaactgaatctcaaaccaggtagtgtggagatacccctccatgaattacattcttcattccagggtaggtaatacacagaaacatgttactttacctgttgccaaggcctttgaaaaatctacttttacaaaattggaaaacgtcacttgtagtcaaaagccattgccagtcattgattttaatgttgtaagattgcttataggacatttaatttaggaagaaatgatcatacagtctatgagagggtactaggaaaagcttagaaatttcaagtgctctgtttattctgttacaggtggaagtgctgcatcagtaaatgctaattttgctcattttgataacttccccaaatcctccagtgctgattttggaaccttcaatacttcccagagtcatcaaacagcatcagctgttagtaaagtttcaacgaacaaagctggtttacagactgcagacaaatatgcagcacttgctaatttagacaatatcttcagtgccgggcaaggtatcaagctttaagcaaaacaaatacaaatttgtgttaaacagtgctcttaatttggttgtatttattaaaatctgaacatgctacacttttctcagttgttgtatagaaattttgtctgcactgtcattttgagtaaaatgttcacttgacacattttagacctgaaatatcaactacaaaactgaagacatagggactgatttgtaaactttcagtcttactagttgagaaaaattttattttgtcctagaaggcgtgctttacttttctttggctataaagagccaagaaaccccattggcagagctgaatggaggattatttggtggtttctgtaatatatttacttcgaacaattttccgttaacatcttggtgggttttttatatttaaaaaaaaaaattcatgaattttacagtatagtcttgtatccagttttatcttaaggctagtagcctctacaaatgcatgtggcactggtgaatagcaggtgtgtgttgctaaatggaattctccattctgatctctgggcctgttttcctcctctccaaaatgaggataattctaagcattaaactcatggagttgtgttctaagtattattgcatgttaaggcatatagaacagtgcctagcacatagtaagtcctcaataaatgtttcccgttattaccatctctaatttttttgtggagaatgctggggaaatgatgctattgatagactgttcacattaggtctagcattatatgaatttatatgttcatgtgaacaagatccacccgtcttggagatgttaacgtaagagcacttgagagtttctttcttatgcataatccagacaaatttttttggtacagagtgttaatttttgttaagagacatattctgtctttatcacagtggtatgtataacaactaatcctgtccagtatggtccaggttatttattagattaatgatttggaatcctgcttaactctaaatccattttaagtttacctgtgtttcatggcaaatgtggttgataagttgaaagtgtaactttaaatttttggtgtaacttgattttgttcgttcccaggtggtgatcagggaagtggcttt

SEQ ID NO: 98986 - DNA, 1064 bp, Homo sapiens
tagtttttagtcatgatgattaaacagtgaaagtcccatattataggcttagttgtaaatacagatttttagaagtgtttgcaccaaagcccaaaatcaattctgtatctcttcagtgtcatcctcatatttacaaataagcacatctgctgttatgttcatatatatctgttagaattcttggcagtaggaagtctaacacattttaggacattacacttgtaaaaaacttttctagtctttattttagagttgcggaaatagtctcagaaatacaagagatttacctataacaatgttttattcatctctgttttccaatcctgtggattgtatttactaatttctttagttatcctggtagcttattttcctttagcatcttttctagaaagaaatgttaggattgtaacacttccggaaacataaagtctggaaacatactttatatataatacatgatttattgatattacattacagtacatcaggggttcacaaactgtggtccatggaatgtttggggtacctgagaccctttcatggggtctgtgaggttaaaactttctttataataattctgagagattgtttaccttttcattaattgatatttgcattgatggtgtgaaaacaatggcaagtaaaacttgctggtgtctttttatttttttttaatactttaagttctagggtacatgtgcacaacgtgcaggtttgttacataggtatacatgtgccatgttggtttgctgcacccatcaactcatcatttacattaggtatttctcctaatgctatccctcccccagccccccacccccgacaggcccccaagtgtgatgtttcccaccctgtgtccatgtgttgttcttgttgttcaactcacacctatgagtgaaaacatgcagtgtttggttttctgtccttgtgatatagtttgcttagaataatggtttttgctggtgttttaacatgaatattaagatagtggcaccaaactgtactagtcgttacaatagtcatattccttcccactacacattcagttttacttgtatttt

SEQ ID NO: 98987 - DNA, 1086 bp, Homo sapiens
atacactggtttttacaaagaacccaaatatatattgtgtagcattttcttaggagtcaaagcaatgatttgttatcagaatccttgagttttctgtcttgataaatatagtgaaataatttaaatcttaaatacaaaatgtattaggattttatagtgtattttataattttttaaagctacgccttccacaaatccatttgttgctgctgctggtccttctgtggcatcttctacaaacccatttcagaccaatgccagaggagcaacaggtaagaaaaagagacagtggaacagtaagttttggggaagacatttatcaacaaagacaccatgtgaagaacaccagaaaatggggcctctttcttagtgaagtgaatggcaatggatagaagagtttgtccataaagacaaattctagctgaaagttcataaaatcctggaatttaacagttgagagggaccttagaaattatctagtgtctgccctttccagttaaagctttcatttttcaggtagggaagcccagacatggagatgagactccacagaacgtttatgacagagataggacttgaacagagcaatttagatgtatttggtggtctggtttcagaattactggttgtcactcatgcagtcttaatggaaccattttatgagaagtttttattttccctatgagattgcatcagatgactttactacatgaattcttaattattaggtctttttctagtgaatatctctttcaggtgttaacattttttaagttgtggaaacttgattcagtcgtgggtataatactgaatattttctcttttgataattttttcccttaattctctttgttgtctccattttattttttgattcatactgtaagccattcacatctttctcatgttatacctctgatttttgtcgtattaccttaaacaccagagatatttgccagtatcttggaatgtcagcaggtgcatttggtatggctgggtatccattaaatctagagtttgtatgctttgtttttgtgtatatgtcacaataatttagaactaaagcctaaactccagttatagcaa

SEQ ID NO: 98988 - DNA, 1056 bp, Homo sapiens
ttaagttagcaagaaagttacattcattgagtatttattgcaaagcactctaattcgttgttacatttattcttcacagcagctttgtgaagtatagatactattgtctctatccctccacctcatttgcaaatgaggaaactgaagcttataaaataaagtaacatcatgcagccagaaaatgacagaaccacaactcagaaccattcaattttttaatcattcttatgccaatttaaaaagtattctaattttaaatccatggaaatatattttagacacaatcttcagattgttaaaccgaacaaacaaaaggtactagtatttaacaatttaagtttactttctattaactttatatgtaacctgtctgtcctcaaacatgccaggtgagtaagatctgtacaagatgcctttttcttttttctctcttcttttcagccattgtattttaacctgtaaataccgcttacctttctcttgaactagaatatttaataatttttcccttgtaatacttaattagttcatttgagttatttgtgtatttctagttaatgtgctgatttgtaaataaaacaatctagcattgttcatgcactctctcccaagacttggttttgatcctaaatgtagatgctggataatctcatatgatcctatgaatagcgtatttagatgtagcttatgatgcctacaaagcattttttaatgactgtaaaaaagttgatgcctatttgtttaaaaaattgatttcatcactgtttcttaatttgttatttattattctaatctcccctttattttaaacagtataaatattacaggtcatgaagatggttgaaattaaaagtcttattttgtgaatgtgtttttgttatgtattatgctacccccttagcaacagtacactcgaattttataactttttaatgaaacaagtatacttttattttaacaatagttatctataaattaattgacgttggtctctttatggctttccataaggcctttctggagcaatgcattctcaagtgtttcctcacgctcatt

SEQ ID NO: 98989 - DNA, 1111 bp, Homo sapiens
taataggaaaatatccttttaattgtgttagtgttgttaagagaatctctcttctctggctgtagttacaaagctgcataggttctgagtggtctgcctgtaactaactatttgtcctataagtcctgttctttttagcgaactattcttcagcggtttaaaatttttttttgcaggaacacatattatgttatgacagatacttcaggagataaaattttggctgttattttactgcatataacaaaacaaaactaaaaacaaaaatgtatactagtatacatattaattgcatgatctttaaaacacaagactactgtttagacttgaatttataatttgagaaattgtcttgggatttcaaacaacagctttagtagttagtttcattctggtcattgtgttttagaagaataaaatttctacaagttacgttaaactgtgtagcactaaaactcattaactttgttggaattttggaattaaccctgcctttaatgtacatcttagtatttttcaaggtaaatgatgtctttttacatttacaatgttgtgagaaactaaacatatcctgttgtatgtaactgatcagcccttctcttctgtcagcggcaacctttggcactgcatccatgagcatgcccacaggattcggcactcctgctccctacagtcttcccaccagctttagtggcagctttcagcagcctgcctttccagcccaagcagctttccctcaacagacagctttttctcaacagcccaatggtaagatctaacatttggcgagctgtaagttcattttatgtatcctttttatatcataatgttgtgtgcttgggcaggaagacttttctaaagaatactatagtattatctactgagtgtttacacaaaaataaaagcctttggtgatttggacctcagaaagctaagtgattttacaagtttttgtgagcaggttacaatttatgggaaatcagtgactatgtaaagagcatcccgtcattctcagaatttctattgcctttttctgattatttcgtcttacatgttctaatatacctcttgattttaaaaggagaatttatagacctagaatgttgggatt

SEQ ID NO: 98990 - DNA, 5412 bp, Homo sapiens
attaactcgacatttttacgtatttcatttgcttcagtttgaagtgcatagatttgaagattcttgaatcacaactatgtggtttcttttttctttttttttttttttaagtaagtggttatttaaaaatctgaaatatgggctgggcgtggtggcttacgcctgtaatcccagcactttgggaggctgaagtgggcggatcatctgagctcgggagttcaggaccagcctgaccaacatagagaaaccccgtctctactaaaaatacaaaattagccaggcgtggtggcacatgcctgtaatcccagctgttcaggaaggccgaggcaggagaattgcttgaacccgggaggcggaggttgtggtgagccgagatcgccattgcactccagcttgggtgacaagagtgaaattccatctcaaaaaaaaaaaaaaaaaaaaatctgaaatatggaccctggaagagccataaataataaaaatatttcctacaaaatactgtgatgtttacatagaaatcattgtgttgtctgcacagcctgttccaaatagtcacaagctcgtctagtaatgaaattctataaattttagttattgagacaagttagaatgaaagagctgaatgaaagttctcttggccaggtgtgatggctcacgcctataatcccagccctttgggaggccaagacaggtggatcagtcgagtccaggagattgagaccagcctgggcaatgtagtgaaaccctgtctacaaaaaatacaaaaattagctgggcgtgctggcgtgtgcctgtagttccagctactcgggaaactgaggtggaaggatcacctgagccctggaggttgaggctgcagtgagccatgatcatgctactggactctggcctgggtaatagagtgagatcatgtctcaaaaaaaaaaaaaaaaaggttattttaagacatgctacagtaagtttgtctttggtatctgaaagagcttgaggcctaacaacttaactttaacattttatttttgctgctctggtaggaatgtctctgaaagttattatgaggctttataagcatcagattgtctcttgaaggtatgggttataattggtggttctattttaacaaggtgcaggttttgcagcatttggacaaacaaagccagtagtaaccccttttggtcaagttgcagctgctggagtatctagtaatccttttatggtaagcaaaatttaaaattaaatactttataagttgttaaatcttattttaaaattaggaatagcaggatgttaatattcctagatggtatttggtgttatattgatatgagtgacatcataagattgtacaaattgacacagagccattatgtgtgatccttttctgaccttttaaaaaattagttgcaaatcaaagcattgatagtttttaaaaaattagttgcaaatcaaagcattgacagtagatcagctattttataatatgaaacttatctgctttcttgtcaaaataacactttatgagaggccctaggaattagtgaacataaaagagaggtcttaagagtcagaagttttgtttgaatcacacgtgcttttctaagaccattctaagattcttcttagaatctattacaagaactgtttgaagtactggatatgaaagacgtagcacagttcatgacacatagtagtttgatatagcttattgccaataacaaatattattgccaataatttaaaaaataattcttaaccaaaaagtctaattaaaaaaattaaattcagtttaatgtttttatattttgtacatgcactacttttgtctctttatttatttgtcttatgttttcctttagactggtgcaccaacaggacaatttccaacaggaagctcatcaaccaatcctttcttatagccttatatagacaatttactggaacgaacttttatgtggtcacattacatctctccacctcttgcactgttgtcttgtttcactgatcttagctttaaacacaagagaagtctttaaaaagcctgcattgtgtattaaacaccaggtaatatgtgcaaaaccgagggctccagtaacaccttctaacctgtgaattggcagaaaagggtagcggtatcatgtatattaaaattggctaatattaagttattgcagataccacattcattatgctgcagtactgtacatatttttcttagaaattagctatttgtgcatatcagtatttgtaactttaacacattgttatgtgagaaatgttactggggaaatagatcagccacttttaaggtgctgtcatatatcttggaatgaatgacctaaaatcattttaaccattgctactggaaagtaacagagtcaaaattggaaggttttattcattcttgaatttttcctttctaaagagctcttctatttatacatgcctaaattcttttaaaatgtagagggatacctgtctgcataataaagctgatcatgttttgctacagtttgcaggtgaaaaaaaataaatattataaaatatgctattgtttttgtgttcttgctgcaatgcctttaccaaagtggccttaaatatgagtagtgaattgagaacatcttgaattcttaaaagacttcttagtgactttttataaaaaggccatgtagaaaatttattaaaactactatgactgctacattcaggaatatgccagtggtaaagcatttaaatgtagcttgtcagatttaccataatcctactaatttctttgcagcttattaattttgtgaaatttgtatatatgaagaatttgcatgtatgtgtatttacaaatttttctaagtatcttgaattctcagactgcaaaaggcctattttaactattgattttttttaaaaaaaattgtctttgaatgtattggaagtagacatgcattaactgtgacattattgcacctcagtttttttctttctttttttgggcaaactgatattatctataggatatttgtttatgtttgttttttgggggaaagaaactggaactcagtgttaccttaaagttacggaatactttgttttaaaggaaaagataataagtttagttatatctttttgttaatattcaaatgaacttgtttaagtatctatgtacagtaatgcctcattcatctagaggtaatctggcagtcttgtgaaaaccgaacacaactcagaaacttggaatcgttttttttaaaaatgcctctgagcaacccatataagtcacaaagtctgtgtgttagagcttatgcatttgtttttatgagagattttaataaatttaattatttgcttgtccagactatagcatattagctgtttagaagggatggcttgaaaggaaggagactgaaaaacactctgagagcatacactgtccaaggccattagtgtaaggaccgctacccagcctagaggacatcactatactacatcatctgatgattattctttattatgcctctaggtaattaagtaaaggtgaaattgcatacacagatatgtagtacatattttaaaagttttatcttaaattgattaaaactttttaaaaagctttggtattaaaagaggtaaacatcagtttcctcaaacattttattcatgttgaatgcctttttgcaatgatgactgagttgttatcatagtattttaaaacctgtatagtgttttagacttgttaaaacattgctgtctagtgtacatctagctaaaagtgtggtttatctaaaccgttttaataagcaagatgactgggaaatctctgccccttttctgagcagtatgcctcttcttttagaattaaatgaatgctgcacaggtccagatgtgtgttgatgtagacttgaaatgtctccacattttggaggacttcctcagcccttttcattgagggaaaatatatttgaatttctgttttagattgtatcgggtcccagttgattcatgtgtacaaagttatgctacctaattacagaccattacccaaatatcctaccaggctttccatctgaatagtaaattaaacagttgttatcaaaatgattttaaagactatttctttttctgggtaactattgaagtttgtaattaaatgggggctcttactgactttaaattagcgcttataaaataaaaatgtttagttcaagaagagacccaagctgggtatggtggtgtgagagcctgtgagtcctagctacctggaggtgaggtgggaacatcacttgagcccaggagttggaggctgcagtgcgctacgatcacaccactgcacaccagcctggggatagagtgagatcccatctctaaaaaatgaaaaaaagaagagaggtagctttaaagtggtttttctcatgatattcactgtttattattaaagaaaatcagctttcgttagacttttacatttagatttattctagttttatatagaccatcaaaattatgttgagtactaaaaaggagaaaaaatcctggaaggtaacaaggctgaagaccttcaaatttcctggcttactggtttagtcacatcatttttcctgttcaggtatctgcagatatccctgttcaggaaagatcttttttcaggatggcaaacttttgacatagtttaaagacattttttccccattttttgaaatagagaatattttattatttttgtgaaaatagagttttggtaatcactttcttcctcaaaataagtccttctgttaatttgtaaaagcacattagtgctttacctgtgaaattccccgcccccctgcacacacacccactttagtacagttcctgtcaattggcaacatggagagggtgacctggctgctggtttaccactgtaccaacatctctggagcattttagtttcagaaccttaacactccccaacagctttgttgatgtagcttgtatctctgagaatttattgtattaaaattaatactgagatatttttaaaacatgtttatttatttaagtataacagtaataaactaataacttgctaacataaataccatttttgataaaaataacttttccaaaacaaaaactaatgagaacaggaacattgttttacattttatgcatttaaatctggcttaataaaagcagtgagattttcatgctgcttttgcattccaacttaaaaattacacagcatacacacgctggaaaactccactgtgcacttgtgagatcaggagaatgaaaactatgtaatatctcagtagtacaatgaaaatagtttgacttttcacagcctttcaaagaaagggttgtagggaccattaagggtctccagactctttgagaaccactatactttaaatttgtgtatttctagaacagtatttacttgca

SEQ ID NO: 98991 - DNA, 1034 bp, Homo sapiens
tacaatccctgcagtggacctatacttttaggatgaaagaagcaaagcatagagaggttaagctagtggcagctttttgctctggggaacagatttggattaaatgctatcacatttatatatgaatgcattctttcttaatattttgaaattctgaacaagttaacgttcttgtcttgtatatctaaaaaaactttaatcacttgaattcctttcataatttgatgaaatcagtacagtttattcttggtttttttttttaactttagaagtaaattaatatggtaactagtggagcgtgctttagattgaagactcatctgaagtatcacagactcctattttgtaaagcattccacctttattgatacagtttgtggcctatacacttttaaaatttattttttaaaaggtgatattaaaatttgtatttaacctgttgtattcatcctcattagttaagtttttctttttatgttttaaaacttagtgacattaaacttttcacgtggttgtttgtgaacagatgaatatataaccacgatgtaatccagtgttgtgctgctgaatgtttaacaaccatctttcatgaaagaaaaaaggccctgttttgtagcatttactaatatttatggtataaatactgtcttcatggtgattttacctgccaatctgatgtcattaaatgcagtttgatgaaagagatagccaaccagtggctttcccaagccttggcaaaccagcttcagcacagcaaaggacatacaattccacaactcattaattaaatgtattggtcatttgatgattatatccagtatttggagagcttttatattgttaattcatttagcaagcatttgaacacttgtttatttttagagatatactgggcactgaggtatttaatctgcaaagacccaagtatcgtgaaccttggttttaaaaagtccaattattgtgctcttataggggttgcacattcaaggcttacactgaattctgtctgcagttctgttttgtgtgaccagcac

SEQ ID NO: 98992 - DNA, 1767 bp, Homo sapiens
ttgactatatgatcattaactaaaggcagcaagggattgtaaactaatcttacatagtcaatgtttcatagaatgctttggttacaatcaggttttttaaagactttaaaggttttttgtatgctataatatatgcttatgatttctaaaaattatgcagtatacacaaagggcataaagtcaaaaagtgtgtctccctctgtgactttattctcataccccagaggcatataatttcttgtattcttgtgtagtctttaagaaatgttatcgtttattttatatatggctctctctctgtatgcctcttcctgttcttattttaaatgttcaagtttgtgacttggttcttgtttaacttggttgtctttccatattgccaccttccagctctaacattaatgtctccaggattccattatatggatgtccctttgggagaacatttgtttatagacttttctactaaaaatattgttataatgataatatccttatgcatatatgaagattactcttgattctgcctgactggaaactttattaataaagtagacattattctattttgaggctcaccagctgtgtaggtatgatcttgtgcttccatttaagaaattcttccatttaaagaagaaaaaaaatctctctgactatctgaagatatatgaaaaagcctatgcttttaaattaaactgttaagacagtccattgaaagattgtggaagttcacatctattttgcaccttaattttttcattgtccctactcatgactctaaaaagtgcatggcttggggctatactttgttttgcagtttgttggtatcgtgcctttccttatctacattagcttagactataccttatttttaagaagagaaagtggaaattaactgtggcaaaacctattttggcacaaccacatttgttcattatacaaaattagcttcctatgctttagaaaaaatgtgagttattactctgaaagttgtgattctgattcctcatggtttggagctcagaaatttcttaacatgtctttgctgttagtcaagcacaggatttgttttctgcaaaagtttattttcaatgaagaatacttgtcctaatagctcataaaaagtacctttgcactttaaatcctaggaatagggaacaaggaaacttactgggaagttcaaaagaaagaataacaggaccttctagtcagcagggcatgtttggaaaatgttaatacgccatgatttttgaagaccaattttagttcaggaggtggttttaaatattggatgaaaacttacaggctgttttcaatattcatttctgaaatactttagtatgatagataaatttggttaagttcttgttcattgtgaaatactgttggaagaatttttttcaaaataaagacttctgaatttgtgtaccatttgggaatagcctctttcatttaaatgagtgtcaaatctggaaaattggaagaatatttgttcctttcatcactcacattatgcatttctgtaaagcagctcatgcatttacttccagcttaacgtgttttccattaattaataagttttgccatttttttctgtatttttcaattaaaaagtcttcatttttaaaaagcaggatctatttgttacttaatttgcaatatttttttttcaaagatggatttttttttttctggagtacacattgatggaagttggttttaagaaagcattgtaatgggaatttacctaccttactactgttgaag

SEQ ID NO: 98993 - DNA, 1053 bp, Homo sapiens
gctgccggtggtaattatggcctcccacacagtgttcccacagtctaatgaacaattacagagctggttatttctgggcaaaagtgctcagcctcatatcccatggctctcattgagaaatatttgatgaagattttggtaccacctgctggctcctagtgggttggcaatgttgcccagacacctgcattttatgttcccttaaatggctcttagtttctaattctttattccattttgtgtcagaataactcagagggaaaagaatatccattaacgtcctccttgaaaaatagtcaaaagccattttgaagaccttgggtcccaggaaagagtgtgtctctttgttcttgctttggtcttgctggcaaaacattttaccccaggatcaagaggctggtggttgaactgaacaaaggagctccaggctggtcacaggatgggcatcatttgccagtgctggcttggtgggaggcaactggcggacaagtctctctggagggtgagtttccagactattgaaaacctattgaggcagttaaatggagggcattatgaagtatccacgtagattagacattttaggcacttcattgcgaaggttttcttttcattgcccacatatttggcctggtttttgtttggttttgtaactcagttttgcttgtatctaattatagtttttttgggtaacaagcaataaaaattacagtaacaacaaatactctaaatgaattggggaatcaacttaatggttttcttttttttttaagcatcagcatgatcttatgatagcaggaattataagaaggagtatctgctttcaagatgactttattattgagtttccatcacccgttatgttgacctactggaaccttggtagactcccagaggtcacttagacatcggttttgaaaactattgattttattttgaatgaaattcattgtattgttattatgagccctgcttttctctgatgttttagacactgtgcctttttttaagaaagttttaactcaaaatattcctgtaagattcaattgtgct

SEQ ID NO: 98994 - DNA, 1064 bp, Homo sapiens
gacctctggaggccctgagcttattaagatactcctcctttttccaactgcatatctgtgtcaggctggatttttactccagccaaaacactgtaggataatagattcatcaaagaaggagaatgagaatccagctgtctttgatcaagacagacattaaagagattggcaaaaatataaaataatggccactgtactcattaattcttttttattttggaaaatggagttttttttccaaaatgtattatgtatgtgatcatgtaatgggcttatattatttaaaaatgaattaataaactttttaaaagtctcagtgttaatttagaatgcaataagtatctatagatttaagccatataacaaggacaatttggagttctcaatactttttaggagcatagggatcccgagagtaataagtttgagaaccactgctccaacctttctcttctctttggtcaatgtgtgaatgtgcttttccaaatccaccgttaaaatctgaacgtaggacgtcctgggactccacacctgagaagtaaatgaaagccttgctttccagactgaaaggaagttcggggcggggtgaggggtgcggagtgcggtactccccctcccacttagagagtcacagagcacgtgacaaaggcaagccactgaggacagagtcaaaaagcctgtctggctttatttaaattcattatttctcaaaaatagtcaaaccttttttgtgtgttgccttttaatgtcctgtggaacgaatcttctaccaaatgtgttttgggaagcctgacattgattagtccccttcgtcctgagttctgaggagcattgcaaggccagatgagggcatctctggggacagtggagcttcctggggcctctggacccttactttggggttgccttgctgccagctctgtcattaaggtgggacctacaaagtgtgactcatgcgagaagaattcattaggaggaagaaacccgaggaccagaaggtactgaagccggatctgagggctgtgggcttctctaatgaggctgatcttgataattccctaaat

SEQ ID NO: 98995 - DNA, 1098 bp, Homo sapiens
gaaaccatcaatgacagatatatctctctggctcatctattcaagactggctgtatttgaaaatagggataggtccttggctgaatattcccactggatggaacagaggttaatttagctgaactgaagataaatgacttaatgagatgaaaggtgcctaatagggacataaacaggaggtttccctgtggaaactgaaataaacaataacaaggaagtggtcatgtgtcttccctctcctctccccagagttggtacataagggcctcccccagcagaaggaggcatcagacctcctcacctctcctgagtcctcctcacttcacctgagtcctctctactgacaccatgggttgctgtggttgtggaggttgtggtggctgcggtggccgctgtggtggctgcggtggtggctgtggtggtggctgtggtggtggctgcggtggtggctgtggtggtggctgtggtggtggctgcggtggtggctgcggtggtggctgtggtggtagctgtggcagctgcaccacctgcaggtgctaccgggtgggctgctgctccagctgctgcccctgctgccgtggctgctgtggaggctgctgcagcactcccgtgatctgttgctgccgccgcacctgccactcatgtggctgtggctgtgggaagggctgttgccagcagaaatgctgctgccagaagcaatgctgctgctaggtggccggcctggttccacccctgcccaggagctgtgggaaccctcactgtctcctgctggcaaggctctgcttaaccccattctgtctaatcctttttctaacctatctgtcaccagcagatccccttggcttctgcctcatgtgccttgtgctttgtccttctgggatcttcctttgcccacacacggcaccaacttgcccagaccacacaatgtgaaacaaacgggcaaccgagcagccggtgataaccagataaagtcagagccaaccaggaaacttagtactttattattttgtaatgttcaatctttcctaaatagtcagtcctggatttcaccatttttctgttcactgtctgtgtgcaatcttttccattgcttttgtc

SEQ ID NO: 98996 - DNA, 1104 bp, Homo sapiens
tatacaaagttactattaattgacattgacctatttccagaaatatgattttagatatcattcaaatttcatgaccagtaaaggctgctgctataatgtcctaactgaaagatgatcatttgttagttgccttaaaataatgaatacatttccaaaatggtctctaacatttccttgtagtaccaaatacttcttacctctttgccctgccctccccacaaaaactacttcttttttcaaaagaaagtcagccatatctccattgtgcctaagtcatgtttcttgatacatgtaattctaccaaggtcttcttaaaagttcttttaaacaattgaatattatcttcagattattaaagaccaatcctaatgtggaccttaggatacagttttgagtagagttgataaaaatcaattaaaatagtctctttaaatggaaagaaagcctctttaaggggaggaaacagagggctgaaggaatggaagttcatctgcatgtatgcagggagactgggtaggaaagaggaagcaaatgggagagagaggttggaaaacataaaatgggttacttgatggtgattaggtgggtgtagagaagaaagttaaaaggctaaatggaagggtaagtttccgtcatctatagaaagctatatgagacaaggactccaatttttttcccaaaggtgttgtaaaaagaatgaagtctccttataaaaaaaaaattatacctcaatgtccccaacaagactgcttaataaattatgtttcctccaagctatgcaattcttttaactgttgtagaagagaaaatgttcacaatatatttagttgtaaaccaaatgataaaactacatattgtaaagccaacttttaaaatacattgtatatatgcgtatgcacagtaaaaatggaaaatatattgacctaaaggcattgaattactatatactactatatattactatattactatatactaattactatatactgccaaagactctgaacccaaaaccatccctttctttgtaaacaaaggaaggaagaaaggaaagaaagagggagggagggagggaggaagggaaggaaggaaattagcaactgt

SEQ ID NO: 98997 - DNA, 1055 bp, Homo sapiens
accaacattgtccaacatggtgaaaccccatctctactaaaaatacaaaaaattagccaggcgtggtggcacgtgcctgtagtcccagctactcaggaggctgaggcaggagaattgctcgaacctgggaggcagaggttgcagtgagccaagatagtgtcactgcactccagcctgggcaacagagcaagactccatctcaaaaataaagaaaaaaaagaaaagaaattttccaaggcttagtataaggagcaaaggacggtcttggctgaggaccagctagcccagatgtcaaagcagttgggcatgttcaagaccaacctggaggaatttgccagcaagcacaagcaggagatccggaaggatcctgagttccatgtgcagttccaggacatgtgtgcaacctttggggtggagcctttggcctctggaaaaggattttgatctgagatgctgggtgtgggggatttttattacgaactcggtgtccacattaccaaagtgtgcctagtgctgagcattggagtggaggtccaataactctagaggaactacatcaacaggtgttaaaaggaaggggcaagttcacccaggatgtcagtcaagacaacctgatcagggccatcaagaaactaaaggcacttggcactggcttcagcatcatccccatgagtggcacttacctcattcagtctgttccagctgaattcaatatggatcacaccatggggctgcagctggcagagaaaaatggctattgactgtcagagagatcaaagccagtcttaaatgggagaaccaatgagcagggcaagtgccagaacacctgctgagagaagggctggcgtggctggacttacaggccccaggggagatccactactggctgccagctctcttcactgacctctactcccaggagattacagctgaggaagccagagaagtcttcccctgagtgtggaagacttctattggccaataaacctgggcagttttgtttattaaaaaaaaaaaaaaaaatagaaaaaaaagctcccttcaaaaaagaacta

SEQ ID NO: 98998 - DNA, 1069 bp, Homo sapiens
attgagtaaattttaattctgctagtattgtatattttggaaaattacttagcttttggctcatttggtttccacatccatgccaaaagcttaattagcagcgtatgtagctcaatgtaaggacagttaattctagtcttatttcttgacaatttcattcttagtatgtcagaattcttcattttggggagaaatgtgcaaaggtagaaattacatagtgcagtcatctctgttaagaacttttatctttttaaaaaacatcagctttattgagatataatttacataccataccatcatactatttgcctttttaaagtatatcattcaatattttaaagtatatttacagggttgtacaactatcatcacactcaatatgagaatattccatcacctccaagccctctacccattagcagtcacttcccctgaattctccccatctctacccctagaaaaccactaatctcctttctgtgtctatagatttgcctgctctagacatttcatgtaaatggtgttatacagtatttgatctttcatgactgccttctttcccttaccatgatgtttttaatgttcatccatgttgtagcatctacccgtacttcattcctttttattgcaaaataacatttcattatatgaacgtatcacgttttagttatccatttatccattgatggacaatgaggttgtttccacttttgattattataaatagtgctgttatgaactgaatataaatgtttttgtgtggacatgtttttagttctcttggatagatacctaggagtgaaatttctgagtcatatcttaactctatgtttaatcgttcaagaaactctcagattgtttgccaaagcagctgccctacatcatacactcagtgtatgatggattcacgttcactgcatccctgccaacacttgttattgtgtctttctagtaatatcattctagtgagtacgaagtgttatctcactgtacttttgatgagcacttccctgatggctaatgatgttgagaatattctcatgtggttattggccatttttatatcttg

SEQ ID NO: 98999 - DNA, 1036 bp, Homo sapiens
ggctctcttatttttctcatttcccaatgcctctctgtgggagagctccatgccagttttcaccacgctcaggcaaatactctgcagctgttattggatgggccattccgatctgccttatgaaattccacaagaatgttaggggcacctatgggatctctagtggggtgggcagggtgctgatggggacgctggccgcagggaggaaggaacatctcgggagggccctctgttcctctcccacggcagatgccctcctctgtatgcaaatcagcacagcctttattgagctttacaactaacaacctgatagttggcagttaattcacagttacagataatgcttttatttacataaatataccaagtagtaccctcttattgtattcacttcatctattttcttagaatacttgcaattactaatgaccccttccctttccctcctgctgccctgtccaccctctttccccttctaacatccttagagggatgaaatctcagcatatgttgcaggacaccaaaaggaagaaaacaatcaagcaaataaaataaacagtcaaacaaaccaggagtttaaaacaacaaccccaacaacagaagccttggcaaagaggaataagtgatcagcaagtgaacacactctatgtcaactctccttttatccagctgagatttatggtaacttatttaattaatggtcctgtctgatgcatccttgatggcaagcttcaaatctgatttggtatcaccgaggaaaccttgcccccatcactcagcattgcacttagatacagaatgagttagataaacttggcttgtctagagacccatgtcatcttaacctaaagggaaatcttattgcgttatcataaaattgatgatatcttagggtcagaattgccctttttttttattttgaatgggaagttctcactaaaacaatcctgagatttcttaatttcatggttctttaaatattataaacacagagtcaacatagaatgaaattgtatttgttaaaatacacacattg

SEQ ID NO: 99000 - DNA, 1092 bp, Homo sapiens
actcacagtactttgctgttccccttcctgccctttccacggcctgccttacatcagagtcatagctgtgcaggtgccaagggtgagagttttgtcctggtgaactgtggagctaggatttaaacctcaacttcacctgcctcaaagactgtgctctgaatgagtattcaattatttctttcccgtggatattcggccctccccagtttcatagcaatccccatgcctatgtgttatattgccattgtgtataagaggttcccaataaatacttctggaatgtatcacacttacacatctttattaaaaagttattttcttaaagggactactcttgtcacaaagatacaatagtccttaacttctgtgttttaattttttatatgtggcctgtattgtcccactaaatataaccattgtttggaatcattctgaccaaatgtcccctctcagttctcacggtttccacggaccctcttctggtctttctctcctcgcattcgtagtatttctatttgtgtcactaattttaaatgtaagtatatactatttcatattatttcttagatgatctcttaagttttatgcctttccataatgcctatgccccaataatagtaattctgtgcattttgtggaatgaataaaacaatgaaaggatgaaaatcccttcttggcatattataaacacgcttttaaaaagacagtatttgaatcgtttggaattatttttcttagttttcatactgcctacctagctaggtgataagccagcattctactcttgattcttctgtagatctttcatttattatcagatcaacagatgctcatcagttcaaaaacagtttaggttaaaaaagaactgggcactgctgttatttttaaaaattatcttgggaaggaaaactatcatgctttaggccataatttcaagagaacagtttttgcgtccttggcattagaagcaggcagcctaagtgaaatcaaacattgagagatttggaaagagacccaggctaggagataagtttaataaagattttgtttttccaactcagtgtccttttgattccttcctattattcaatt

SEQ ID NO: 99001 - DNA, 1052 bp, Homo sapiens
tttctacttttcacttaatctttctgcaggatctaattggtcacaacagtgggagaaatagtcactagcattgcttataacgtatgtcatatctactctgctttggagaaggaatttttttcctgccccacctaaaaactagactagaacttaacagtatttctcaaaggaaggcagctatagaatcctggattttggctggcggtcaaaagaagagtttccttcaggtacttaaatgaatagtttaaagtgaaagcaaagtttctgaaagtcctggatacttaccattcagccaaggtctttcttgccgagcaccttgagaatgtgctgttcatctgtgcaagctgttaaagtaagaagcaaagtatcaatatggggccagtgattggcatctggttatcactctcttgagcctgcctcacttaaaaggctactccaggctcattaaatttcacagttttcatagccaccatctgttcgctagaaggaattgccataccattccatgactccagcatattttccattatgctggctttatatagtctacatttatgggctctctttggcatcagcatccgagacaagtaggtttcatttctccttaattatgcttttactccagggttttagcttagaagattccagtatgatcatgttccatgacttcctcagacttcttttcatcaaagggaaaatggctgcagtttaaataattttaagtcattacagtagtgggcagttgcagtgtgactcttcaaaaacacaaacaaatatgctttttcactttcgaatatggcaatttttttatcaaaaattggataatttatgaatttaatgaattcttgggacaattacttatgttttgaggaagtcaaaagaaagttcaatgcttactgttgttcaaaacatttcttgaaaaacaataatgtctatgcagctcagaccatttccctgtgccctaaacttcatggctgataaacaaactcatctcatccaaaacttaattcatcatttttcttcctaaattgttctttcttctgtgagtggca

SEQ ID NO: 99002 - DNA, 1049 bp, Homo sapiens
gagaggattgtgggtgttaatgaacctcgtatgagtggatcggccaaatcacacttggtatgaacacagtgatttacctgctggtttgctgtgatgaaactttagccatttgatttcttaatggagggggattatagcttaatatctagaatggagtcttcagcacgcgtatgctatgtcctcaaaatagaaacttgctcctttcaaatatctgtctctgagggaccagaggatcaggggtggaaaattctgagtattttcaaatccagcccaagtatcatcacactttgtaaaaacgactcagcataatgaaggagtcacggtgcctctgacttcatccaggatatggaagttattgttatattcccagtgtttgagactgtttttgcatatataaaagttagaatggttttcaaaaattggctattttaagttcttggctagctcctgcacatccttcacatttcaacacatgtgttacctcctctgagtggcttccttcaactcctctaatcccactgaaatacctcccctcttgtcacatatttggcaatttgtattgaattgcctgtcatctgtcttcctgactagactgtgaggtctttgaagagagggactgtttagtttttgtgctttcatcacctagaacagtgcctggtgtagattaagcattaggtaaatgaatggatagaatctggattctaccgtatgctggctcctattgtgctcattttgacaatttagttctgtttggttggttggttgtttttttgtttttctttttttcctttttttgtgtgtggcttaaaacatagttttgtattcatgtttcctttcaacagcaattgtgttagaagtagaaaggttgttggtgaatcacctggctttccttggattatataaagaagtataaattatactatttccatgcttatgaaatgttttacttgggggtctatgtttacatcaatagtttaatgtcaagcatacaaattattttcatccactactggcgaatccatttgaccactggagtagaacctttggaa

SEQ ID NO: 99003 - DNA, 1574 bp, Homo sapiens
agggttgaacacagaatttagagcacctaatttcacctggagggttaggaaaaggctaggaggtgaggaggtgacttgtggtctgtgtcttagtgtgaggggtcattcacaaagtaagtcaggaagctaggatgggtgttggagagccatgcccgggagagaatgcaggatgtgcacaaccacagaggtatgtaaggatgtgttgactcagggaaaggtacctgatttgttagggcctcagtattggggtgaaaatgaggctacaaaggtaggtagaagccagattacagaaagcctcaagtgccttgaactttgtccagaagacagtgagcagccatgagttttaaggaaggaacctgatgagatttgtattttatttttgtttgttgattctttcacatgaaccatggaagacaagttttacccatgtctcctcctggccaggcagccgctgaggtgctcacaggtcatgccttgggagggtggactggagaacagggaggcaggagaggccccgcctcacctgtcccctcccctgttgctggactgcagctgccttgctgcctctgaccggcagagtcccaggcaagctccctcctggacccacttcacagcttccatgccagtgctccatgcccatctccttcctcccctgccatggcttcaacctcactgccctcctccagaatacctgagagtgtttctgcttaaacatcttctttttcccatagtataatgggggcacaataattactggatagattcagccccttggtcccaggctctgctcttttaactttggatttaactgatgcttgacagaatacagagaaagattggtctcatcttacatctttccatgccactatttatctcctcaaatggaacaactggagatgctaaaaacccacttcttgaaattacaggacagaaaagaacttgtagtacttcacttccctggcacgtcttgagtgccatagacacttaatagtggctcatgcctcagtggagaactggggaaacaaattgtagaaaccaaaatggaactagagaggatagaaagacagatagtatagcagcttaaggaaagagactcaaatctttctagaggtttcccatctttgattcctcagagcatatattcttgacaaactgcaaaatgattcaatagatatgttatttttaaattaaaaaataaaagtgtcttcaaatctttgaagtcctgttgaattaggataagtagacacaatgaataaatattttgaataaaacaaaccatatagcagtcatggcaaataaaggaggtcccaaagaggcttttttagagttaaaatacaatttcctggccagtcttctcagccccgacttagaccgatactcatcctggtctttgatgagtaaatttgctttggtttctgatttataataacttgacaaaaagaaaagtatatcttttaaataatctactttttgcttttttcaatttatttcctccctttttgttttaaattgtttccacaggcacttgatattacatacagttctactttggaaacatagcatcacttgttttg

SEQ ID NO: 99004 - DNA, 1045 bp, Homo sapiens
tcttctgcttttagctgcacttcccagtaaatgccaacatgcatcatattctgcaaacactattaacttttgtttgtccagcatttaactctttgtggcatgcactccttggcttcccttgatgatatagtcacctttaatggaaggaactaaagcagctttataaagcaggaagtcatgttttgtaactcagaacaaggaagcttagagcgtctcatattgcaccttctctttgctccagtggtttcatcatgctgctgccaaatggttcttctaaaatgccatctgcatcagcatgccattcctctcccaagcccttcagtggctctctgctggctgctaaatcagcttgaagcatcctggccaaatttatttctcctttcattaaagtttctgctatagacaggttacatctcaatatttttctcttgagtcacatttttgaacctactatatacctaagcactgtacattttatgttgcattatcattatgtctttagatatttggtcttccctgcaagagtccaagcttcttaagcatagtaatcatgttttaactaccttggtagcttcaggatcctgtagaggtctgctgagtggtaagttttcagaaaacaatggttaaatgtatttgaatgtatgtatcaacaatgtaaacctaaataataaacagggagaggctctctaaaagaaaatgatatttattcaggagtaggcattgcaatgggaatatgtgtaacatagtaagctatgtatgtattcggggaggtgaaggaaagcagaggtttttagagaaaaaatgaggaagattacattattgtttgagataattatcctttgccactagcatccagcaataacaagggtggttccagtttgaggctggacaggaaggtactgggaagatgtcctcactgaagtattttgtttaaggttgagatggcttttatgtgaggttgtgttttctacagtcttttatgatagttcttgttatcaggcattcgtgcatgagaaccttctcatggccttccctagctctattt

SEQ ID NO: 99005 - DNA, 1030 bp, Homo sapiens
aacacagctttattgaacaccttttgaatacaaggcatgggattgatggtaaaatgcaaaggtaaatgaaatgactttcctgacttgaaagagtcatgttcttacggaggtcagaagactctagaatcaattgatgagatctttcatggacttcttgaaagaccaagggagtcacatcaaattgtgtgattaagtttccctcatttgcatgaagacaatacctgtacttgctctttttttttttttttttacaagtatatgtagtatgaggatgagagagatgtgtatgcaatgggtttatcattgttaagctatctctataattaaaataattgtaataaaatagttgcaattgtcatagtttatttaaagaaaaaatatggtgcattatcttgtatcattttcctagttagaaagccttgtcttcagctctttaaagagggaggtgttcagaatccagaaacgataaggagaaaggaaggaagaagaaaacatagttttaaaaagaggtgactcgattttctactgaaatgaactatctcctttgaactactaaggaaaataaagcagtatttttcttaggccgtatcctaactgcttgctcgctgtgaattatgaagctttaaagcagtaaagagaaatgtgtgcttttctcaagtgactagagagtgaatgctgtgcattgtttctcacatgtgatgttaagttagagcttgcttcacagactccactcgccctttgttcttgaaaagtcttgccatcttggctgtgagtctggtgaacccttttttaatggtcatacaacaaatactgtagtggttgaaagttggctgctttcgcattgcttcagagtctgtgtcatcacatttgttattaatcaggaacataattatatttgaagcatagaaaagaaaccatttatcttggcaggatgggatgagacagtcgcaattcatatgcctgtaaacccaccagctaagtcaaatcactattgccagctcaatcgttttaggttaacctggaggcgaaa

SEQ ID NO: 99006 - DNA, 1132 bp, Homo sapiens
aagagaaatagtgattaaaaggtgtttctacagaatctcccaaagaacatataaaccatcagttgggaactattcctaattatgcttcagtctttaatatactgttttatttttcagtattgacatttgtatttgacattgtcaactgaatgaatttatacaagcagaaaagctatagggcttatataatatctgattcttatgctttcagtggaggtaacagaaacagaaggaaacttaacaacatctaatcaaaggaatatagtttccctccttactgcaaatacaatccgattcagctatattagcaatgatatcccaagttgttgtgcttaggtttttagtcaaaatattctggaccctgatttatatctagtctgattttctttaatgcattcaaagctcagcattctctatatgcgacaaagaacatagcacatatgtaagacggggcgagggggttgttacttttacgatgctctcccaacaagtgtgacttcttcaatttgaagtttacagtaagacacttgtataccagcttaaagtgatttcacacatgaggtcagtagaacttcattttcataatcatgtcatgtatttctgtcctgaaaattccttgaaggctttattttatcttgtagcagtggtggacttcaaacatcgctgtttttgtagaaatgtcttattctttaatcaaactcagggtgacattaacaagctattttcacagctgacttcccagtgctggagctttctagtgtgttttgtatgttcccgctttgctcttcactttcgatttgtttatttttcatgacacatctgaatgccttcttgtaagcagagcccttgtcttgagatccaactgtggggttattattacaagggcacattgcagggatccttagtgaggggttaagagacatggttcagaaattattttcttttctgaccaaacatatgcatgatgtttttcctcccaaggagatagaagccagtcttgaatttctgaaagctctgagtatgtaggaccctggtgcttttgatgttatctgtctgatcctctttagagagatttatattattatcatctagctcaaccactagaagggaaagaccaataattcaaaagctt

SEQ ID NO: 99007 - DNA, 1071 bp, Homo sapiens
aagcaggcctgggatggattttatctgagcacaagggattttagtgaaccaaaccatctggggagtcaagggaccttggatctgcatccttatgggtgggcatagagggtgaattatctatattctattgaagtagttgacagaagaccagggaatctggtctacatgtattaaatttttgcctgtgcaacggaagcaagaaggcaatgatgctttgcatatatatattttttaatgtaagtttcaccattgttctaggtaagaagcccagtttttatcttctgggagaaaatgaactagatcattagggagtcataatttcctttgtagtttttctaatagtttcattgaaatgttgtttgatgtgataaaaagaacctatttttaattttaaattagcatagggaattaaaatgttaatgtatataatcttactataaattattacaatcctattactaaataaaactgagtttggagtatgaaataaatataaaggtgtcttagtcactttggactgctatgacaaattccatagatggagcggcttaaacaatagaaatttgtgtctcacagttctgaaagctggaagtccaagatcaaggtgctggcaggtccagtgtctggtaaggggcctctttttagttggtagatggctagcttcttgtatcctcatgttggaggtcagagaaggaggaggcaagctctctggtgtgtcttcttataagggcacttgtcccccatcatgagggttccaccttcataacctaattccctccccttgaccccatctcctaacagtgtcatattggagattaggctttgacgtatgaattttggagggacacaaacattcagtgtgtagcaaaaggtatgatgttccaattatacaatgtaaaaataaaaacttctataaaggggaaaggggatgattatattctttcaaaagtgagtgaaatcaatgaggttttcctccaatcactttctacttctttccagttgattcttttaggcagtgaaatcatttcttgaccaagagataggtcttctagggagaaaatcctaattttc

SEQ ID NO: 99008 - DNA, 1138 bp, Homo sapiens
tcaaaaagaggaacctttgcccggaagaggttaagctctgttaatatttgatatctgatgagcaagccttattctccctgcctgtaagatctgaaatttgaatcccagggtaacctcctcttcgtcaacttccttggtcctgagagattgaataaagttgctgctaagattgggagggactttgaggctttagtacctgaaagacagcatcttctccaaaccctcatggaggctgtcctgggtgatgagccgcatggcaggtggaaatcagctttgctgggcttggatccttccagggcactctgtgactggctctgcccactctgggcatcagttttgactcactctaattgtcaggtagaggcccctcaggacagttgccatctataacaggacctagagggttctattaagatgacagagggatttgatgagaatgagccctcactctgtgataagaacaacaaacatctccctgccaagttataggcagcaccagaaacgatgcagaccagcttctggtgtcagtcttccatttctcttccctaaggaaaagctgcaagctctgagctagtttggagaggaaccgtctctgcttaagtctcgctttcctccttttacctgtgggcccacatggttcttcctcttgatcagcttctctcttcagaattctaactagtgagtcttctattaacaatagcttcttcttgctgctgtaataaatgaccacaaacataatggcttagaacagtgcaaatttgtttactttttttttttatttgtgatgagtctttaaatgtattttttttaacttgttatagaacagttctatatagtgttctacatagtgttatggaaaacacaagcttgttctcacacatttatgcaggtgagaagtttaggatgggtctctgtgaactgaagtccaggtgttagcttagcgatcttcctttctggaggacgtaggggagaatctgtgtccttgccttgcctggccccctgcttcccttggtgtgtggcccattctccatcttcaaagccagcagtggccaaatgtttctcatgctgcaacactctgacactgactattctcccttcctctctacatttaagggccttgatgattacattagaccca

SEQ ID NO: 99009 - DNA, 1007 bp, Homo sapiens
cacatagagcccttagctcagggtctgacctttctctcaagcattctgctaggtactgtacacatgagagttcagggcgacttgggaactgacagtactcagcaggtgaagccactggtggcacttgaacaattgtaagggctgtcaagttcacactccttgcccctagccccacccatttacaaagaactttaaaaaattgcatatctcagatcccaggatcaaattcattttcaaatggactgtttccttctctcttgaggggagagattgggtttagccttgctgaattggttattcagcttttagctgcctgcagcagaaggaaactcactgtcggtgattgaatctcccctggggaggatgggccgcttcctttccacatggcgctggtctgagtgaagtgggaccagatcagattagagaccaggataaaggaagtgcccccaatctccctggctcatggaaattccttcctattattctgaaatggagataaattatgtgataacatgttacaacgtggtgatccctcttgcgtaaggatgtttcaaaagtctattggccaataataatgataaaaaatctttgtttcacagaatgcacttgctacataaacattcagcaggttaactgacgcaccacaaattctgtttgctgcttgggaattttgtcagagcagtgcgtttgtctctgggaacatttgtgtctgtgtctgtctgtatttttctaggtgaagaaattcaggcctataaagagttgggaacttgcctaaaacctatgttgtttatagctagcaatgtggcttgcctccttatgtgccaggtgggatgtgaaatgcttcacatgggttatttcttttcattccatccttataagtcaggcactaatattgcacctatttcataggtaagaaagtcagcccagagaggcagaagttcagaagcgatagagtcacttctcccaggttccatgtctgggaatccatacagataatgtaagaaact

SEQ ID NO: 99010 - DNA, 1125 bp, Homo sapiens
tctccattctggaagccagatgctgaaatcaaggtgacagcagggtcacgtggccattttccccaagaaggctctatgggggacctcttctttgcctcttccagcttctggtggcttctggcatttcttgggtcatggaagtatgactctaatctctacctccatccccataggtccttcctctccatgtgtttgtgtgtctcaaatctctctctcctgtctcttataaggaaacagtcactggacttagaagccaccctaaatccaggatgaccttatctgtagatccttaactcagttacatctgcaaagaccctgtttccaaataaaatcatgtttgcaggtactgggggatagcaattagacatatctttttggtggacatcatgcaatccactgcatcctagttccttgaatccataatggatccagaatatcaagactggtgtctgagtctgtttgagctcctataacaaaatacaatgattgggtagcttgtaaacaacagaaatgcatttcttatggaaatttatttctagactgggaagtctaagattaaggtaccagcagatttaatgtctgataaaggattgctgtctgcttcatagatggcgccttctatgtgtcctcacatggtggagggggtgagcaagttccctcaagcttcttttgtgagggcactaatcccatttataagggtcccactctcatgacctaattgtctcctaaagaccctatctatcaatactattcattggggattagatttcaacctatgaatttgggagagataaaaacattcagaccacaattgctgcaaaagaataattcatgcaaataccctgttctttgcagagcacagtaagagatgctttgtccctgagtttcaagggagggattaggaaggtgtctatgccatagtctctgctctcaaagtggtaatcatgataactagagaagaaataatgaatagttactggatttttatgagtgatagtctgtaaaagggctttcttgaaagtttttgtttaatctttccaaatatgagataacctgttattgaatgatattacagacttattccttcatttataatatattttctttagataattggcctctgtt

SEQ ID NO: 99011 - DNA, 1004 bp, Homo sapiens
gacttaatgaatggtaaatgtattttctcttccttatgattttttaatagcatttctttcctttagcctattttattgcaagaatatagaatgaaatacgtatacaaaatatgtattaatcaactttttatgttattggtaaggcttctggtcaatagcaggctattagtagttaagttttgggggaatcaaaagttatatgtggatttttgactgcatgggggcttgccattcctaacatctgtgttgttcaagagtcagctgttgtataggcaataccttgtaagaaatatctttctagaaaaaaaatttattataagatgttggctcacatgattatggaggctaagtcccacggtctgctgtctgtgacctgtagaaccagaagagttggtggtgtagtttgtaggtctgggagccagagacgtgatggtattaaggccagtccgagtctgaagactttagaaccaggagcatcacaggcaggagaatatagatgtcccggctcaagcactaaggcagagggagtgggaatccaaccttcctctgcatttttcttgcttttaggccctcaacagattacgtgaggcctgactacattgaggagggtcatctactttactcagtccacaattcaaatgataatgtcttccagaaataacttcacacacatccccagaaacaaacgtttgatcaggtatttggtcagcctgctgcttagtcaacttgacacataaaattaaccatcatatcctgcttcttccaagttagtgtaaggccattgattttttgtgtatatgctgtgcctttgacaccttgccttgttcccaagtagcctgtaaaggtattatgctaaaccaaaggagaaattatatcattcccttaagaggcaagagtgtcttccattactgatggctttaaataaagaacagatgacatgaggtaaagcatttgaattattttcacccactgactactattttaaggaaataacttttaagaca

SEQ ID NO: 99012 - DNA, 1068 bp, Homo sapiens
attttaagttatctcattggctcatatcaatggaagaggtcaaatcagttgagttgtcgatattgggcatgaagaattaatttactttcaggtaacctgtaacaatatgctgacctaattatcgaaggatttgagatgaaatcaaacttctgtactcttacatctgcaattcacatagttttcatctgggttgtgtatctcaaagggaagaagccaggcaataaatttgaggttagtctgttgatactaatttaggtcacagaattccgtggaagaaattggtaaaggtgattgccgtaggaggactactcaagtcacagggaatgaagagagttctggctgagggaatagtgccacctactgaattgtgtttgtgttttctacaggttctaatttatgcaggcttatgcctggaagtgttactttcctttattgatcttgcacatctccttaagtagtcactgccagaactttaaacaatatttagttattatcggatcaaggtgtaattagaaacagctgtgaacaattgcataccatccagctcctgaagtagcaaactaaattgtacttggccttggattgattaatacagattgtgtctagcaatcaaaataaatccgtctccaggtagagtgccaggagccatcttaccaagataacacagaaagattaaaaatgcatgaaatgcaccatttcctaatgtcgccaggttaaaaaaaaattaaagcacaaagcattggctacaacaaaattgtcaacatttttatcctttttcaaaatttcagccttgatctttactttgtgtatttatgaaagcatatttagaattctctcatctttcgcctaagtatttaaaaaaaatctctacagtgcagtgcatacattgtaatatacctatttaataatgacagcatttttagttaatttgaaaaatcatttggaattacatattgaattgggtgggtcagataatttgttaccatggtgaatctcttcattggaattaaagagtttgtctcataaaattatatgcctctgtgtaatatgttaattaatgctcctaat

SEQ ID NO: 99013 - DNA, 1039 bp, Homo sapiens
ccccaaacaaatcatttcggtccaggaagtgaaatacactagctggggatgtttcttctgtgatggagccaggcatggggtctgtttgctcaaactatgtggactcccaaagggaaatcagatatgttgggaatgaagaagtgagggaatgaacactggagaaccaaaaaattactgtctacaacaaatatgatccattttttctgaggagggagtccttatacatatacattatacaccatgagaccacaatgtagaacattagaccttgggccactgggtatcttgtttcttttccaggcttggttcagtgatcacccaagtcaaatgggtattttactgagtactagagggaacgcagggacttctccaagacgttctcggtacctatattgaagagcagggatttcaatcagattttggtgatggacagatagaagagggaaactgcatgagttaaaatttagtacaatttttataagcactgagtgtttttagagcacagtttttacagcagatgtgctagcttttacacctggtgatgtgagtatcactgctgttttcttcccccttctgagggtccaggagagaaggcagggtctgctccctgatttggcagtgaaggctgcatatcagacagtggaacctgcaaatttgctgttatttatcgcctagggatccaggaacttgtttgcctttctctaggaatgtggtttctccattctaccagctaagggtccagtgttttctggggaacgtagtgtgaagggaatctatacccctttgttttaatttggccctctttgaacatctgcacaaagcaaaatcttcacctgttctacgtagggaactgtcgatgggtttatttgtcatctgcacagtctctcttgtgaatattccagtgtctcaaacagaacaatggggagttcattcagtctgctttcaatggccttgatgtgtgtatgtttaaaaattagccaagcaaagtgcttcatttacagaaagcataactcttagtgctggtttatggagcttaaat

SEQ ID NO: 99014 - DNA, 1061 bp, Homo sapiens
ctttatagcagcatgatttatagtcctttgggtatatacccagtaatgggatggctgggtcaaatggtatttctagttctagatccctgaggaatcgccatactgacttccacaaggggtgaactagtttacagtcccaccaacagtgtaaaagtgttcccatgtctccacatcctctccagcacctgttgtttcctgactttttaatgattgccattctaactggcgtgagatgctatctcattgtggttttgatttgcatttctctgatggccagtgatgatgagcattttttcatgtgttttttggctgcataaataaatttgcttaggaaaatgtagcttaggtatgtagagtcagtgggctttctaaaactgccatatcttggttgaaacccctgatatgttactgtcttctctctcattgattttttcctttccatttacgactgaatgttttccattatgatcaatttagtagactttgagaaggagaggcgatacatattgaaggacaatttgccatcttttcccagaaatcctctctggattgttaaatcctctctaacttgctaattttagccatttgaactttcctttcttgtatctttatttaagatgaagacagtgacacttaagttactttcaagtttaaagagatatttataaagtacttcgaacttttttgtgggagcagtactatataaataaaatactgccattcaaatacagcccccgccccaggtttgaatgtagaggtcaatgaactatagagaaaatggtaacaaataagatatgaccaaaaagtggcaataaataacacggggtcataaaaatttcataaaatcctcttttaaatatgaagggggattttttttttcattacatccctgggtgtttcagctcctgactatccagctagtagaatataaaaaccactgtaacaacaggtgcagatgtgttcctgggtgtgccagttgttcatttctttgtttttaatgaaaatatacattcgtttcttggcaagagaaatgatgtctgggcttctgtgcgtactgagtg

SEQ ID NO: 99015 - DNA, 1073 bp, Homo sapiens
tctggctatgtttaaataccaagaaacctgagcaaacactgagtaaacaagaaattcttaagtttgaggtctcctgagataaggaattatgtgcaagtagccttttgtgcatgcagaaacactgatggaggtcagggaagtggagcagggaaggggaagaggccagtgaaggtgctctctcctagttagctctcaggagtgaggtaagtggagcttagtcctgtgtggaaattctcagaaatggaaacaaccacccctccccatcccaactcagagttaagccacttgcagggccagggagctgaggtgtttatactttaactctgctactcattgattgagaactggggcttccagggggtgttaattccactgcacttttctcccttggctttggaagaagcttcagggcacaccgaagtggggaggcctgagggataagggaagagcactgatactaccagctctaggcttccttagcacacggtctaagaaatgtgatgactggccttttattttgaaacaggaaactcttattttctcaatgtcagtgtccctggttcaagttcagctccatgaaggcaggaaacatgcctgtcttattcaacactgcatactcagtagagcgcatgactcagtattaataagaagattaatgaatagatggctgaataacccagcagtaggatttaagaggtaggttctttattgtgtttcaattcaaaatagatcagagcaggtaagacacaagctggtaatggaacttgacagatgtcaagtgctgtttgccttcatgactcttagaaaacaaacagaccaaacacaaagtagaattgtgcctgggagtagcccgaactgcttatcgaaaccattggcattttggtgaccatgcatccttgagtcaattcaggtccactgaatttggacagaccccatgctaggtcctacccatgtaggttgatatctagtcctgggttgtttggaattatgttgggtttaggtggaatgaaaacaaataatgattggcagtggctggtgaaatatctatgctgaggtggactcatggagagctc

SEQ ID NO: 99016 - DNA, 1362 bp, Homo sapiens
gggtgggggatatgtccaatgagggactcagttgaggacaaaagggacaaggtgagtctgggcagatgggcctgtttctgagcagaggtccgtgtggccaaggagagtccagcctcttttttgcttcgtgctgctcagttcagggctaaatccaggacaaacaaatgacctacacgcagctgcctttgcttaaatcagctcagcagactgtgttctcaaacagctagataaaatctggcatttactttgtatctggcgacctttgctttgaggagagctgcttttttttgttgttgttgttgggaatcttgcatgattgggttttattataatcttgcattaaagggcatatgcaatttccaataggttagtaatgaaaatggttcagtcttactaaatggacgctatgagctctttttaaatggtatgaaaatttgagggcatcttttacttaaaacttacttttgagtagttttttttcctccaaattctctctttctttttggtgttcctgttcatcactccattttaagagtgggctttagtgttttgaatgggaagcattttcctaatgtggtataagattaggagccagaggaacccagacatccactaacatctttagaagggaatatacatggaagggctctgttttctgtaggctgggtgggctgggggctgatgggagccatggaggtccctagcctgcaggctctgtctgcgaggactggccattctttggcctctgcttgtgggaaacccaggactttcacagcttctctgtatgaatggggaggggcacagagcctcagtatgaggagacacagaattgagatcatgaggggtaagatttgttgatggtcttgggaccaagaggggagtgaaatttgcaccttctctttttaaacatttgcaaaccagaggggtgagtagtgaaagagttagtggttaaagggatcacatgcaatttctttggactgagttttcacatctgacctttccagagaggatctggctttgggttggggcctcaccctggggtcagctctgctcttcacatggtctccatgtgtcctccgtccttccttctcttgacttgtgcccggtgcatagggacggtcccacttccttcttcacatctttttctgattcctccagaccacaagagacactttccgcctctgaaatgtcagaggatgtgtagtctcgatcacatagtctagctctgtacagaatttgacacttaatggcaaaggttaatttcaatatgggtcatttaaaatgcctttataaataataaaatatatttaattggatataattagtaaacattcagaagaaatggactttttttttattgtg

SEQ ID NO: 99017 - DNA, 1027 bp, Homo sapiens
ctccacacctgtgggcgtttctcgttaggtggaacgagagacttggaaaagaaagagacacagagacaaagtgtagagaaagaaaaatgagccgcggggagagttctcttttctttgtgaagggcagggtgccctggaatgggttcgccccgagagaggggcccgtgccttggaaagcgtcgctgttctggcggcgtccagtgaaacagcagttgaacacgggtcagtcggtcctgagagatgggcgagcgccgttccgaagggacaggcaatggcctcccttgccctcagcggatcgaaagggagtcgggttcagatccccgaatccggagtggcggagatgggcgtagtggagttgatggcatacgaagacgccaatcctgagtgtcaatcagccgttaagtcattaaaaggaaaggttcccgcaggctcagatgtaatctcagagtatttaaaagcctgtgatggaattggaggggcaacccaccccttcagagggcttgctaggtggcaggagacctggcctcatccccagagattctgatccagcaggtctgtggtggatcatggaaacctccatttccagtaagttctcagatgatgctgatgctgtgaatccagactttgagaactaccatgctgaaggtttgaaatctttttcttagttacattgacattttgagactttttttttccttcctaaagcttcattctgtcactggaagcataatgttagcacatacttattaagcgataattatttatcaaataatgtcttctatgcgcatacagatatgcactttagatggattactaattcccaactaactgcaatatttataacacttaaaattatgtaggacataatttaatctttgatgagtcgaccaatatctctgttctgtgcattgcctaaggtgtaccttataaacatcaatcacttctggtactctagaaaaaattaggtcacttgaactttctgcaaagactcatcaagcagaggtttaaaagatgaaggagacttcag

SEQ ID NO: 99018 - DNA, 1051 bp, Homo sapiens
ttctctttctctgccttttccttttttaatttttttttcaggggagaagcaaatgcatcccaaagtcttaaaaatcatgcaaatatttgtcatgacactgttagaccatagctgaccaccaagaaatgaatggaagccagttggacaaggtcaaagcaggataggtcagagtcaactcttttaatgcccctgttttaaagatgaagaaacctggagagaatgaatgtcttacctcagccacactgctttttttgttttgatgatgtgtatttgtaatgtataatttgtgtcatggatcagaattgatgagggtaactatgggtttaaaagtcaataggaataagtagggataagaatgtgaagggtaaacatattctcagtgacacagtggtaccagtctgtatgtaattcagcaaatatttttgagtcatttcagcggatgatgaggctaaagccagattagcatgggtttatgagagaggggcaaaagggatactggagaagagggtgaagcaactttaaaactgaggttttctatagaggggatgggagaaatgggaaaatagctgtggtggaggagagattaggaggtgtggattcgaaagaggatttttgttttgtttttagccaggggaaattatagcttgttttatgctcatggaaatgatcctggagagaggaaaacataaatgaaataagggagtgatatggtttggccgtgtccccatccaaatctcatcttgaattcccaggtattgtgggagggaccagtggaaggtaattaaatcatcgtggctggtctttcctatgctattctcgtggtagtgagtaagtctcacatgatctgatggttgttataaggggggggtttcctgcacaagctctctttgcctgccgccgttcatgtaagatgtgacttgcaccttcttgccttctgccatgattatgagacctccccagccatgtggaactgtaagtccaattaaacctctttcttttgtaaattgcccagtctcgggtatgtctttatcagcagtgtgaaaatggacta

SEQ ID NO: 99019 - DNA, 1757 bp, Homo sapiens
gttggaagacagataccttacagagaaataaataggctcttggtgttgtccctgccaatgcaaatatatgaagtgctggttgacagagcatgagccttggcttcagcccagcagatggtttgtagatagaactacgggtaccaatacataaaataaaatgtttgagttggtcgctttcgtggagttgttagtatatttatttaacttatgatgtcacggttaaagagctagaattgggtctgtttagcttagaacataaaaacatacagcaaatccttcttatgtatgggtgcttatccaatgtgttttgatcatgaagaggtttcttgttcaagttcagtggggagaatttataaactgaatttaagggtcttgtcaggccatagagtctatttcacttaaatgagtttcttactttcttatacattgtttattgtttctctgtcattcatatccctttcctgataactcttgggcagaatatttcaatattcaatgaacattgaaaagctaaaaataaaaattaaccattagtcttgatagttgctaggatctttggggttttttttttttgtacttatactagggttttgtttgttttttccttaagcaataattattgatttgtttttatgaggaatgttcccagagtgtggcttcagatgaatccgagcaacaaaaattaccttggcaagtgattttgtgtatacttatattttttggtctgagtaagaaaaatctacatttcacccaaagcacacaggatctatttctgcatcagccagataatgagacagtaattggtgtgtaagccgttcattctccaagttttctcacggggcataatttgtctcttatttgtcagggatgggttctacgaaacaacactcctattcatgatgggcagagcaaatgtacgaaaacattatcatagctgggattaatggtccactatggatttatgtcaagaatgttaatgatttgtttatgaataagtgggcctgtcgcatggtgaaacagtagcctgcagaactgctgaatggacagtttgcttgcagaggattcttgcaggaaataaatactcttgccaggccttttgcatctcttaagtagctactgtgaattgactctaagatttgaaatggtggcattgacctccccaaatcctgtgatccctgctgctgatcttgtaactctacattttgttgacataatatggagaaagaatatctttttagggttgaatataatttgggttttgtgtgtgtgtgtgtaaaaggtggtgagaaaataataatttaattaaatctcccgctgagcaaagtgcccacgacctccacccaccagattgtgtgttctttttgaagtgtattttaatttgtggaagatgtgaatttgcggcaggttttaattggtagataaaagtgttaattattgccaagtagagtctaggaaatgaaaaataaatcaagattacttagtgattcatacatgtacacatatacagatggaaagatacacaggtagatagctgtaaaaaatatagtatgtgtgtgtttgtgtgtgtatgtagtatgtgtgtgtatgtagtatgtatgtgtgattgtgtgtgtgtagcatgtgtgcatgtgtctgtgtaggttggctgtataaatgtttaggatgcaatttaatgatgtgtattctagctactttttaaacatttatgttttcaggaaggatgatgttgactttctcttgagaagagatttaaagtt

SEQ ID NO: 99020 - DNA, 1087 bp, Homo sapiens
ggttcaggccattctgctgcctgcctcactctccccagtagctgggactacaggtgcctgccaccatgcccagctaattcttttgtatttttaatagagacggggtttcactgtgttagccacgatggtctcgatctcctgacctcgtgatccacctgcctcggcctcccaaagtgctgggattacaggcgcgagccgccatgcccggccttgccttctaggtttttgtgtcacctccttgcttcctgtttggaatggatcctccccctcctttacatattttacttttttttttttttttaagttcaagtagtcgctgtctgatactaaaccatctcagaggtcatgtcaagagaaagaaaggttaataaacaaaaatttagggaagcgggctttataaaaagtaatgaccttgctcttgggagatattttgtggtttgaaaaaaagtgattatggtgaagattttcaacatgtatgttcattttccttggtaataacctttccttgatagagctatcatggtagcctgctatcaatgtgatcctaagtgcttgaattttgaatgctctggaagatcagaatttctgcccttaagcaattgacaaataaaaatgaacctgagtaggcatggagggactattatacttagcattaaaaataaacttatctaggagagaaaaaagaatagcattccacttacatttgaagtaagggcatctcaaggatgatgaaggatcactatttttcaaagccagaggattccaggctaggttgcagtaattaataggatgtaatatatgaaatggacaaaacatgatcaatgtttaatttccaagtcctaattcaaagttgtgttcctggacaattcggtggctgtcttccatgtggtgattcagggatccaggcttcttccccactgtggttccactgcccctgtggcctcattgactgcacctagttggcacaagtggaaagatagcatgaggaggcacagctacttccttaaagattttgctgataagaggcagatgttctttctgctcacattccattggctagaactcagtcatcatttcatacctaatt

SEQ ID NO: 99021 - DNA, 1032 bp, Homo sapiens
cgaggattactcacatgtgtttttaaaaggttaaaacctaagaccctaatctaccaactctaatttgtagcatctccatcatttttctgctcttttctctgagacatggtcatttagctgctggtcatcatggtggtagtatattcttcttcctgtgagttcttatctatgcagctttctcatcccactgttttggaaaggaaaaccatcagaacacccaaaacaatgatgctggatgttggaggtgagaagcagactgtcagtatcaagctctgaatcgggaggagaaaccttccaatgagtctgagcgtccacttctcctccacagctgtagatgcacgtgcccccgggcatgttgagggggaccacgtggcaagcatcatagttgctgttagctattttaaaaagctgtctttgtagttcattcttctgctgcctaggagtctgccagtggaatcacaaggccaagtattgacagcttcaccttccgagagcccttcttcttaaagccgagtgtctggctatcaagccaggaaggcttgggtcactgagggggacatcctcttctgcaggaaatatgaggttttgctgaactcctcctggtattcagtgatttccagaccacgttctgcagaggtgattctgctgtctcacaaacgattttgattttgattttgattatatttttaaagtatcttttcattagttggaaaccataatacaaggcaacacaaatcgtttactgtgttatgcattacatttgaacaggttggttggtaaaccaccagtacattaattggagatcatgggtaagaatttaattcttttatttactttattctgattttatcataacatttctctgccatatctgtgtacatatttgaacttatgataaaacatattcccgattagatgctaacactgtttgtttttggagtcaagcctacacctgtctatacatacccttttcatgggaactccccatggtggtagtttgagtgctcagttgagtgtaggaacgcccaggtg

SEQ ID NO: 99022 - DNA, 1137 bp, Homo sapiens
cctctatcctgccttgtgctgttgctggcaaagcttcagcttggttccattattgatttctgcaacgtgtgcgggaagagttactctgtgattacgacttgtgcaacttgacagtatatggacaggggttgaatgggcacaaaaagaagtaaaacaagtgaagattgtcagtgatttcttttctatatttcttttgttgtcatgctttttttttttttttttttttttgctcaggaaacaaaattgtagagaagttatttcaagtgataaaaaattcatgaatctatacaaacttatgttgtgaacttttgtattagttcatgttgaatcatttcaatcagctgccatattccagtcactctcacaggccctctttggttcattgaaaaagaattagtactttagtggaggataaaaataataaccggttaatgaaagtaaaggactattacagagatagatatgtataaagattttgggctgcacagccgaggaaacactcagttgtctggagttaggcttggggaggattcccatcagaagtgaccattaggctgaatcttacaggtcattatagatggagagcacagtatagtgaaaggctcagaggaatgaaatatgtgttagaaattgactggtttggggtagttggagggtgcgtgaggagaagattaagcaagaagggtagaactaaggaccatgtttagacctaccttggaatgccatgagaagcagattgtctggtggtgataggaaattcttacaaaatcagaatgaattgactttaagtgactttttaccatgaggaacttgggaaataatgattgttcatttcacattgagtatctctgtattatttgaagcttttggagaccttctttataggactagtaattctggctcctctttgtaaattaccaattatacactgaccttctccaaccagccctgcgtttgagctgggtctcatgttttctgtagcatcctccctgtctacaggtggagccacctgctcctctctcaccctccatctctctccattttctgatcccaagtgagattaatgaatcttgtttacttcacagccagggaaaaggagaggctttgaatgaataatttctgactgaatttcttctt

SEQ ID NO: 99023 - DNA, 1051 bp, Homo sapiens
taatatattttctatacttatattctatattttatattgtgtttatatatacacaaacaagtatatatactctataaacattatatacatatgtgtgtgtgtgtataaaatatgtccctttggaaattatagtgtgctgtattttgaaaagtagactgtgatttgatatgtaaaattaaaaaactaacttctttttcattcccagtaactcagacaaagcttcacaagctggtactacaaagacccaaaggcggcagtaaattcctcttttgatttaaatcccattagggtccacacttatgaaacaaatgttgaaaatcctatagctgacaaagcagatgacttaagggggctttataccaaagaggcttataggagttattcacagaagaacttccagttgtaaaagagataaacaagctttggatctgagtggtgtttaatctgagtgtgcataagggccaagaagggctcatattgcaaaacttaccaaagaatctcagcactttaaaaccttagtggtcctggcttcactgaccaaagtttattattctattcagtcagtctctgtctctccctctctttctttctctctcgtttctttctttctaatggtgaagtgcaatatggtatctgcttttggcaccaaattacagttctgaacacctttatttacccatgtatacagctaaaaacttcttgacaacatattagaaacaattactctcttttagattggccccgtttcccaggccaaggttaaacattacaattagagaagtgtataagcaatggattaaaatgtcaggaaaaatatcaaactgggacagttgttttacttcataaagtcttagcagagctctctcccagcatgccttgtgtctttgtaatagtcttaatatggaccatatgtgcaaatagaagaactaaataaaacttaatagatcacctgagtcaagttattgaataaaacatctgctctaaagccaagttcaaatgtcctctttgtagaatcagcatgtgatgatgtagggtacatgaagcaaagagg

SEQ ID NO: 99024 - DNA, 1021 bp, Homo sapiens
agagatggggtttcactgtgttagccaggatggtcttgatctcctgacttcatgatctgactgtctcggcctcccagagtgctgggattacaggcgtgagccactgcacccggccaagagggacctttaagaggtggttaagtcatcagggctcctcccctcttgaatggaatgaaaagccttgtacaagaggcttcgtgccatgttcagcctgccccttagccttccactgtgtgaggacacagcattccttccttccaagtgctgcagctctcacaagacaatcaaacaagcccgcaccttgatcatgatcttcctagcctccggaacggtgagaaaatcaatttctgtttttttttataaattatctactctgtggtatttcgttatagcagcacaaacagattaagacaaggaggtaaaagaagaggagtgggaagtaggtttggtaaaatgccatcacacatctggactattgagacacatccatggcaacatgaatgacagaaacctgattatgggagagaactgaccaaagtttgggaactccagcatagctgagagagtgttcttctgttcttctgaagtagctccaagtgactccaaagccacacacatttggttttagccttgagtctgctactgtatcagtggagtgatcttggacagatgtctcagagtgcctgggctctatcgtcgtcacttgtaaaatggggctgatagtacttgccttgaaggattagagagagcacacgttaaatgcctgttactgcttgatattaagtaagtgggagacattgtttctgtgacatagtcatgtgatggtagattcccagaataactttatgtgcaaagggatctgcttcaaaggggatggggcaattgactgtgaaaattactatagaagcccaattgtggtgcttggatgaatcccccatagactaaagggacagcttgggtttgagttcactggatgaggggctgtgtgctttacttgactagacctaatctgcacctgagt

SEQ ID NO: 99025 - DNA, 1401 bp, Homo sapiens
atcatgttgaatctctttccatggaggtctgtttggctggcgtttcttcttgcttcagactggaatgccgattagccagtttcttggaatgattttaatctctcatctctccagcccatccatttgaagtaactaataggaccacaatgtcactgcatgagctcaccctttccttgctcaagaacaacgataatacttgtcagtgattgcaacagtggaggacagtgttggtgccagcgttccagtgactatttcaaggattaattttagtgtttctagaaagaagtagttcaaaagtcaggaaaaataaatgaaaataaatcttaaacagatttctaatagaaaaaaaaaacacataaacatattgcaaatcacccatctagttaccattcgctctcttgtgtcctttccctttctcgtgtctccttggaagtcaccaccttctgaggtcttagtcaacagacttcagactcttcctgctgttttgctcccttgagtgcaaactttcaggaccacagcctgtgggcagctcctctgctctgcctcaggctctgagtagagtagctgtggttttgattgatttctcctcctgaatctgccttacttttccttttctccagtggagagactcactgcttctgagagctcctcccgccacaggggtcaaacttttgatggcttttgaggggctggagggagagagctgtacttgtaggaactgagtggtgaagaggagcagagaagcctagagagagggtgggagagaggaggaaacactggagagggacaagaaaggggacaaaaagctgttgatcagaggctgagataatagtatcacaactgttatttcagtactcaaaataaagcatgatgcatttgattaccaggatttagaaaactggacttgtagtcactaatgatgtaagaattgctattaatatttatgaagggagtttttatatttaatatttagcatcaggcaccatgctaggtgctctgaaaacgccatggtctttcacaataggtccttgtttgatggtcagtggctatcagaaactccagacttacctactacttacttacctaacctcctgttagctttctcttcagttaaagagatgggtatatttctagtaggcaaatggccccccattctcaccctaatacctgaaatttgagaacattccatacattagtttcccttactgctctaataaattatcacacatttattggcttaaaatgatacagatttatgattttactgattttgaagtcagaagccccaaatggatcttactgggctgaaatcaaggtgttgttagggctgagttacttctggaggcctagggaagatgctgttttcttgcctttttaagctaccagaagtttccctgctca

SEQ ID NO: 99026 - DNA, 1982 bp, Homo sapiens
gcaaattcttggcccctcccgctagcttactaaatctgaaactctgggagtgcagcccagcaatctgtgctttaacaagctttcccagagattctgaggctctatgaagtttgagaacttgttctctatagtaagaaaaaacttaaatcatttttttctcatccttttggttatttgacaacaaaggtaaagcagaatctaagagttcttggtggtgatagtagcggggtgttgaataaaccacttttcaaattaagtgatgtattttaaatagtaacaataattagtggtaatatctttacaatattcttgaggtcattactaatgctattgctgtgttactgtgaggaaacaggtttaggaaagaaggtagccaaagtcaaggtgtttagtagtggagccttgatgatgatgctggtttgaccaatactagcacccatgctgcagcccacttggtaatgctctctgagatgcctggtaatgcctgtctcctcttatccctgcccatgtcttccctgtgaggccagagacttactcgtttctttttaaaaatgcaagaggtggagtgaaagttcgtgtctttgtagattaactctggcctttcttactcatttgtagactatcccacctcccaaactagtagccaaagctaccttgatcaaggagagggaatgctgtactttattcgtaaggcaaacaaatgtttatggcctcttttcttataagtactgtacgctaatcgattgcgctgctagagccactatggcctcttttctttcaaaagtttctctctttctggaagtagtgaattcactgaccaatttatctttgggctctggcctgcggtttttgaaactttccaagatcaactgagcgatgatatggtttggcattttaaactgcgaatatagtataaagttggatgattttgagagcaattcatgctcgaatgaagtctttatcccactgagttatggtctccaacccaacccctttaaaaaactttgttggatgattagaggcaggctttccaattccactcatgacaattgagggattcatttgcactccaagatatatttattttcttgaccaccaaggaaatataatgttttaaagaagtaaggcaattcatattaaatggaaaggaactatctaaattgaaacttaatggggtcatattttaacataaaagtgaaaacttaaagtaaccttcagagttactaattagtttgatactagctccactttttctaccatgtagatttcatttagtagaggagagtaaaagaagaacattaattaaaattggaatgattaattttgttatgtgtctgtgtaaattaattccagtgtcagtataaattaactccagtgttagtaattccatagacttcctttccatggtttgcttcaataattgagaatttatcagtcattctgatatcagaattcaaataagtatttatacgtgcttgtgtgtatggggcgggtaaaggacatgaaaatgtatagatatttaagaaatgtcacttttactccaatttcttatttatgttaggatagccttcaattttaagcaaaacacctatttagaatgtttctccttcatctccttctctacctaggtccctttcccttttctcacaccacttataattagaagcaagtgaacagctttgcacttggcagagattaaaaaacctttttttttctgttgtacaaggtgatttttgtgcaaacaattgctatctcttccatcaaaacagtgttctctctagagaataatgcttgttaggtcagtttggtgtggcaatatttataggggatacgcttgaatgactgaaaattgtaagtggagatgttcacataacatttgtttgcttctcttgtccaccaaagtaattcataactgtagatatctttttatgtgttgactgcctcgttctacaacactgacaggtgttggtgactgcatattt

SEQ ID NO: 99027 - DNA, 1026 bp, Homo sapiens
atgcagttcttattatatggagtgagctgagtcatagcaagtgctgtgagttttgattttagctggcctctaattaggcagaacaggaaaactctattttagttgttggattaaatatttttccacctcatgatctagaggtagaggtctctgactttaaaaatagctatttactagccaggcatggtggctcccacctgtaatctcagctacttggaaggccaaggccagaggatcatttgagtttcaggagcttgagaaaagcctgggtgaaataatgatgtagtgagatcccatctcaaaaacaaaaacaaaaacaaaaacaaaaacaaaaacactgatttactgagtgatagctctgtacctgatgctgtgcttaagaggtactgtgttactagttactagttactagtattttacaagggagaaaaagggtacttatagaggtttatgaatttgtcaaaagtggtgaagatgggagcaagacagttctgtattatatgtaagcattttgttatatgtgagttttgaaaaaaggtaacttttgtaagaaagcaggtgaaaaaatgaaaagattctattttaacttcagcagagaagtggttaggtgctttgcttcttatttggtgatctaggttgattattataacttttctgaccatatgggggaaaataaagcttgatttacaatgctgagaatttgtactacctaataactcactaacttttcaggaaaggatatagtttgagtagctttcagaattataaagaaagaattggacctcttaaaaacctgtgctctcataaagaatactttttcattctgttttatttgtgcaacaatcagatttctgtggctaggttaatagtgttttataggcttttctgggtaaaataaatttttctgttggactgagggcaaaatggaaacagacctagcctaccaaactgtaaaagtcaagcctccacatgttaaaggtgattagccagtaatttaactgctttttaaaacacaaatcaatagtc

SEQ ID NO: 99028 - DNA, 1705 bp, Homo sapiens
aagtacctgtcacaatttggtctgcaaaatgaaacaaacagagcacgaaaaacagcccaacaaccaacgaaactacagccaaaatgaaggatgcaggataaaacatgacttaaacattcccttggcctaagtgaacgtggtataatgggaacagggtagaactaggaattgggaaattttcagggaagttttagccctactaagtactgtctttataactttgggcaagttacacaaacttctgagcctcaatttccccattcagcaaaatgagtctaataaaatctacctcattagcttcttctgagtgtgaaatgagataatatatgtaaaaatgtttcataaactataaaatacgttcaagtattttttatcagtctgctgataaaaggtgtggcatagctgccccagacccccagtgctaattgtcttggtaagcagcactgtaatttgcactctaagtaatagtaagtgttaagaatttgtaagaatttttaatgtaatgtgcacaaatctattctgattaaaacaagtagcatcttcataccttcaggattataattgttgttagtaaaggctgatgagagggaaggaaagtaggcaaggcaatacaagttgcctttttcacttgaacttgggaatgaggagtaagaagcacttgagcttatatccaccactgcatcttttaccaggaggcttggagtgttacaagaagcatcattttcatcttggccttgtttgggagtagggaggcacatggccaagagacaagctttatgaagtcatgtgctccaaagggaacacaggaaaaagggagtgcaagagacttagtcatgcagaagagtttcacacaacaggtgggcttttaagagtgttgtcaaggagaagatgcaaatgccttaattagtttggacagctcttttaagtgtaaagaaaaacatgtctactggtggagatgggctttgcaacacaacagacctgtgtgtgcgattttgatcttaggcaactgaaaagcaagtaacgctccctttctattacctgaagcttctgcttatggagttttgaagttctccaggatggtttttctatttctctgagcactgaagtggctaatgccatggcagatgtcatacctaatgctgcagaggcagagcataaggtagggaggattttgtaggaaccttctgatgggaatccagagagcaaagcctgggacatgaagctctcaataaggaaatgggaaaggaagagtccatggttttacttttaacaaagtagggaattgcttttgcagattagataatatgtgaggattgtggcaatagaagaggtatcttgtgtttgtaataaatgcattatttggggggttacaaaataaaatcccaaaagaggagaagataattaactttcttatgagaggttacctaattttgactgagttgaaaggaagaaaaattaaaggattttaaaggattgaatctctctttctgtctcatttgctttctctctttttaaaatgaaatggttggcagagttggaattttggaaaatagggtcatgaatatttgttgatgaaaacagtcatgcttagtagctttgaggggactccctatagacagacttgattcctagttctagttttcacagctggttgcagttgtttggatgacgataagaatcagggatacttggttctgtatttgga

SEQ ID NO: 99029 - DNA, 1124 bp, Homo sapiens
agatgtgtgagttctggagctttcatactagccttgggcctctcactccaggctttgtttctgtgtgagagatggaaatgtctatgtcctttaaaccaatgttcttttgctttatctttcatttgcagctgaagctaatcctcaatgatacaccgtgctttctagaaatcatcattgttaaatttttgctcctctatggagctttgtattcagtttgccccatatgcacattaatgatagaagttttctggttttatttatattccctttctgttttccctgagtagaatttttcttattgtgatgtggattctgtttctgtacttgagttggtgggtcattgtctgtggctttggttatttttactgctgaggctaccttactttttttccatcatgataaaccttctccattttgcaaattgctaaattggtctgaaaagattgtgagaactggctttcttaggcgacttcttgtgctgaccaacccagctggagaccggatgtgcagaggtaagcacttggaataatcagaaaataggaaattttaactattcccagttgccagagacattttgcttcagttgaaggattggaggcaggtttttataatgctggccttgcctagtgagttttgttgagcaaatctttgtactttttggaatccactcatgtttttatttgttccgtggatggttcttcctctgcaactatttattgccactaaagtttgcggcacagtcagtcccacagataataaatgggtgtgtgtgcccacagctcaacatgaatagagtgactgacttccagcttgtttattgttagacgggtatgtaaccaaggaagcctaactcttcaattatgtgtatgtgtgtttctgtgtagtgaaatatgggcctgaaaatggaccttgcagggatattgcatgatattccattatttcctttacagcaattatttttcaaatgttacgtgaatgaggatggtatttacttgcataatttcatagttatgttatttcatgacctgaatgccagcagctccgcagtttgaagcatcatttccttctggtaggctggctgtattggctccctggctaatatgaatttgaaagataattgataa

SEQ ID NO: 99030 - DNA, 1041 bp, Homo sapiens
ctcctttctgagctgtatcctctccctctcctttcaattcagtgttactccaatattttttctttctgcttaagtcagccagagttggtgtctgttgcttgcaaccatagaactgaatgatatacaggtaacatttcccttgaaccaattgatgttcagtcttcaaattctgtttcacaaaaggtgatatgtggggcagagcatatgtctggggaaaagtgaaggagccatgcttgaaagctctgtaaaataccagaaacctatggacgcacagtgtccttgtatatgggtacccttccgtgtaaaaactgtgcatgcttaactgggagatggagaaagggtgcaatttttttttttttttttttgcttggaatttcttttaagcacatacccttactttattaagtgactttgaatgaagataatcctcattttaccgtagtactggcccacagcttccaggttctggcccatctttggagaaaggttttttggtccttgttgtttataagggtgtagtcctgctattggcatctcctataaatcttaagatttttataacttggatgtcactctcaccttcctgccaaattgctgcactgaaaaagcagagtgtcattttaagtaatgatgcttttactgcatccaaaacaaataaagtaattttggtacacattatgaaacaaatccctcttatctctgagcctagagtggaaatagtgtcagggatgcaaatagctgctttggccaaaatagtcaaagaagacatggccttagtctgtctgagcttcatttcttaagaaacatttgtagttgttggttaaaaatgtgaatggctctgtaagttcactctaggacaatgtggattctttagcccagaaagttaaatacctccaactttggcagtcctgaccttctgggtagagaatatagttccccagttttcaagacctgctttgctactttgatttaacacaaggcagaaatcttcaaaacaaagccctctggatccaggaaagttcatctggcattagttagctt

SEQ ID NO: 99031 - DNA, 1056 bp, Homo sapiens
gtcggaggggcaaaggatgtgcacacaaagaaagagagagaaatggtaggctagaggaagtcacacgagcagttagcactgtccctggcacatgaatgctccaccataattatctataagatatggaatgcagtggttggatactaatacattattacttggagccaagacatcacatgctcaccctgctcaggtgttgaatgctttggtggattatctgactcagttggaaaaacaatgccctttagaggaagagcttggacactttgagggatcataaaagcagatctaaagccacaggggtgagcagtttgggggaaatggggataatgagaatatttctttagattacaagtcagaccacttgtaacccattcagactgttaaacagtggaaagaccatgggtttttaaattaggcacccatagttacaaatcttggctgcttcacttattaggagttatttcagagcctctgatatgtattttgtgtttgtattttctcaacttaaaaataaggataatattataacacttagctcctggttgccgtgaatgttaattgagatatggactacaaagagcgtagcttagtatccggcacatctttgggagtcagataaatactaatatcttcccctatttcagatccaagggtaccctaggaataaaagcatagaactttacagccatgtgaataatagaggtttgctgtttcccaaagtgtgtcccatgaattcagtgtgttgctcataagtcttgccacagaagtttcagtctttaaataatttggggaagccttagatgaaacaaagtcaggctgattacttagtgcaagacttcttgtagcatttaagatgccagtgccctgggagtttccaagtgaaggaagaagacagctttagctcctttgtaaagaagcattccattgtccagggtgcttcaatacttgaactcctttaggttgacaaactgtgggcctgaggtttggctttagcttgcagaaatatttccttcggctccttcaatatataaaatctttacaaattcatttcca

SEQ ID NO: 99032 - DNA, 1009 bp, Homo sapiens
tcgctttggagatgaaacttatgggctggaatgtgaaacacagttactttgaggtggacctcagtgaaacttttccagacaggctgagaccaagggaagactagtattaaggattttatcctcaaaacaaactaggttgtcagagtccctgtaggctctctgggtagcagcctctgtgatttgcctcttcctgactaggaaaacctgtaagctgacaaagaagtatatttaaattgacctccaggtgagcctcatggtatgtcaggttgattatttgtacctggtttggtgttttgttttgttttttacttgataactgtataaattattttagtgaagagcctgttcttattctggaactcactttgaagacaaaaaaaaaaaaagtcagccatgtcataatacttattttcttgggcaagcttgtctttttttgatacagccaggaaggcacaaatgtttccagtccctctgagacgaaggcagggagcctgtccaactgcagaactgctctgtcagtgtctctttctgagagtgaagagtcattctggtcttaaaatgctgttttgcttttcattctcttctctagaaggaatatcccctgtgtccatgggagcaggaggggaatggacagttaccaggggaaaggagctgcataattgttagatccatcctaatcctttcatgacaaacctttcctcagagttgctttatagttgtgggtctgagaataaattcacagattcacccactgcatgctttgatggtttcacgtcaggaatgggcctacttttcctcaggtgagagcggaatcctgctgtacaagccacctgtaatgtgggcagtggcaactgctgtttcctttccaagtcttctgaggttgtttcctagtaagtgagctggaggctatggggcctggtcctggtggtagctattttgcttttggacataaaatcttggtagcttaatgtatttgttcctagggctgcaatagcaaagtaccacaaac

SEQ ID NO: 99033 - DNA, 2111 bp, Homo sapiens
gttgagtttagatctaagctcctgtcttctcttctgtccatctttcttgtccatctactacgtcccaagtactatgctgggtgtgggtgaagggtgagaagaagggcatagttgtaaacttagaggactcacggtcctattccttattgttcaaagttggacttaatatatatttcctagtatgattgtaactttcagtgtttctgttcatatgaagaagatccctagctagctcagctttataagccagaaccagtatgttaatgacctgctcactgtccacttgtctctgtctcctcacttggggaagctccttttattctcaatgtataggaaagtgcgacgcacagaatgcaattgtctttacagttgggggtgaagatgatggaggttcatatatgatagtgggtgttagggtatgggtgagctgggctgggacttgggggccacataccttgtggcccttgatcacttgggtccctgttttagagaggcctgggtgtgactatcctgaaaatggtctgagttgacatacctcttatatctcctttagtttctgccaggcggtggtctccaggtcaggatgaagtgttagttctctcatgttataaatgtagtaagggaagtcgtgctgaagttgactattgggaaatttcatgtatactactgagttgagagtccactcctccaaaagaaattttagataagtgaagccgttctagaagccatcaaatgcatgtttgctcccaactatccacagctagaaggttatatagcgtggcaagtattctcaaacagggcacagagaaggggtgctgtggtcagggtcccagaagcaacatttccttccactccagcagtgctgctagcagactctcatttaattgggttttattggtgatttttacttttccagccatactcatttccaagtatggagaaaatcaagaaatgtcagctaccattcattgcaggcttatttagtagtagtgtcagtaataataacaatagcagccacctttttcttagtatttactgtgttcccagcactgacctgtcctcccaacagcctttggcagtagagctggggttcatagccagcagactggttgtagggtctgcactcctaagcactgtgcctcttgtgtcatggagcagacattttgttttatatgaaaagcatatttaatccttgagaaaattctaagggacagagattttgttgtctcatttttctggatgatgtaacaattctccagagactacagataacttttgcttgagttcattaactacacatcttccatctcacctttttctctgcagatgaagccccagcttgttcaggcagcagatggtcataccttggcctgagggtgggtgttctagcccagccatgataataatctcatactggtccaaggattgtcagagaccagtttttaaccattgggatatgagaggatatctactaaagatactttaccttcatgaataacaaataaagcttcttggggaaatagccttttcctccttttctgtcttcttgctgtcctgagcatagatgtgatgtctagcattgcagcagccatattgtgattctgcagcaatacatgacaagccttaaaaccagtccactaagaaggctagcatgataagatggaaggacttggatcagtaagcagcacctgaacctacctcctaacaaaagttatatgagaaaaatgtgaccccctttcatttgtttatgcccatatgtgaattgggacttctgttacatgtatctttgacattcctaaccaacacagctactaagggaccaaaattcagattcaaacccaagcctccatatgttattcattgttgaaggttgaattgtgttcccctaaaagatgtgttgaagtcttaacccctggtacctgtgaatgtagctttatttggaaataaggtttgtgcagatgtaagcaagttaagatgaggtcatattgaattagggtgaaccctagagccaatgactaatgtccttataaggagagatttgcagacacagaagcggcacagagaaggccattgtgaagatcaaggcagaaaccggagttatggcatcataa

SEQ ID NO: 99034 - DNA, 1043 bp, Homo sapiens
ggattaagaatgggaagatactagtaacctgcttttgtggtgcaggcactgtgtgtggcactgtgccgaggagctttattttaactatctggctcatttgcatcctgtaaccacttttatccgcattttagagagaaactgaaggccagagagtcgaagtgatttggccagcgttgagcagctagaaatgaactgagctggagtttgaaccagacagtttggttccaatccttacttcttaagcacttcaccatagtgcagaaggataagacaggcacagtgcaatgtacatgttggtgctgttgttattaataaatacagttagagcaatgactgttttgtgggctcagagaggctgctgtcctatttcttgctgaagcagtgggttgaccaaaggctactctgtttttggtggctcaaatctttggtggcacataagctgctgtctcctattgaagttaaaattcacaagtgccattgaagagcttttcagctgaagcacatagcatttatccaaactagagaccttgaaagccggtgattagggtggattgtgtacacattcattccaagtttagacaaaaaaaaaatggggagaaggagggaggaggttggagattttcagagcggttgcttagaaaaaagcaacagctattattacagaggcacaggtttctcactaaacccattctagattttgttgttgttttcatcaattgtagttgagtaagcacaaaacatcgggccctattgttcataaagaaaactaggagttgtcattaatccggggccttagtctccctcaggaataaaatgctatcttacatcattgagtctttctccaagtttgtcagcaaatctctttcaagcgatttgcaaaatcctagcctgggaacaaactctgtgccccttgcttaaccatggcctaatggctgtttcgtgttgactgtactgagttatcttggagtgttaggcaacttttgcattttgtttgatgttccagattaggtccctcccataccaatacccctccacactgaccc

SEQ ID NO: 99035 - DNA, 1071 bp, Homo sapiens
ttacagccccaagcacagtttctcagatgcagggagaggctaacctttgtctaggagtcctcatacagaggaacaacccgcagagggcattgcatttagcagaaacagatgccccacagctcctttccaaagctccctgggccatgatttgcggggagtgtgttcaatttatcagagcctgagacaccagaccagttccccagggtctcaagtagaataaacaagaaaacctgcatttagccttgcagatgaggaggtggatgaccaacctcctaaccccctccttgtcttactaagagaatatcagcactgggctctgaatgactgatagaaggtgatgtaaatatattttggcagtggcaccagataccagtggcgcatttgaagttctccttcggttaaaggcgtaacttctattccaaaggagcagaatgattgaggggagctggcaggtttcctgttcaagtgcagagggtagcttttggaagtccttagagagatgtgaccaaaattccttgaggtggcttttatggcctgatgatctgtacctctgaagagtttgtagatttttgactattcaagttcttcctaccggcctgtttcacttagggaatcctgtgcgctctggagcatgtgacccttggcaggtgggcgctctcgcttgccttcccatagagattgctcctcactagaaatgtctcccccttattttgtgaaatgtgcacgtgtgcattttggcgtgagcctggtttattgcagttggtgtttgcaatgcgtttattttatttcaaggtgtcatgttgaaagaacctgtttttaggcttttgaaagctcatataaacagggcttatcaccaataagaccgagtcactgttggaaggtccttaccaacagggggctcaacttcatgctgcccaaatttcgatgagtctcttttgaaagtacatacatctcaagccttgagattagagaagtgagacaaatgcggaaaaatttttttatatccgtggcttcttcccaaagagtattgcttgactctccttgaaaacacataatttatatgtttttact

SEQ ID NO: 99036 - DNA, 1021 bp, Homo sapiens
ggcgcgcggccgtgcccacaagttgccggcagctgagcgccgcgcctcctcctgctcgcagccccctacgcccacccggcggcggtggccagcgccaggacgcacatcccgcggacaccgaccccagatgtaaagcgggaccccagcccctcgccccccggcgcgatcgacagtctcgccagcgtctcctctgccaaaacccagggctggaagatgtggcagccggccacggagcgcctgcaggtaaggggcacccgggagccgggggccagcctggaggaggaggtgcccgggcagaggaacctagtttttgcttctgcctactttaggggatttgcccaaaaccatcttgtaagacgcatcgatggcaacatgatgctgtcggtttacccagcgccaggaacccggcaggggtatggggatgatgaaattgataaacgcacgggttcaggcgttacaacttttggcttggaggtgcttgtgtgcgtgttggttggtacatataaggttggactttctgactggcaatttagattgcattccactgacacaatgcagtggtctggggttaggatttttgaagccagatttttttttttttttttttttttttgtggtcaccaggaaagacagaacaagtgatatgtgaaagcatccatttgccaatataatgtggaaatatcaagcttggtttggcttggtcatggtatgctacttattttatttttccctattcattggttctctccctttatcttccttaaacccaagctccttcagatatttaagaatcaaaagtaggttcagccaggaatatttatgtcctgggttatcccatcaaaagttttttactgctgtctcctgaaatgccagactgccttgaattggattctggaagctggggatttgcgggaggcgattgaagagaaagagggacctttcccagaagaactccttcagtgacacgttgggccttgggattgccctggttgcaaggtttgaggactgccttttgctggca

SEQ ID NO: 99037 - DNA, 1035 bp, Homo sapiens
ataaaaataaacataactgatgaccaaaggtattttcctgtttctatgcaacagagcagaggagttccttctgtgtctttgggagacaaacttggttgctgtaaccagatttacacaaatactctttaaaagtttattgccgagagcctaatgttctacattccggattaagagaatatacttacatttggcttatttccatgttactacagttcatttctttatggttttccttcatgaccactgccttgttaatatttatagtattttgcagaaagaaagagttgatagaactttttaccaagtgtgttgttcttccctctgtgcctcaacttctttcctgctgtgttgccaccaaatttcgactcttctggcctctctttacttatctgtcctgtttaccctaaatatgttacttccaaatatgttatttgcctgatgccacgcattggggtaaatatctaaattagccttttgtttaacattgcccgcttctcggggagcatcggaggtgctcattagtgtcctgaatgattcatttgctggatgtttcgtattttcaaagagtcaaattcattgctccagtcacatttccatgaaacagttatggcttgcctgtcttaagtatgggatatatatgtatctttaaacttgctgttgcttagatgtgatggccgatctcagggtgagagccaaaccagatctctggggtgtggcttctgtgttaggaagctgctgaaggtcaccatttcctttggtgaaagcccctttgtgctgcttttaaggattttccccatgttgcctcctgtcctcaggcatagttctcctctgttctgcacagtggacttctaccctgcagctcactgccggccccatccccactgggggtgcaaccctctcccacccccattctgtctgagcctcagacccccaaacttagctcatttctaaggcctcactgaaatccccctcttctggagtggtttatgtagaaaatggccagttaaaattctattcagcatgcattctcagatc

SEQ ID NO: 99038 - DNA, 1028 bp, Homo sapiens
tgcatatgctgagaagttccagtgcaaaactaaagattatttttaaaaagaattctttggaaaactagatattctaaaatatcgaagtcatttgacatctctggggtgaagtaatacaaaggaaaaggagaaatgcagtagctacagcgactttagacagcttcaattcggcacttccaagtggtacaaaaagcgaacagttatttcaagcacccaaaagctctgcaaagagaaagctctaaatagtcagaatgcagaacagcttaagtgttactccagggatagtatatgctttgagttaaatacaagacaattaatttgcacaatggatagatgattcaaaatcatggagctaattactttgaacttgtaacttacataatgtagttgcttttattgagcatctactaggtaccacatactgcgctagactcctgggttgcaaacatgatcctggtacagtcccgtatctaggttaatgggaaagcaacagcatcaataaacagaaagagaaaaagacaaacataagaatgaagaactcagtgcctccccagtacactaaaatgacaacactaaattttatggagcacttaatacatttctaactgtggctggctcctttattttttttcagtataaaaaggctaatgataggctaatgatataaaagtgtatattcctatttctttagttgttttctccttataaatgtgcatcatgacctttgtggaacggttagaacctttagagaaataaaaagaaagtaagtcacttgtaacctcccgaatcacagatgattatctttaaccatttccctcataatattattcacatgtatatgcaaatatgtcatagatttcaagtatatttacatatacaattttatactctgccttttcccttaaaattcttatgaggatctctgcatgtcatcacatatcatacaaaaattgcttttcaatcattgactgacagttcgtcatccagatatattgtaattcattgaacatttattgtgttgtcacttc

SEQ ID NO: 99039 - DNA, 1021 bp, Homo sapiens
tgatgaaataatctgtacaaaaaaacaccgtgacccaagtttacctatgtaacaaacctgcacgtgtcctcctgaacttaaaaaaattctcagtcacttaaggagcacatttacatttccttaaaagaagtcaatgaagaatgtcacctctactaaaagatgggccagagcacagtccaactactttgagttctgtctatacacatatgaggtatgtgtatacctaacttacaagcacaggtataataaatacagtaagatgtagacaaaatatagcagttatattctattaacataatataataatagtatctaaaatatctgtgcctatatacatacatggcagtcattgatgaagaaaactgcagccgccagcgtgctctgcagtttcaaagctaaacaagtaacattatgcatacataatatataatgtaaggtatagagtacaggttatcctattaaacaatagtaaaattttggctcttggagggatcacagagattctttaggtcagttgtttttcacctggaatctgtgactgcttttgaacatcatcaaattggacataaacgtcagagtttaggtggagagccttcataacttccatcagactctcaagatggtgagtttaagaaaggctcatggagaccagatctcagaggtagcaaaatggaggctaagagcggtacccgatttattcaaggtcatactgtttttgtctgcccgggtccaggtcctacagttcagatcttgagaccaaaaatatttatatcatagtaaggttaaattaggtcaaatggttttgtcctatataaatattaaatgtttatgaatatgcagagttggggacttgcttgctagtgaatggagtggggagtcattctttttgcacttcttttagtaatttgtagatgtgtctatggttaagtattgaaatctgtttaaagaaaggtttaatagctaaaaaactgagttcctctgtgtagccccatttccaatgtttactgaagtctaatgtttt

SEQ ID NO: 99040 - DNA, 1052 bp, Homo sapiens
taattatgcttggagtccctctttactgggtttgagttaggtgcataacatggaaaggagtggtgccttcaaatgaatgtgaccactccgtattgtggagtgacttccctagggcatcctatacatcctaccacagaaggccaagggacagagcaccaacttcagtatccaagaaattagatccacaactcttgattttccacactgaggactgtcgcgagtaagttgtaagtttgccgtcttccttctggcttagcaggtgctgcagctgtactctcgactcctgtctgtgagcgtgagctcaggaaatgagagtggagtctattccaaaaaaaaaatgtgatgaagtttttcataaaagtgcattcatatgccaaatcctttttggaggattctggatgctattgttcatttctctactagtaaaatgatcaagccttcatttattttaggctttgttttttgatccattttgttttccctgctgtaatgagaataattgtttggaaatgtcatattctgtatttatgattctctgagaaatgcttttgtataagtcttaggtttgacattgcagtagttgacatacacggtaaaggataacctagtgacaaatcactgaagatgcttcctttgttacctcaaaaaaaaaaatccagacaaaatagcatttataaatatagaaaacaggattggctgttttccaagaacttcaagttaacaattcttatgcaaggaaaagttcttaatgctaaagacttgttctgcatgaaggagacattctttaataatggaagaggtggttttatttttactacaagccgactcatatttccaaacctataaccaattgctgatctcctgtgtaaagcatttttttccttttatctgaaacagtgatttatatgaactgttggaataatggaacctcaaactacagatgtgtatgtaaaattgcataaatgcactgacttccttctccctgactatatttttaataaacagcattatcctacatggtcagttttattaaattatacacaactagaggg

SEQ ID NO: 99041 - DNA, 2554 bp, Homo sapiens
gcttcagcctcctgtgtagctgggactacaggcacaacacagcaccatgtctggctaatttttgtatttttgtagagatagggtttctccatgtttcccaggctggtctgaaactctcaagcgactggctcacctcggcctcccagagtgctgggattacgggcgtgaaccactgtgggtattccattttaaaaatcagaagacataaagaactgttgcctccatgttatacagcgagtttttaaatgataaattaaagcaggttccttgcacttaatgtatattgaatgtgcaattgccaagcaagaaagaatatcttgtgtgtaatattgtacggcaaagcagtggaatgttttctgatagctgatgttttttaaaaacttaagttccttgtctttctttttctcttaatcaggattccggagtttgaatccacctttgacaattgtccgaaagacgtttgaatcaacagaaaacccagatgacttcttgccctctgtaatgacttgtgtgaactatcttaagttgccggactattcaagcattgagataatgcgtgaaaaactgttgatagcagcaagagaagggcagcagtcgttccatctttcctgatcatagcaagaaatgcagtgtctgcctgttacagcaaaagaaacaaatcatgatttcttttctaatgttatcacctgagtcaaggaaacatgttacgccttcttgttgtaggaaaaacggcttgcagattataaagagacatttggttgatattcattaatggccccatggacttaaagtgatcaggccctaaaacgttgttgtgatgaggtttctttagcaagttcttgtttaaattatcatttatttgatgagtgaagtttttaacatgctttgctgtgtgaaatttaaaaaagggatgtttttccaggctggaacaataaatgtggctgtgcagtttaattctgggctgtgtgtatccatctagctaagtctgcagttttctttcctccaaagacaactcttgtacataagtacagaaatttaagctcacatgtatttgacaaatatagtttagtagactagctctatgtgcttttcactttcctctgattttctctccctgattcattattatctgtgcagctcacagttttttttttgtatacaactcacagttctcaaattttcgttacccatgggcttctgttgtcccatgttctctccagttaagatctaatttaaaattcattggattgaaatttattgaatataattcagcttttgtaactaggtagacttttcttatagtttagttttaatatagtttagggtattactggctttttcccaggtgacacactaaggactgtttacatggcaattccagcagcaacagcctctggaatgagacaaggaaagctcatttgtttcttttatgaaggttaagaagtctacagcttgggctggccggtatttattattctgtggccagaggattttaaattaatgtaaattttttaaacaaaataagcagttttccttccctgttggagtaaaaaaatttttttccctttgttgttttacgtttttgttcatagtcttctttattccacgctcctcttccccttctcccagtgctgacttgggacaaaacagttcagcctttgtctcgacgcagataaaagcacctgtaagcaatgctgtccagtcattttatgtgctgatttctcaaatctgcaataatccatcaggttaatgtttttacctgaaaataaagaaagtttgcttcacctttttgtttatagttttgtgctgtatgcataactttcaattgtatagatgtatttcaatgcaaggaaatccacatatctccatgattcgggtcatggctgattttgctattcaaacaatttataatagcaacttgaagaaactaaaatgtgaagagaaaatgggaggagattccttcctaaggtccaaaactaggcctgtggcataaatttgaaggaattttccataattcatctccttgaaaataagagatgagctagtttttttttttaattgaactttgagaaatcaatttttttgactgttctgtaagttttaattaattgacacaaaagcccttttccctatcccaccacccaaaagaaactcagtggcttgtttgacatagattgctgtgtcaatttacacttaaatggccttatatggaaatgtcccctcctgagagttcacttgggcagtgaccccattaagtggaagggaactgtcagaggagttgggggcagagaattctctccctgtctctgcagagactgacaagtgaatggcttttccctgaaatccaagaagggaattgtgtttctgcagttttcaccactaacagcacagttgctgagcagcttcatcaagtgaagttaaagactgaaacaatttgttttcaactgttctgatatcttcctgcaaattaagcacaaggatttttgtgtgaacatagcattttgttcctgatttttaaagggttctgttaaaatttagacatgtataaacaaaa

SEQ ID NO: 99042 - DNA, 1069 bp, Homo sapiens
gttcagcttgcttctcccacttctttctccagctcaatgttctctcccttggcatctgttactgtatacctttgtgtttctgaaagccaggatttataaaatctccctgactagaagcagattatccatttaaagcacctaaagtaatgagaagaaaggaaaactgaaatcaagggtcatcaggtgtttttggtttgagaggaagggtttctcaggaaccaagtccctgcagatgggcagggtacttaatagcgtacagctaaaaaggaaatggaatctctaaattttattttattttattattatttttttttttttggaaagaggtcccaagcagaaggttttagtactgagactgatactcttttatggtacacgtagacctttattttcactcacgtaaacaaatgtttccttagtaattctttttacccttatttaaactcacagctggatcagctcctttgtggcagtaaagcagacacttgggatgcaaagacactgatggaatgctgtaggcctgatcatggttatactcatgacaggtaagtactggggtctgccagtttttctgttgattctgaagaatgtggagaggggtgtgtgtgtacacacacatgcgcacatgtgtaaacaacaaaagttggagtggttcattttaaaatgtgtctacctgttaatggatgcttacttctgttttggccttatttctctgaagatgggaaattaagacccaagggtttctttctcaagtatttctgtgaaaatactaggggttggggaagacagatttaatcttgttccccattattacatatagtaaagcagaaatatctgtacagtaccagatcaagtcttacttattacaactgtaatcattccatttgaattctagtctagtcataacagaaacgaatttaagtacattgtaatggaaaatgtatgtgtaatttaaaagtgctaatctaatttttatgtcatgtgatgcgatgcagtgtgattaaaactctattttaacctgatgaaataattttggtatatttatttctgttatagtcgggctgtgaag

SEQ ID NO: 99043 - DNA, 1674 bp, Homo sapiens
atcccaacacttttggaggccaaggcgggcggatcacgaggtcaggagttcaagaccagcctgacaaacatcgtgaaaccccgtctctactaaaaatacaaaaattagccaggcgtggtggtgcacgcctgtagtcccagctactcgggaggctgaggcaagagaattgcttgaacccaggaggcggaggttgcagtgagtcaggatcatgccactgcactccagcctaggcgacagagcgagactctgtctcaaaaataataataataaccagagtcccctgttacttaacagttctgtgattcataagtaattccttttagtattcagtaggactgtcttcttatcctgtttcttctactgactttgtgaaagctattcttccatcttactagcaaataatgagttaacatttagattaaggttatctcaaaataatttatactaatgcttataattttctatcaagaaaatcctaatgttttcatttttatctgaaaatgttgtttctctacccattgggctacccaaagtcagtgatgactagataatgttggaccaataagagttgctttttcttacccttcaattgcatgtgacttcatttccaggctttgcctacttttagtaggaagcacacactgcagacaggttgggttctaagaacttcacaggatttagaactaaacattttacgttaaaaattaaaaacccttaatagtggctaattgtgattcttcaaacattacctttaattctcaataacattttatcctcttgggaaattctcatttgattcccatccagtgaggtaatataactgtatggcatgggtttcacataaatagatttttaaaacacactaaatgtaaatgcacatggcattttttttttacattttgttattggtaggggccccacattagatgttgacctgatgttttactcatgtagttttctagcagattattttaaagtcttaataacttgtttgttctttataaagtgatccagaagggtgtttcactgtactttgccacatattaaatagtaaagagatttgaaatcttgtcacagttttttgaaaactttctttttgcagctggttatattctgggcactaaatgaaggcgtttctaggcaatttgattcgttcagagatggatttgaatcagtcttcccactcagtcatcttcagtacttctacccggaggaagtgagtagcttatatctaaaagaaatggtcatacctataattttagtggagtgtttctgtgctgcctagtcaaagaccgtattgttgcacaaaaacaaaaaaatgggtgttagatagcaggggatggatgtttgggaaagacaaggaaattgcctgagcaaggaagaatgttaaataggtgtcccctcttagattggggagcgggttccacgcgtgacagtaagcatagcatctttgtcagccaagaccctcaatgccattcagtggagaatggggacttgtgctgtgtgtggcatgttctacatgtttctgtactgctgtggaagcaaagagagacatggagggggcttgactttattccttaactaaacttcgtttcgatgagacattgtttcacaatcaaagttagtccttgaagttttaagaaagtattataaattatctaattgccaaataca

SEQ ID NO: 99044 - DNA, 1004 bp, Homo sapiens
ttgagctttgcaggggtagaaagttaatcactatcactagatagtatgttttttatatttacgatttcccaactgtattattagtattggctgtatacttatacagtattggattcaaaattagcctagaatttatgaaaagtttgtctagttctagggtccacattcttaaaattaactaatatgcaacctattatgcacttactgtgaaatttgatttgcatatgcttaaactgagcagcagcatctcataatgaagaagcacttcagctctcttttcttatgcttacttcctttgtaatctcagtgactctttcatatgtagattatgaccaggaaaaaaataaagaggctaagagttgaacccatcagctttattaggatagcttatattttattaggatatcttttatttttttaaacaaccgtaagttaattttgcttgacaccatttctcccccatttgtgttttttagaccaaagagagtctacagtatgcattagaaaccttgactatgaatggctgctcagttgaagatctaggactggatttcactctgccagggtttcccaatatcgaactgaagaaaggagggaaggatataccagtcactatccacaatttagaggagtatctaagagtatgtaactgtgtctttggggggtaggccagttgtgaagacggaggactttgcctgattgtaccttgcttctggctgcacacgctatggcttgagaccttccacatccccaggaccactgcatgaaggctgctttacaaggcactagcttctctttgctcttgagtgcacatatcagatatttcctgtcttatataaccttgaattatttctcctcaggcttgaatgctatctaattacaccacgttttcttagtttaaaaaacaagtgaaaagagacattatttgtgttctcactaaattgcatttttgcatttccatcaaggcagctagcttgacagaatttactccaggcaccgtgcag

SEQ ID NO: 99045 - DNA, 1780 bp, Homo sapiens
cttgggtctttggagaggtgaagaagtaactcttagcaatccaaaaggtaatgcctatctgtaagttagttggtttgtgttactcagatcaggtaatggactctgacagtttattagacatatttaatttctaatggacagctgtacttgctttcttttagcctctgttttctcatttatcaaatagggaaggcctgtccagttctagaggacttcattcagtgatctgcactccaattttgagaatgcttaatttcttaaatgttcttagttaccaggttttgttttgtttttggaaacatcatctgaagtttgctgcattgcttgtttttcagggagccaagaagggaccaagtatattcaaaacctccagggcctgtttgcgcttccctttggtaggacagcaaagccagctcatatcgcaaaggttaagatgaagtttcgcttcttaggaaaattaatggccaaggctatcatggatttcagattggtaagtttaggatggtttgctttttgcagttttggtgtagaatgttctgtgcaagtacctcagtcccctgtagtttactgctatagtttagagcaatgcttctcaaacttcaatacacatatgaattacttggggattttgttaaaaatgccggttctgattcagtagggcaggggtaagactgtcctactgtccaagattctaaattttcctgtcagctcccagggcatgcccgattgccaggttgtggacccctccttggatagcaagggttcagataatcaggcaagttaaggtggtattaattatttattttttaaagtctgacattacctttttaattcagtaggaaagtttgtgcatgtaactaaacttcattaaatttacattagagtgctgttgtgaaaataacccgagtgatcagtattcatagaggttggaatgtttctggacatttcttcatttctttttctcttgaacttctggcctcaagcagtcctctcacattggcctcccacagcactggaattacaggcatgagccaccgtgctcttctcatgttttcggaggcactttatcagtatgtttaagacattttcacctgtggccaaattgacaagtttacaatttcactttaactgaagagtgggcagtttatcagttattttagaagttccatttagttttctattttaaatatagtaagttttttcccttaacattttttgcattgggatattcagtaatacagactacagtggaaatgcatttagagccccaaatcaagagaatcaattttgtgtagtgggagaaatagtttgtaactacagaattttctttcttggggattacttgacctattaatatttaaatgatctcctgaagtgccttagatggaggtaatgctggaagttcagtgtgacagtgaaaatattatgcatattccatttcaggtggaccttccccttggcttacccttttataaatggatgctacggcaagaaacttcactgacatcacacgatttgtttgacatcgacccagttgtagccagatcagtttatcacctagaagacattgtcagacagaagaaaagacttgaacaagataaatcccaggtaggcttagaagaaacagtccagtagatcaagtctttattttagaaaaatgaggcttttgttaaatagtttgtatttgactcagttgttatattaatgttttattttagaagattttaattcttttattgtactaactaagacatatgatttcacagtgggtcacatgacc

SEQ ID NO: 99046 - DNA, 2422 bp, Homo sapiens
acataattagtgcagctgcctcctcatgttgttagaatgataaaatgagctgcaatgtgtgaaacactcagaccattgtcacataataagtgccagtatgtgttagttttgagagaaaaagattccattttaagtcaagttgtcaaacttttgtttttctgtttctggggttttatgctttcctttcctttaaaaagaaaaatgaagctcaaccaagtacctacacttttagtggtgtagttgggtagaatgataatccctgaagagatcaggttactctgtgggggtgctggccacccccaggttgtatcagcaaagcaaacatgacctgggccttccaccttctgcagaggctcacagaggaagtgcttttagtgatttaatattttaagaatccttttagaaacaacagcattggatgaaggaaatagactaatttgatctgtgacttctgttgaacctgggataatgttatgccaaaaggagaattgactagcaccatctagtggataccatgtgttactgcaggtttttctttgcttctcttttgttcctcaggcctctagtgcttgggattcagtgcagaacagaatatacaaagtactcccacccccatgatggagcttatcttttagtttggggaggccaatacatacacacacattcatgtacacatatatgttaggccatgtggaagaaaagtaaaaataagaggatgaagcattatggggatgcgtagggcagtctgaggacatttgagtggaggcaagtcattgcgtctgggggaagagtatctctagcacaagaacagagaagcagtgttcctagcctgttggaggatgagtgtggctcgagcatagagagcaagggcagagtagtaggagtcagagagactgagcagggtgggcagaggggtcatgtaggccgtggtaagaactggagctgtgctttgaatgagatggaaaacctttggaaagtagcaaagggatgccgcgaacttgtgttttgtaaggattacgcttgctcctgtgagaatgggatacaagatgtcgggaatgctagtgcagagaccatctaggaggctttagcagtggaccagatgacagagaatggcagctgggtaaagttggtaattagtttagaatgcattttgaaggcagcgcttattgtatttactctgatggattggattatgcgagtttaaagaatggccaaggacggctctaaggatttggtgggattattcattttgggtttaatggtgataccatttactggtgtggaattctaataggattggggttaatcaggaaagcaccactaggcccaagcagatctctgttttgagagagttaaacgtttagtggactacctctaaacttttaagctagtgtgggtaatttttaagagtaactgtaataatgctaaaatagtaccctttgtttacaagtaatctataaatgttgccttcttgacagggttacagttagacttagagtataacctgtgatatgaacttgtcactacctgcatatctttgtttatggtctgatctggcgggaccttgacagatcgtgaaggaaggagcaagctatgaacactgcttcaggcatgtccacatcaggtgtctcatggaggagtagtttcactttaggctgcacagtcaccttcagaacttgtttaataataccagtgcccaggctctaagctgtacctgccagatcagaatcttcaggacgtggcacccctatatgtgcatgttgataaagctctggggattccagtgcaccctgggagttgagaagcattggtgtcctgtatgaggccgttagtcctttctgtgctggtgtggaatcagaccttccattatttgtattttattcgacatatctctattaaatggctactgtgtgtcaggtactatcagagataacaggatgaccaaaatagttatcatcctgtgaaatatgcaagcatatactgaaattgtggtaaagtcatgtagtaagtatttaagtagctgaaaaataagccccaagaaaaaaggaacagactaactgttgggagcagatgctggggggagccttccccttgagagggtgacatttgagctggttttggggtaacagttcactaaagagaaaaaggggaaagacatccatatgcagacaatgccatattgttcctgaaggaaagatatgtagccacagtggcacttctgtgagtacaacctgaaattgttcaactgacatgttggggccttagcggctaggaaataataaagagttgctagtttttgtttcaggtgaccaggactgaaagaataaatccagccaggacattttggaaaataatctctaatgcatcctggtaaacagttgctgttagtgtgcacatttccaagaggttggcagtaaaaaaa

SEQ ID NO: 99047 - DNA, 1528 bp, Homo sapiens
tctagcaggaccttttaaaatctcatttgcaggtgtttgtagtagtgcttgtaggatcttggcagatcagagccagtaggtttccagctcacctgtttgacctgtcacctccatatctatttctctatctaaatataaatgtacccagggaaatttcatgaaactgcagccctgagaattgcactgatatttggcaaagacgatttttttcttccccaacttgaattttctgaacttgccatggccacaagataaattagtaattactcttgcatctgatttccttaatgtatgccagggtgctgttgatatttgtagcaatacagctacctcttaaccttttctgagttacctgtttaaggaaataagtgttaacaattgagttgatcttgttcttttgcatttcaagaaatgccacctgtttattaaagtgtaatatgggtagagcatagtttcctgacagttgtactttctttgtagcgtactgtgaaccgagaggagctgctgaaacaggcggagtctgtgatgcaggacctcggcagctcacgggccatgttagaaatccagtatgaaaatgaggtgagcttggagtctggtgatggttatttagcttgacttgtgctcttaattaaatgttatttgagtttcttggtactatgaaattctgaaagacagttgggagactttgctctcttttctcttgaatgatttgttctaagttctccatttttcaaaggttcaactaaataataaaaggcagtttttttcctggcgtaagaacacatttgtgttgttagtctttaagttgataaattgaaaggatattttaaacagctgataactttcaaaatgtttgaattgccttttttaaaaaatcaggtttactgagatataaataataactgcatacttcaaaaatgtagttttgtagttttaagggttgacagatgcaatttgttaccactttcacgtcaagataaagaatactctgatcaccacaaaaagtgcccccatttcactttgcaaaatcagtcattctatcccctaccccatcctcagcccttgataaacattgatgtgttttctgtccctgtaattttgtcttttttacaatatcataaatggagtcatgcagtatgtagcctttgtcattcttctttcacttagcataatgcttttgagattcatccatgttgcatgtgtcaatttgtttcctattatggagtagttccattatatgaactatatattgagtattccattatatgggtgcaccaaagtatgtttaacaatcaccagttgattcacatttgggttgtttccagtttttgactattttgagtaacattgctgtgaacatttgtattcatttccttgtggagacacatgtttttacttctttgggtaaatgcctcagaactaaattgctaagtcatttggtaagatagagatatgtttttattttgttagagatacaaaacttttccaaagtggctgtcacattttacattcccaccagtaacgtata

SEQ ID NO: 99048 - DNA, 1099 bp, Homo sapiens
ttaattgacctggctggacgtggtggctcacatctataatcccagcactttgggaggccaagacaagtggatcacctgaggtcaggagttaaagaccagcctggccaacatggtgaaaccccgtctctactaaaaatacaaaaattagccagttgtggtgtcaggagcctgtaatcccagctacttgggaggctgaggcaggagaattgcaagagcccgggaggtggcggttgcagtgtgcctagatcacaccactgcactccagcctgggcgacaggagcaaggactccatctcaaaataaataaataaattgacctaaacaatttttactgattttatttacaattttctatatcatatcaaaagttgtttctaatataagtttggattttttttttagtagtttctgattctcatccagataataaacttacattgcatctttttacagcccatttttctttccttttgatacccggcaaatgcttttttatgtaactgcatttgatcgggaccgagcaatgcaaagattacttgataccaacccagaaatcaaccagtctgattctcaagatagcagagttgcacctagattggatagaaaaaaagtaagtttctccccaaaatctttaaataatctgagcttttcaaaataatgggaaaaactagaaatgtagtatatctaaatatgcatgttggtcttggaggccttggtcatattcagctagccctattttcctttcagtctcttggaactgggctgtgattcttccttattcttcattaagagtttctctcctccccaccccccagtttctgaaataatttctacaattctcttttctcttttagttgccgtaactcttagaccaagaaagaatcttgtcttctctcactgaaacttttttcattctaaattaggagttcaaactatctcctgcctttaaaaattgatcccttatgtaatagttggaattaatcagatccatttcattcccttaacaagtcactccaattagaagagcctgaaacaaaatcctttatatgttttgagtctcttataccagttagctccagtattgctaacttaatctgtgt

SEQ ID NO: 99049 - DNA, 1332 bp, Homo sapiens
ttatgaagttttcatggtctgtgattgataaatttcctattgcactagaaatggaaacagtgattcagctaaatgcagggctcctagcccagtaaagtacaatgtactcatcagtggaaacttctcccccacttttttttctcctggcccacagtcttagattaattctcttggcagatttgtaaaattctctctaggaataaatttatgaaattaagctacaatatgaaacttgaacatggatttattatagttaaaattctttaggtacatgtaaccagaagtttatatatcaagtaaaagttgggtgaaagttgcatgctgcctttgatatttatatagcatagagaagagtaaaggaattggccctgcatgaaacattagctgcaacatcactgaatgactgagccagcagcagtggctgggcggggtgcgcagcagtggcaaggggtatgtgtgagggcttaacagtgtattgtgggaattgttgttttagttgggacacagtaatgagaggctgtgtgttgtatgttggaaaccaacacgtgaattcagggtactttgcatggacttggggataatggaagagattgtgaatataatcctaatattttactacatgtagacttttttttttttaaacattttacagaatgcaatgtgcaaggaaattattccaactagtgaatttattaacagtaagttaacagcaaaagcaaataggcaacttcaagatcctttagtaatcatgacaggaaacatcccaacatggcttactgagctaggaaaaacctggtaagacaatcacttctgtaatggtggccttggaaatgttactgggttggtcttgatgtattttgttacagaaacattgtctttactggacctagtcaaatgtttattaatactgttgatcacaacttgcttaattgtgtggctttagcatgtaaacagactaggcaagtttgggggctggatcttcttggtagtatgtgtctatgtatgaaacaggaaagtacacatagcagtttggctgaggatagtcaaaattatctgctgtcatggaattggattccaaaggtgtagttgcttgattctctgagcctgcttgggtcagggactctagaactgcagtgataaatgtaagccactggccatatacatttaaatcggcagtccccaactctttttggcaccagggaccagtttcatggaagacagttttttccacagacatggactgggagatagggctggtttcaggatgattcaagtgcctcatgaaggtggtggtcatattttaaaaatgagctttcattagttatgttatac

SEQ ID NO: 99050 - DNA, 3136 bp, Homo sapiens
atacaaagccatctgggctgcatgtggcctgtgggccgcaggttggacaagcttgctttgtggaatcatacagataatcacagtttaagtttgtatctgactcctgccagagcttttctgaaatgagcaattaaacatcatgaccaggtttcaactgcagtagctattaaaccgcttcgttcaaaactattatagcaaggtaaattttaaaggttagtttttaatgtaatattgtagctgaaatctttgaaataaagagttttttttttctttttaaaaaatataattcaataggaatgggcaaaatattgcagaagtgagtgtgcttaaatagttcaggaatttttgttccagaaaaataattaaatattcatgggtgaagtatttctgctcccatggatttatgatgggacagagatcaaatattgacttaaggttttcatatgcatgcatacacatccgtcttttatttcttacgtataaaaattttttctaaataacttgaattattggctttaccattcacagaactggtaagtaaatgcttagtactagtgtgtcttatgaaaatgcagtttgtattaacttgcctttatttgaattaatgtatattaaatgtgaaaataatagactaacttttttttcacaaattatcttgagcttttctctcaacagaggatcacaggctttaaaatttttcaacacacatcaattaaaatgccagttacaaaggcatccagactgtgcaaatgtgaagcagtggaagggtggacctgtcaagattgaccctctggctttggtacaagccatcgagagataccttgtagttagaggtactttccatatatttgtttcgtgtgttatatatgtatatttgggagaaatttacattaagagttacatacattatttctctgtttaatgttgtttctgttaaaaaatagatggcaggaacttatattcctgtcttttattttctacttagtatatagtcatacattgaacttactaggggttgactgcttccttgaatgttgagttaatttatcttggtgaaatgtagtagaaatgacattttgtgtttggcaattttcttagacctttctgcttcatagatcagagtgtaatatatacaggttgaacatccctaacctgaaaatctaaaatgcaaaacgctccagaatctgaaactttgattgttgccgtgaacatcgcaagtggaagactccacacctgacaactttgctttctgatggttcaatgtacatacactttgtttcatgcacaaaattattgaaaatactgtatatcattaccttcacgccatgtatatgagatataaatgaattgcatatttagatttgtatcccatccccaaggtatctcattatgtacatgcaaatattccaaatctgaaaaaatttgaaatctaaaacacttctgggctcaagcatttcagataagggatactcaacctatatgtgttttctaagaatatgtttaaccagtgtgtatacaggatttttttttttttacacctaaaatcgctaagagtttaaaagtctacttgggtcttcagggtatggaagagtaagagaagatgatgaagacagcgatgacgatggatcagatgaggaaatagatgagtctctggtaaggtactatattcccaccatgtataatgtactatataaagttcagggcctttggcttaaatggcttttgctttgctttattcaggctgctcagttcctaaattcaggaaatgtaagacacaggctgcagttttatattggagaacatttgctgccgtataacatgactgtgtatcaggcagtacggcagtttagtatacaggctgaagatgaaagagaatccacagatgatgagagcaatcctctaggcagagctggtatttggacaaagactcatacaatatggcaagtctgaaaattctttcttttgttttttcataaactttgaaactgttcttgtgttttagaattcacattaacttaatggctggctttcataaggatagggggccctaaatcacacattttagttctgaaagacgatttcaaatatttgataaggtgcatatgtatatgtagcctcctcattcattctaccggaaaatgtatatccatggacagtaatcatggtttacatctgcttttctagatttatttcaggtctttaattaagacaaaaatgttgccataagatattaggtaatctgaagttgggcatctctgagtccttaagagggatttggatgcagcttcctgcattgtctgtgagtgtctgctacatatgcttgaagagagccattcttcccagaaccacccttggagtttctgaggcagcccctcctgggaaggtggtctctaggtgatctcttctaagaagttctccagattcacactagggagagagaggagaatagatctcagaacagtcttctggtaactgtggtgtctgtggcttagattttggctttgtatcagtttcaaaatctacatttggtttatatactgtcttgtcattttaggtataaacctgtgagagaggatgaagaaagtaataaagattgtgttggtggtaaaagaggaagagcccaaacagctccaacgaaaacttcccctagaaatgcaaaaaagcatgatgagttatggcacggtaagatggtagataaaggggaaaatggattgccaactgggcaatcttcccattttcatgattttcaaagagtgatttggatttagtagtaaaatttttgaatatagttgagaaataaatgacattacaaacagtttgatcacatttaatcctcaactttaatatctagaaaatgaaaaattaagtacctacaaaattaaattgggaaggaaaattgggaaaaaaacttattcccagttcatataagagttcaggtttttatgaaggttgaaacaaatttcattggtagaacatgttcactaaacaagagactgaaggtagtgataattggccaattggcccctaattttttatttgtcacccatgacagtagtacaattatagtaattataaaaagtgatgccaggtaatgtaatgaccatcgaatataaccgtcactttctaatagacttat

SEQ ID NO: 99051 - DNA, 5293 bp, Homo sapiens
cctctagaacatgactggcacagaattggcattaaataatcactaaacaagaacataccttgttatgacagtattttttttttttttgagatggagtctcactatctcccaggctggagtgcagtggcgctatctcggctcactgcaagctccgcctcccgggttcacgccattctcctgcctcagcctcctcagtagctgagactacaggcgcccgccaccacgcccggctaatttttgtatttttagtagagatggggtttcaccatgttagccaggatggtcttgatctcctgacctcgtgatctgcccgcctcggcctcccaaagtgctgggattacaggcgtgagccaccgcgcccggcctgacagtattttattactccctgtttctgccattttagtttgctttttcagtgagtgaagatataaaacagtggtaattgctaaacttatctcatattttcccatggacagtcgattaagtgatgttctaaagagaaaacgactgccaaaacgagggccaagaaggccaaagtactcacctccaagagatgatgacaaagtagacaatcaaggtaacccctttgatgaaactatggggaggtaaaggggagggtggtagcaggtgcagaaatgtactttattaaaactgccagtagctcttgaagtatgcctaagtttcctgaggactaagtgttcttagttctttcagttaattaatctgttaagactgtgaatcttaaaaatcagttgtttttcatcacttaaactaaaatgacttaactgtagttcttttttcttttcatagctaaaagccccaccactactcagtcacctaaatcttctttcctggcaagcttgaatccaaaaacatggggaaggttaagtacacagtccaacagcaacaacattgagccagcacggactgcgggaggtagtggccttgccagggctgcctcaaaggataccatctccaataataggtgaagtggggggagttttatgtttcttctattcccatatcagaaaaacttaaacattatttcagccagtacgtttattgtgtggagacgatacatagacacagcactttaatttgttcttaaaagcatagttcaagaattaggtagtttctcagtttatgaaccctgcatctggctttgtcctaagttccagtcatgtgctttgaaactccttccagcatacctagctgaaagtcttatacgttcaaaaccacattgtattccttggggaacctcttcctcagttttgttccagacaaggaaaagctgacattttctgtccacattcttcacatcttttatgataaaatttctctacccattacaatggaacttcaggattttaggggagagcctttttttttttttttaagtccttgggacttgttttatttttgggttctgcatgtagcataccaacatgattacttccctctgcagataagaaattttaaaagaccaaatgtcattgagaaaataaacatgctctctttggttttgttggttgtttttcttaatttcagtgtataaaaataattaagtgaatggatttctgaagccatcagcatttgtaatttaagcagccgggtcttatttgccatagcttattacatccttaataggcgcatgtttctggtctgtaaatctttacttcagctctccaggaaacacaagttaaggataatgcagatatgtatgtactttaggaagtaaagggaacacttaggaaagtgttatattgcagggttccaaaaaattattacactttgtttacaattcatgtaatgacctgcagtgtattttaagtttttaaacagttctccaggtggtacatcgtagcccattttcaaagtgaaagttaatttggttatggaatctggagtttttaaactgtaagcatagaccaggatgaattttaaatgtagcagctatttgccttgatcagaagttatatcctttctacatacactgggactttaatatctcctttttgtttcttgtagagaaaaaattaaaggttggattaaggagcaggcacataaatttgtagaacgttatttcagttctgagaatatggatggaagcaaccctgcattgaatgtccttcagagactttgtgctgcaaccgaacaactcaacctccaggtgctgtgtccagtgcattttgctggtctttttcagtctcttcccagcatctcctgctactcttttccttcatgactctctagcttcctatggatttagctatcctacatcgacttttaccttatatacacccttggtgctggcatttcttttacttatcccttgactatcaggattcatcagtctgtattaaatgtactagaaacctcatctttgactttctttccttcacatctcatcattcttgacaaatgaagaaacttcagaaatgtcctcacaagcacatctgttttctaagtcatcctcaactataggtatagatgataggccttccttagcccctctcttcacatggggtctcagagtggcaggagaggctagaggtttactaataagtgttttacgtttcatctggttctcagtttttgttcttatttttatttttatttatttatttattttgatgtttttgatgtaccttgagcagttttggtagtatgttttccaagaaattgttcattttgctgagaccttaaatgtattaatttaaagccacaccttgtattcttgattcatctttccattctggtgttatagccccttattcttcagttttctgttctcatcttttaaaatactcttttttaaagaaaactacattggttgaatatgaagattttcttcttatgttattatggattcctggttttcctcatgaaatatttagtgtgtgtgtgtgtgtgtttaaaatcataatttccaaggatttactaagactgtaccactcccctgccctcttttttaagggcgttgagaatatattcatttccttttgaggatatgtgagttgtgtattttttaagtgctgcttaaatcaatatagaaatacttttcctaactctttcaggtggatggtggagctgagtgccttgtagaaatccgtagcatagtctcagagtcagatgtttcatcatttgaaatccaacatagtggatttgtgaagcagctgttgctttatttgacatctaaaagtgaaaaggatgctgtgagcagagagatcagattaaagcgatttcttcatgtatttttttcttctccagtaagttatctaataatgcctgtgtatcttttaagaatcagtgctcactaatgcatatattttcatctcagtaataatttccagcaggtcttggtcaagacattgagggaaaacttctaggttttcacatagttggaatccttcaacttctgtatatcaaagtaaatagtaaaacaatgaaatggggatttaacaaagcccatgtcactatttctatgattgaagtatcttgagtcttttttgcttgcaggatgagccattaatagtagtctctcacctgtgaatgtattttacttgcaatatttgtttttaaatgtattgaagtttgtattagttccttttagtgaaacagacatctataataagatagaggagttatattttcttgttttgtacataaaatacagttgtaacagttccaatcaagggcgcttaatgaccatttatgtcaccgtttataatgtggattacaaagccacagagtggctccccttccttcactcttaagtgggccagagcaagagggtaatccttggatgctgttgacagcattctccttgttttacagtggcttaaagagaaggcatcacttggaaacgttccctattatctgtgtaatagggcttagcatagctctcctatgtattaacactatttcaccatgcgcttgcagtcctcagaggcatttgagcattgcttgtattttaacttgtgagtcaacctaaagcaaagttagtatttattggagattcattagaagcgtgacagtattatgtatagttttacagcatacttaagattatgtgcaatctcttttctgaaacccctggagtttggtcggtttcaaaggtcctacagtgtgtagtacattaaaattcccagcagtttctgaatagcactgtatattatatgcattaaatatttttatagcataacatgaatattcttactaaaatcagataaataaagactgtaaatagccttatgtctgtttggatcagattttgccaccaagtgacttgtgttttcagagcctttggatgtagagattgtgaatacaggattgtgggctgtacaaaacagttgtctttattgaaataattgacgtggtaacatcgttcaaaccaaatctgccataaaagataaagatgaatagacaaattattctcttttataaagctgcttattaaatcttctctttgaggagacttttgttttgaaaaggctttgtttaacctgtttgtttatttataactttagcttcctggagaagagcccattggaagagtggaaccagtgggtaatgcacctttgttggcattagttcacaagatgaacaactgcctcagccagatggaacaatttccagtcaaagtacatgatttccctagtggaaatgggacaggaggcaggtaaggaccattgcctggctatacccttgccactggaatttggtacttaatttcactgaagtaagatggcaagaggtctggtaaagtcttgattggcccagaaaacattcagctgtaatgatgaaagaaattaagcactctaaagaatgaatcaaatgctttcttatctttaaaattataccatatgccttaaacaggatgctttataaatatataatccagtgattgtatttgtaacttgtaataggcttagttttccttaaattgatacacttcagcatacaaaacttccttaagaactttatgtttaacttcagtagggataaaaaattttttgtggctgtgagtaatgtttacattttgagcgatatgatttatatgtaatattagtggctataactttgtattttgatggggtcaaatgtttgaagttttactagtttaataaatatatatatttttaatgtagttttaaggactcttgaggtgctacaggaaagaattgttctatgttgtggaatgttacaagtttcatggaatattttgaccggaggcctagaaaataggaaatttgtttggtttttatttatttatttatttatttatttattt

SEQ ID NO: 99052 - DNA, 1062 bp, Homo sapiens
gttagcgctgctttggtacctaagaatcatatagggagtaaaatggtaacatattagcatatatatattatatttttccttttgtattttgttaatgagaatgggaagaaaacatttattggaaacctactgtattgggctgtgtttaggaactgtaagagattagttttattcccactgacatacaaggaaactaaagttcagagacatttgtgacttgcacggtgttacacacttatgttacttgtaggctctaacattgtgggatttgaattctggtttctgatttcataatcttgtgactattttttgtgctgctgcatacatacgacctcagagacatccagatattaatacagttaaaaatactgaaaattagaagtcttagaataaaggccaaaaaatactgattccccatttatctttaattggcaactgggagttaaatactttgcttttaataagggaaaatgagagttcttaaattctctactcccatttatttatcagcttttaatctttgttataccatgctactaagaatgtttccaaaacttccattggtttccattttgttgtgttagaaacaaatcacactctaaaagtgtttttatttccttgctattagaagcttaatattactagatgagtggtacctgatgaaccaaattcagttctgaaattcagtatgtattcacttcagtactctttctggctccttttaaactgaaaagtagatcatgctaaaatatagtaataataagtggggtccaaaaatttaatcttataatctgcagggtagcattgtcttgtgcaggcagccaactcaggtaggagaggggatgaggggaatttggtgccacctggtggcagttttctagtccagcttaaatatgaattttggcagtttcaagacttctggcagactgaacttctggcacagtgggtattattttaggaaactgctgagtttaactggcacccatgttgtttgaccagtctgaggagattgggcttggagagttctggggactcttccacatccctgattctgcagttgct

SEQ ID NO: 99053 - DNA, 1598 bp, Homo sapiens
ttgtcaaccccttgtatataacttactgcttatcagttatcttttccttacactttatgtcactaagcaaagtggtagaattaccttctttatccattttacaaagcttttagtgaaatatggtgcatttctagaactcagtttcttaccactggtttggttggttaggattggatttccctattgtttcattgaatgtatatcagtaaaataaagaggtacagtgcggtgatgaattgttactttcagctggccccaatgggtcactagttttctagacagctgaattttgtctgtcttaatgttgcctttagcatctttgtaaatcctagttgatcatatcatagaagttcatgtgttctataatgaaaaagttttcatagcatttcaagaattacactggcttgagtattttatattgtttattgtgtttctgaagtctgtcacttcaggattgcacatatatttttttttaatgtaataggtggatattcagagtcaaagaaggatgatgctcgagcacagcttatgaaagaggatccggaactggctaagtcttttattaagacattatttggtgttctttatgaagtgtatagttcctcagcaggacctgcggtcagacataagtgccttagagcaattcttaggataatttattttgcggatgctgaacttctgaaggatgttctgaaaaatcatgctgtttcaaggtgtgttaatgaaaatagtagaaacattttacaaatacaaatctctgcaagtaatttcagaaacctctaaagtaataatagaaaaaatatgcacaaaaatttgttaggagtatcttgagctcttttttgtctatttatattcacataatagcttttataaaatataaaacttgagcatttaagaaaaatgtttatgttaatagaatggtttcacaatgaaaatgctttgctctcaatttaaagtagtatggccaaaaataatcatcaaattcaggcagagttttatatacaaatgctttctttttttagtcacattgcttccatgctgtcaagccaagacctgaagatagtagtgggagcacttcagatggcagaaattttaatgcagaagttacctgatatttttagtgtttacttcagaagagaaggtaatgtcatataaattaatagtcatttagtctagatagtacttcaacagaaataaagttttaatctgtcgagcaaaaactgatagcttttcaatttaaaaatgacatttaaagctctgttagcttatagctctgtgtacgtagaatgtgtcttttaggctgggcgtggtggctcacgcctgtaaccccagcactttgggaggccaaggcaggtggatcacttgaggtcaggagttggagaccagcctggccaacatggtgaaacccagtctttaagaaaaatacaaaaattagcggggtgtggtggtgcacacctgggctgatgtcaaactccttgcctcaagcaatcctactgcctcagcgtgggattacagtttgtcttttaataagagtctgatagaatgatagaagccgtggactcttccccagaaaaatgtgaacgtgtgctcattcactc

SEQ ID NO: 99054 - DNA, 3535 bp, Homo sapiens
ccttgtatcaagtttgcatgtaatcagtgttgcttaggtagtgattttcctgatcacaatacaataagattcagttacatttaattgttaacgttttatactatgggccacatattttcagtatatttgaattgaagacaagtacataaatatatttgatttgtggtatgttgaatgcatttttgtgcaaagtacgatgcttctcaaggaaagaaataaagggttcctgaagtctcaggggtgagaaggaattgtgattaggcacccagctaggtttggactaaagaacgaagtctccagaaagagattgttaaaatctacacaaattttttttaggcctttattacagcacttttgcattttttacattaatttctgcattatgttgctttgtaagaaaatgattctgattattttccccccttgggcaatgtttgcctttgaatgaggtagtataactagtttaatagccttttgttttttgttgttggtttttacagacattgcagaaacgcttcactttctcctgtgtggtgcctccaatggaagttgtcaggaacagattgatcttgttccacgaagccctcaagagttgtatgaactgacatctctgatttggtaaagattgggctaaatatcactttgggaggccaaggcgggtgaatcacgaggtcaggagttcgagaccagcctggccaacatgatgaaaacccgtctctactaaaaatacaaaaaattacctgggcgtagtggcgggcgcctgtaatcccagctgcttgggaggccaagacaggagaaattgcttgaacctgggaggcggaggttgcagtgagctgagatcgtgccactgccatccagcctgggcgacagagtgagactctgtctccaaaaaaaaaattggtctaaatacaacttttggtttgtgtgagattatttttctttagagacctaacgtttactaatatttcataaagttactaaaattattgtactttttgttttcagtgaacttatgccatgtttaccaaaagaaggcatttttgcagttgataccatgttgaagaagggaaatgcacagaacacagatggtgcgatatggcagtggcgtgatgatcggggcctctggcatccatataacaggattgacagccggatcattgaggtagtagtttcatcgtaccgtttaaatgtgtctattttgttggagagtgggtgtagggatggaatggggaggtggatatgtggatttgaatgtgcttgattttgaattaactcaagattctctcattttgtctcctgagaacaaggtcctcatttctgttcaggtcagaaaacttcatgttctagtcctgcttctgctgctaactacctgattgacttggagcaagtaatttaagtttgttgttccatagtttcctcatttctgaaaggaaacattggaagacttaggccgtaggtttctaaaatttatctatcttctatcagaaagcaatgtcccatgagcaaagatttacatacaaatagtttcctctcaatatttttccagagcagaaacgtggaaacaaatgaaatagccagttctgggtaaatagttaagtaaattgtgatacacgtaggcttgtatgttatccagatattattgggacaaattttaatgatataaaatcaaatatgaatgaaaaacactatacaatattaagtgaatctttttggaattcagcaaaataagtgaacatatgaataatacaaaggggaggaatgtaccaaaatgttgacagtgattttctgtgacagttttatgtgatttttatttttacttccttatatattgtttgcactgaaatatttttaaaactaaatgagcataatatttgctctagcttaggaggtgttgatcactgtgttatttgtgatgccatgcataatttactattttcaatacatgagacacctgtaagaatttatctattttctaatttcaatctttgatgtttgaattctttttagaacatcacacattttgaatagacagtcttctttaaaggtgccttctagttcgtttctaaaaatgaattttagaaaaaattttaaaccaatgacttacctcataaaatcaagagttttaaaaataaatccagtttcagagcaagcttttatgagaaaattgactttgactggtcttctgtgcagcattatatataagcagtgtataagcaggccaatcctgctaatagtggtcctggtctctaactctaagtcgtcttctttttagcattttcctgatcattgcaccttcactattagcttactctctcatatgtgctgagagtcttgtcttccattcagcctaggagttccatagattggattctgtaatgagaatattttgtcacttctgtagtctgtttaaagtcaaactgtgctaattgaactgtgtcaatttaaatatgttctgtataccacacacaaccttggcgattaatctgtttcagttgtgtccctttcagtcttaaagttatctttgtttaatgaggacaattttataggatcattttgtttaagggaggattttggtaggtcgctaagaattcatcatgtaaataatatttttaatctaagaatactaagatatatggataactgattttttataagcaatgtcttaaaagcattctcaatacaaatggtgtcttctttgtgtcagtgatgctacacaggtggatctttcatcaagattttacctgcatttatgtctaagggtccctgataaggcttgaggcatgtaacctatgtctaattaaaaatgatttgttgaatgaatgagttttgtcatatctacactattattccatcttctgttaacttcaccatctaaaacctgttgaaataaatatgtaagatagcatatttggagggtccccactgtgtcttaaggtaatagatttctcaatgtttatattcaaagtttctctctctttgctctcaggcagcccatcaggtcggtgaggatgagataagcttgtccactctgggacgagtttatactattgattttaattctatgcagcaaatcaatgaggacacgggaacagcacgtgccattcagagaaaacctaacccgttagccaatagtaacactagtaagtacattctgagttaaaatagcactatactattgtgcaatattttgtgtttgcataataaataataattggcttattaagtatctttttaagcttaagacaattgcataacaataatttggttttcgattttttaaatcatgtccattaatggatgagtgagccagtattaactggtatcttttccacaatttgtctgcttacctgatgtcctgagattcgagtcagaatttgctcatacagatttttatctgatcctgtcattactattatacctttagatccattgactagttctttccaaccttgtattttataccttcctgccaaaattatctgaactaattaaggacagataattgtgattaaaaaaacaaaacaaaacaaaacca

SEQ ID NO: 99055 - DNA, 1030 bp, Homo sapiens
agaggttggtttgtttcctgtttgttttgaaattgtgatgttactgactgtaccttgcttaggcccatttgcattttcaaagctgtcatttactaattgagcttgccttgaagaatctggggttaggaggaagataaagtagtgatacatgacagtgaaaatgctttatgctaataaattttattttcctttattaaaaaaataggataaaaagtcagtagaaagcacttgcctttgttttgcacgcctagtggacaacttccagcatgaggaggtaagtgtttagtctttggtagtatttttatgaggttgttgaattgctgaatcttgatgtaataattcctttattcttgtgtttgtgaagaatttactccagcaggttgcttccaaagatctgcttacaaatgttcaacagctgttggtagtgactccacccattttaagttctgggatgtttataatggtggttcgcatgttttctctgatgtgttccaactgtccaactttagctgttcaacttatgaaacaaagtaagtgcaaatttactgttctactttaagcaggaaaagttggttcttcattaatatgtaaagtcaacataagccgagcaaatggaagagattactaatattataggcattggatagtaaagaaaagtgttaatatgtaataaatttgtgttgggacagtatgttaatgtttctaacatactccttttaaagtataaattaaatgtttgcccttggtgtttctggggctaacaatacaaagtcattaatatctatgccatgttagtcatgtaaccatccttgattaggagaattctgagttttatgttaaccaataaccagctgtcttcagcttatataggttgctttttctgcccatgttagattttctagcaatttttctgattccagaatgctgtcttccctcaaaaagtaggaatgtatttatactgatgaatgtctctgatgtttgctaatttggtatttctaaaccttttcaaatttagacctttcaaattaaa

SEQ ID NO: 99056 - DNA, 1048 bp, Homo sapiens
attgatagaatcagcctagttttgtaatttttagtaataattagcacattaatataataactttcagagaagaactttaaagtacttgattaaaaataatctaatttctagaaaacatgccagtgaggttgatagctatttataccctcattatgtagctgagaaagttgaatcagtggggaatagaaattttcatatggtttctagtaaattgtgtttttggtctgtcttacggacctttttgtttgtttaacgcacaacaaaatttgctttatctgataaacttgcagtatggtgtaaagttaaaatctgattttaaaattttgttgtgtaaaacaactcatctattttaaatctgaagatttaaaagttatgtaattgggtttggtttattatgtaaaacatatttttcagtatcttagaactgcaaactggttagaaggaaactgttttggctatactttgtagcttaagctgctaagtgacttgcatcctatggtgggttacatgttagagatagtatacatggatgtaaattagagaaaatatgtagaagataagttattgggaaagaacttaaatgataaccttatggtaactatatatatgttcccagctgcaagttattcagtgtattgatgtggcagagcaggccttgactgccttggagatgttgtcacggagacatagtaaagccattctacaggcggtaagtgttgttactgaaggggactacatttcactttatgtagaatttttaaaatccacatttgtacaggctacttgattgcagtttttgtaagatacaaatgttgtttccagagtaatgtgctagactttttatgagttaaattattttttattgctgataaaggatttttctttaccttaacagttttctatattttagggtggtttggcagactgcttgctgtacctagaattcttcagcataaatgcccaaagaaatgcattagcaattgcagctaattgctgccagagtatcacgccagatgaatttcattttgtggcagattcactcccattg

SEQ ID NO: 99057 - DNA, 1049 bp, Homo sapiens
agggtacttaacaagcttcaattcagtgcatttaaaaatttccattgaaccagaagacagtgaatgactgtcttatccccaaggaggaaatttctttggtgactcagctgcttcgagaggacagagtgtgtatcctcagcagttttgcattccttcattagaaaaacatacctgaaatctgcttaagatcttttccacaagaaaaactaaaatgaaatcagatatttaaacttattcatgcatatatggagtaattatattaatttggctttaattagtgcataattagtttctgatgtgatctatcttatgtttaaattctatattactgtacattttaaagctgagtcaaatggtgcttatctgttttagagaagcttgttcacaagagtttaagttatggtcctgaatctgtgctgacatttgttaacaaatgtcagtgcattgctgatcctgtttatttatgtatctagtatttattagcactagtaagtcctcagggatatattaataggcttctgaaaggggttagagctaccaaaaggataggttgtaagtaacaagaaggctttgtttgtgacctgtatcacgaggtgatggttatctagcagcatactcaagtcggagtcaccgtgtgtgatgaaccatcctgagtgtaatcatttctgtgaacgcctactaggttttatcttaaagttatttttgtgtggtaaaagttaggaataatacttccatttcagttgaagttcaaatagaagaggaagaaatacctctaggattttcccaaggaatatagcttctaatattttgttatctttttaacagattacgttacttcagatggagcacaattttgatattgtaagtatatattgtatttttttaatggtgtatatttaagttttgagtttttactcattaaaatctcttcttttctagatgaaccatgcttgtcgagccttaacatacatgatggaagcacttcctcgatcttctgctgttgtagtagatgctattcctgtctttttagaaaaggtgatcctactttt

SEQ ID NO: 99058 - DNA, 3687 bp, Homo sapiens
ctgcctacctgtaagtagcattatagtgtgtagttattggttaatttcctttttctttaccagaagtgtgggttttgcccagcctttatacaacttcagtatttctggttaatctgtctctctatggctctaaacttttcagagtggtgggggagttaccaacacttttgtaaaaggccagatagtaaatgttttatgctttatgtagtctctgttgcaagtactcaattctgtaattatagcgtgaaagcggccacagacttgtaaatgaatgagtacagctatgttctaataaaatttttatttacaaaaccatgtggtggactggatttggcctttgggccatattttgctgaccctgttttaaaccataagcttttctaagaattttttttttaatcccaataatgaagttacatagaaaatacttaatggtgtgtgaagagaatggtaatatgaaaatacagtcagtggctggtattttggcatctttttcttcagacaagctctttaaactcgcatatgttattcacacatgcctctttaacaattatgacaaaaatattcttcctggcttgcattctgtcacaatctgtgcagtatatagggcttaaggtattgtggaagagcttatgtagatcaatcatctgtgttaaaaaaaaaaaaaaacccaaaaaacaaacaaaaaaaacctttgacctcagcagacacatagaggcacaattaactgctagttttgcaggaatatggttttacttcctgttcagatttataatagactctacctccattagcttagactgtttttttgtcattgttggtcaggttagtatttcgattaatagtatcctgagtcttaactcttcatttcacactagttttgacactttagttgccctgtctttcatacttcttgtttttgttttgagacagagtctggccctgccgctcaggctggagtgcagtggcacgatcacggcacactgcagcctctacctcctgggcccaagcagtgctctcgactcaggcatgcccaactcagtagctgggactacaagtctcactatattgcccgggttggtcttgaacccctgagcttaaatgatccttctgccatggtccgcaaagtgttggtattacaggagtgagccaccatgcccaacctccttcatgcttcatagcagtcatctgttagttgtaatatctttttgcactcttgaagttaatgaaaacagataaatgattgtatcaagactgtagtccggaaataaagcagacttagaaggcagacgtctacatacaacatttcccccaaatgtctattttgcctttttattatttttgttactaattggccatctgttaaataatcacaattgttacagcagtatgttctttattgactttcagaagagggattcaggacatcttaattaaagaacagtttcaacggcacaagaaatttgtcaaaagccacatataaatgaaaaacaagcataaaaatacaacctttttaatactaaaatagttgagctctcctttcattcctaaaagctacaggataaagtctagaagaacagctgagtgtacagtagcaagacaagtttaattgcctttattcaattgtagtccgcaaaactttggtttttctaaggtaagccagacataatgtgtttaagtgctcctcctaaccctcatctttcccctccaccccaagcctctagttctgttgcaggggctgttggcatgaccacctctggggagagtgaatcagatgattccgagatgggacgtttgcaaggtaaaaacagttattgagcctataagaaaccattaccatgagctacctgttaataccattctttattgaaattaatttagttaaattcatttgaccataatctagcagtgcctgcacctccaagaaaaaaaaatttttagtagcaatttcatgatttggaattggaagatgagctgtccgcctcttcgtgtttactgtttcactagatgaagccttacatatttatttttgtttaaaatttttaaattgtggttgcatgtgtagctggtttcagtaataaataagttaaaaatcttgaaaaatgggtaccttaatatatttttgtctggtatccagtagcattatgaatgcatttaacccacttaggcctagtgttccattattggaacactaagaatgtgggagttatttatatcctactgctcaaggccatcaccaaggtcggacttttcactcatgcaaaaattcaaaaaattgcaacctgcagcataaatgggttttaataaggcgtttggccatggttttttgtcttcttgatcatgtttcaaaatgaatgtatagtgtatacacaaattgtagggtttttttaatgttacaaatgcttttacaaaagcagcctaatactatgtatggatgggtatgtatttttatctcatttgatttataacagatctcagtgtgaggcttacaataaatgtattatttataaatcattttttattgcttttaaattcctgagggaacatacaagtatctctaggactcggactctcaggaacacatagtttttgtttgtttgattgttttgagaccgaatctcactctgttgcccaggctggagtgcaatggcacgatctcagctcactgcaaactccacctcccgtgttcaaatgattctcctgcttcatcctcctgagtagctagaattacaggtgcctgccactgcacctggctaatttttgtatttttagtagaggcgggctttcatcatgttggccaggctggtcttgagctcctgacctcaggtgatcctcccgtctcggcctcccaaagtgctgggattacaggtgtgagccactatgcctggcctgttttgttttgttttcactttttggaactaataaaaatcatactgttttcatatggttttataggttctgatgaccaatatctgattgggaaataatgtcatacagaaaacagagcaagggtgcttaacatattagctcttcaaaatatcaaaatatttaccttagatttttcttgaaatatttacacattcctgctggcactgatttaatatattagggtggtcttgaaagtttgtagcttctcttaaaagtccagaaagcaaagtaacattgactgaatcagttaagcgagatgaatcagttacttgaaatttttagatacatcagttgcatgaagtcatcttagttgttcactctgcccttcttttttctttagctttgttagaggcaaggggtcttccccctcacctatttggtcctcttggtcctcggatgtcacagcttttccatagaacaattggaagtggagctagtaagtaaaaatgttccttccctgaaatccctcaataattagccaactgctattgttacttgtaacctattgatgtaagtattaagaagtttttcatcaactttaacccatttttaaaaataaggctgtgtacaatcacaccttaaatacagctttcattgctgaattatccagattttgtagcgagattgattctgtttgaacaaaataagaataaagaatctcaaacaattacattgataattatggcacctgatggcatgttttgcatagatttgaatcttgagtttgtcataatgatgtatttgtcaaggtgagaggat

SEQ ID NO: 99059 - DNA, 1035 bp, Homo sapiens
tgctagtggtactaaagtaaggaatgaactatttttctttatgcttgtaaaataatgtcagcttcattttgcattgggtagctttatagtttcggaagaaatgatcagggttagatcacataaagaaagtggtccaattttgttaactttgcatcaattggttaaagtataaaaatttgtcactccatgtagaatgtttgcattctgatttagacaacatctctccagtattttcacttgtgtgtattggaaactgtcttacacagtactgtgaagataggctaagactaaacgggaaatatctgttgaaaatctggcattggattttatctactgatagtcacatttttatatttgactctgggaacaaatctggcctatgcctaaggaggtttgaagccttgacgaaagaactgtagctgactgctgttgattaattacattttcgtatctgcatgaccttacagaacagctatctctatactactacttaaattagccagaggcttggctggtttaagtcttctaattttgtaaaacatacaaaactagtagtttttttgttttttttttgttttgttttggtaaaaccaaactaattttgtaaaacatatacaaaaatagtttttatatatgttttacaaaattagataactcataactcatatctaaactcccactttagataacctaaactacttcataaaagggaacaaaagcttaatacttgctatcagaggtatggcaaaagaatccttttcttcacaattagtttccaatttctgtcaaaaccagcaccctaccctctactgataatcagacttctggcagtagctcacacctgtaactccaacattcagaggccgaggcaggtggatcacttgagttcaggagtctgagatcagcctgggcaacatggtgaaaccctgtctctacaaaaaaatacaaaacttagccagacttggtggcatgtacctgtggtaccagctactcaggaggcggaggcaggaggatcgcttgagccctggaggcgga

SEQ ID NO: 99060 - DNA, 4217 bp, Homo sapiens
ctgtttttaaattttttagattgtttaaaatatctggatttagtacacctgtttgcttttgaggttgcatagcaacttttctgaggatttctgaagaaacttcttagttttccagagtttttgtcctattttgggccaaattttgaatcttaattactcaaggtttagtctgagatgcaaactggatttattgtgtctgaaaattaattttaagccatatgcgaagtcaggtaatctagtgttgtaattgtcttgcttgccctgctgttctctgcaaccgtctctccttctactcaacgataattagcacgtgcgaaattacccactgaggcatgatcatgctgtgcgcaggccgtctaatctagccacctgcttgaagtgctcttcatggcaaatcttttctgaattagttgagattctgcttatatacagtgccttggtcacctactaagggtgtccttgtttctctttagagtagcactccttgagggcagcagccctatgtatccaaagtggtcagcccagtgtgttggtggagattagatcttaaatgagtgaatttgaatcccactaatttgtacctttgtaaaatgggttgggaatgagctgtttccttgtgaaggaaagattagttaagcaaatttctgtgtagggaagctttttctgtaatgagaataaactcttccagtgctctcaggtaagccagagccttcctttgtaggtcagttgtgcctgcttctctcactttactgtagtgtgactttagtctaaaacatgtctttagtaacaggtttctgcctttcttgagataatttggggagcttttgtttaaatgctatcaagtttgaataattttgggggaagtatttttgcttctccctggtttgcttactgatttcgctgttgaaggagaaaaaaaggtttattatcaataaaatgtaattttctataggagaaataagtggtcattctttttccataatttattctgtgtctctgtcctagatgaatatctttcccaaatgttatctgtatttattaataatattaaatccataatttaaagaatggagttattcattattaggatagttatttttatatgatttaggtaatctggaacacgggctgggaaatttttttccatctcctcctcctcccttcctcgcattctcaatgttaatctgcagttcttttgtataatttttttgttgttgctgccgcccaagatggagtgcagtggcatgatctcggctcactgcaacctccgcctcccgggttcgagcaattttttgtcttggcctcccaagtagctgggattacaggcgcatgccaccacacctggctaatttttgtatttttagtagagacagggtttcatcatgttggtcaggctggtcttgaactcctgagctcaggtgatccacctgcctcagcctcccaaagtgctggggttacaggcatgagctaccgtacccagccagcattaatatattaatccactatttaccctggaagtgatgctctattttaaacgaattgaattttctctgcagaaagagtcacttttctttttagttggaagtgttttaaaaatcgtttctgtttctgaggatgacaacagctcacagtaacaaaagcttgtattgtaaatgcaatataacttggaagaattttaaatatacaaagtcttggttgttatacatggtgattttgtgcacttacttttatttaaaaagaggacgaagaagaaactggctttgtgctccatgaatttgagctttgtgttgtgtatacattgctcctggttcactggtaatgctgcccatgatgacatttttctgttgtagtcggcgaggctctggcctgggcaaaagaggagcagctgaagctcgtcgacaggagaaaatggcagaccctgaaagcaaccaggaggcagtaaattcttcagctgctcggacagatgaagctccccaaggagctgcaggtagattggtacttcttagctttaaaatgcgtttctgtcttttacagatttgatgggcagagggagggaagtatgctaggtgttactatcgtataaacttcttgttctgttttgttttactttaccagtttgatattttgattagttggatttggttgccattttaaaattctcatccaaatttgctctaattacattcaaaaggcttttaggaagaagcaaactctgtttaagctttttatatattgactagtgtgtataattgcccattgattgaaagaatttaaattcatagtaaaaatgtaaggatatagtttaaattgcttcacacatatataaattttaatttagaatttttgtaagccctaaaatacaagtattcagtttgaaccttagctgtaagaatagtatttatattgttatgggcttctcatttttattcttgatatattagaagcacaaaattaaggcttttctctcagctttaaataatgtacccattacctgtaccaaaacaaggctaatacttcaactattaattctggctgatggatatcaaaatgtagtttctgttgacatttctcaatgacatgaacaactgataaaaaaatgttaaaatcaatcactataggcttatatgtatgagtcccttaaatcagatgatacacacaggtttagatacaggcatatacttccttttgaataaagatatttcagatactattgtttactattaggatacgttgtcattttctttaatgtctgtggttgatcatatgtcatagtttgccaggaaggttgtggtttacccgctattgatgtcttcttgttttttctagcttaggatttttttcttttaagcactacactttcttagttttatatgataaattatatggtgggagaggagttttttcccatatttgttttcctagaatagttttttgaaggtttaaatggtagatatttggaaagtccatttaattgcaactcattaaaactggttgtgactcacagtctgtcccagtgctgtacgctccttcccagtcttctaatgtttatttgaagcctgaatgtggaaatggggcaattcccaaatgggtaacagaaaaggagctgcaggctattaatgtagactcactacagtaattattataactaatatacagtgtacactacattgcagtccagccatagtattaagcactttacatatattcttatttaatattccaaacaacctgctgaggtatgagtgttattattaccattttttaagtgaggaaaaacggagacaaacattgcttatgcttgctcagggttacaagctgtgatgtgtgacttcccaaagccaggcatatttgtaacagcattgttgtctaatgcagttacaagagtttatataatttatacgaatatataattgaaggctggaatgggaacggggttcaaaattttgttcccctatttatttacctaagaggataaaagcatacaggaatcaggctcatccgactgcctttctaaacagttccaggcattacactgtcatttatgtttcaaattacagtgtggtacaggtgtttcccaagctgtgtattgtagctggtgataaaaaatacatgtggcatgtgcacttgtattagaaaactgacttcattacattttggaggatagatctcttatgaattataggaatttctctgctgactcatgaaagtatttatggggaaataagctaattatttagcagctttacgttaagttcttcatgataatgtgctttagtttctgcatgtgtaaaatgggaatgtagaagaaaatacctaaattagtatggtgtataggtttgtggacttagagctctttttgacaagtaaacgttttcggatagtacttgtatagtcgatataagactccattggaaacatttatttggaaataatgttgttattattttaaaaagcccaaccacattagctcttcatgtaagaaatgctagcctttgaagttgaaagtgtagtgtttgccacgctttcccacgagtcagaggcagactcctgtgcattctttttttttttcttctttgaggaaaagtttctctctgttgcccaggttggagtgctgtgttgcaatctcagctcactgcagcctctgcctcctgggttcaagtgattctcttgcctcagcctcctaagtagttgggactacaagtgcctgacaccacagc

SEQ ID NO: 99061 - DNA, 1499 bp, Homo sapiens
agcaaaattaaaacttcctgaaaagaagtaagtgaccaggaccaattgtataattaattagtctctgaaaaagttaacagctgtttaagatgatgctgagttctcatggaaatatgattggtaactttggagacctttcactgttggaggtctttgtttagattgagtatactgcctagtatgtcatttgtggtaacactgtgagggttgggcaagggtggatgctgtcttggctttcttattgttcataaaatagtaataaactttacttaattgatacaccattttcgagcctattgacctgtaaaggcattagttagcttccagaataacatgtaaactgtgcttaattgagtctcccccctaattatccagtattttataaatcagtcttcctaataaccttcagtccaagtgcatgtacctttctgatgggtggtataactcattttattctctcataccttattgatgagccttatataaactaactgaaatgggacaatataagaacagtgtaacaaagttgataaacttaatgacgtttagtaaattcttgaaataaatggtatatacaaaaaaactcgcctttgttagtggagaagaggagcaggagagaaaagaactttgaaagaggagagataggcaggactttggggatagcttgggtcaaggttgggcccaagtgagaagaccgatcctgaactggagtgccaagtaccattagctttttcattatgaataggctgtggaaataaagctagtaatactgctggagaggttataaaaatattctgtgaagttttgaacatgatgacctgaagaattttataatttttaattagtgataatttctcattataaaattacacttttccattttctgtggataggtttaagaaaatctacgaagaaacgcagtgagtctccacctgctgagctccccagtttgaggcggagcacacgccaaaagaccacgggctcctgtgctagtaccaggtaatttgtttttttttttttatagtgagttcatttttattctgttgctcaatttcaactttcatcaaaatacttaactccataggttgttttttgttttgtttgttttgttttgttttttgacggagtcttgctcttgtcacccaggctggagtgcagtggcgcgatcttggctcactgcaacctgcgcctcccgggttcaggtggttctcctgccttagcctccctagtagctgggattacaggtgcctgccaccccacccagctaatttttttatttttagtagagatgcggtttcaccatgttggccaggctggtctccaactcccaacctcaagtgatccaccctcctcagcctctcacagtgctgggattacaggcgtgagccaccgtgcccgatgatttttaaaaaattatttaaatttttttttacttgagtaaagacatattctaacataactggtattatctttgtgaatttctccgcaatatttattta

SEQ ID NO: 99062 - DNA, 2116 bp, Homo sapiens
tagtttttattgtcagagccatagtttaggtttaagtcagtgattcttaagatttaattgttaagagactttggaaagcaatgttaactttgaagatttgatagtactacaatataaaaatctctaaccttcattttgaaagtgcgtatgttaatgcttatttcttctaagctttgacaaagcagttgtgcttgtgaatagggcatcaatattctggcttcctctggttccgaacaattaagtgttgtttttcttgtaatcttaattcttgttttgtgattacgagtgttagtgtcagtaatctttgggctaaagaacacccttatcttttaatcagatattttagtatccaaagtcacatctgcttttgttttgttcttttatttcgttttacagatttgaaccttctgaaaacctatgtttaatactggacttagtaggaacatattcatactttattttttgaaagcattatatatgacagttgtaattatgacaggctgatattaactgttttcttatctaacctcttagaagctgcagttcatcatctgctgtgatagttccacaaccagaggatccagacagagccaatacttcagaaagacaaaaaacggggcaggtgcctaagaaagacaattctcgaggagtgaagcgcagtgctagtccagactacaacaggaccaattctcctagctctgcaaaaaaaccaaaagcacttcagcatactgaatctccctcagaaacaaataagccacatagtaagtcaaagaagagacatttagaccaggagcaacaactgaaatctgcacaatcaccatcaacaagcaaggctcataccaggaagagtggggccactggcggttcacggagtcagaaaagaaaaaggacagagagttcttgtgtaaagagtggctccgggtctgaatcaactggtgcagaagagagatctgcgaaacctaccaagctggcttcaaaatcagccacctcagccaaagctgggtgtagcaccatcactgattcttcttctgctgcctctacttcctcctcgtcttctgctgtagcctcggcctcctccactgtaccaccaggtgccagagtgaaacaaggaaaagatcagaacaaggccaggcgttcccgttcagcgtccagtcccagccccagaagaagtagcagggaaaaggaacagagtaaaactggtggctcttcaaaatttgattgggctgctcgtttcagccctaaagttagccttcctaaaacaaaactgtctcttccagggtcttctaagtcagagacatcaaaacctggaccttctggattacaggccaaattagcaagtaagtttacaaaaaggtatttttctttaattaaagaaagtttctcttggtttgtcaaaagcaattatgctttaaagttaagggttttttccccccagtcttagataatcttagatgtattactgtctgtgtaattaagtacataacagcatgtagtaagtgctactacatttagttttgttgagacaggtaaggaatactaccttcctattattacgaaaccatcacattttagtgtctgtgtctttattggtcctcgcggcatctcctacttcactgatttcctaatatcaggatgggacataaagttggattttcttctataccacatacaaaattatcatttagttaggagttctttttagttatgagttgccatgatcagagatcaaatatatatatgtttttttagatggagtctcactctgtcgcctaggctggagtgcagtggcgcagtctcggctcactgcaacctccgcctcctgggcttaagcaatcctcttgccttggcctccagagtaactgggattacaagtgtgcacaccatgcctgggtaatttttgtgtttttagtagagatggggtttcactgtgttggccacgttggtctcaaacttctgacctcaagtgatctgctcacctcggcctcccaaagtgtggggattacaggtgtgagctaccatgcctggccaaatatatttttttatatgagatattcttgatgtgtagatacagtgaattaagttattactataaatatacctcaatgtaaattaaact

SEQ ID NO: 99063 - DNA, 1332 bp, Homo sapiens
gtacttgtatgatatcttaagaaatttatggcatccttacagattgagttagaattattttgtgagattttcagtgactcatttctaagttcttttgagatggtgtttggaataaaagccttaaacttttttttaacaagtaaatttggtattaatgaaacttttttctagattttcattggtatatgctcttatgtggaaagtggatatcagctatgaattacataaattgcatttgttacattaatatctcacccgaatggcagcagttttctggatatcaacatgtgtttgttttttattgcttatgtaaatctcatgtaaccattccccaaggtctaaaaaataatctaactgaaaacagttttttcatgttcctcaaacttgcttttagaatagtgctggcataaggatttgatttattgtaaatatgatgcaccatatcaatcatggaattatttgaatgttttttggaacttttgtggtaaattccatatttctccaggacttttttgtgttctttctgttgacaagtactttaaagttttagcaagtatcactatgttgatttcatgtaggtttatttattgtttagtgcttgaaatgattttctgtgtaaaatcagtttgagaattggttcgtctgtctctgcatttgctgtgtttacctgaattttaagtacaaattggaaatcggtatcagtgtgggaatcatcaattgtcttttccgtaaacttttaaagccattacagtcacattatgtattaaaagtgtgtttagatctaaagtctaaatttgctttttgttaaaatgtagcatatttgaatatctgcactaaaattgctgaaaaatgtgttactgcttaagcaaccttaacaacgctgtgcaattatgactactggtgataataaactcttcggtattgcggggcgggggtggttctgagaggcaatttctttttgccagattatttagtagaataataattaaaatttataaatatttggaaaaagggtagggtcaacaatgaattgtgggaagctttaagaaatatataaaaatatttcattttcagtattgtatttgcatctcagtttcctgatagatttctgttttgattttctgctgacaggtcacatttagggcaggcaaaacataagggatatagccctcctgagagtagaaaatctaattctaaggcacccaaagtgcagtctaatactacttctgaactgtcaaggggacacctttctaaaaggtaaatcttcatgttgcttatacattttcaaggcagaattatttgcattcaaatcattgcataatgttaaaactt

SEQ ID NO: 99064 - DNA, 1388 bp, Homo sapiens
cgtccaaggctcctttacctctgaatactgtgatgttctaattggctattccagattggacatcattattttatggagatttactttgcagcatttttgagcattaataatttataagtggacataataaaatagagctccattttgggaggccccatattgtcacttcatggtaccatctggttgtctattccttgttagccagggttgaaaactatagcgcatgggctgaatctggctcactgcctgtttttgtaaataaaattttgattgaagtatagccaccatgctcgtttgtttgagaattttctgtacctgtttttttgacatacagtattgcccaggaagctgaaaatatttactctcctttatggaaaatgtattaagtcccatgggctaaacagataggcagaagggacagttaagtatcaatattttatatttttaaaatatattttttaaacagtccttagaatatcacactttaaaataattttaggtaagatcagtgtgggcattgttgattttttttttttctttctttcttttttttttttcgagatggagtctcgccctgtcacccaggctggagtacagtgacacgatcgcggctcactgcaacctccgcctcctgggttcaagcaattcttctgcctcagcctcccaagtagctgagactacaggtgtgcgccaccatgcccggctcatttttgtagtttttattagagacggggtttcaccatcttggccaggctggtcttgaactcctgacctcatgacacatccgcctctgtctcccaaagtgctgggattacaggcatgagccaccgtgccctgctgggcattgctgaatttaagccagttttgtgagccttggttttctaaatgatttgaatactgtttactttttgtggtataatatagagagtttacatgctaagttcttaagttcattgaaggtattagtaagggcatgagaaataacacaggagtagaattaggtggatctaacataagctatataaaagtcaacagaacaatttatttgagttaaaaagaggagggctgctgccccagacctcacctttagtttcatatgggccggtttctgatgacaaatggaatgaatcataatttttaattgttttgggcatttatttttcacaaagttgtctagctttgaatgtatgtagttttctttcagaatgagttgtttaattatcaaggaatgcaacaagctatattttaaattttaaaatgaaataaagtagaaaacgtgatttaattaaaacatcagtctgcaacgatctttaagaaaataagaatgtagaggacctgaatgacataatttatatttcctgtagctgttaaattccacaccccaaaaa

SEQ ID NO: 99065 - DNA, 1082 bp, Homo sapiens
tcgttggaaacatctatggagagtacctggtagattactttgttttatgagactctgacctctttgaggacagggactagactgttacctatatttatgtgccctgttgggacttgcatatatttgttggtggcaaacctaacatcttttgaaatgagtagcttagtacaatggttctcaactctatcagaggcagtgctccctgtctataatgtatatcatataaatatttttattatgctcttttaatatcttcaaataaatgaagaaataaaatacctgcctacacacagtttagaaatattgatataatgtcttagcattttacaaagataaacaaaaggaaaatagttgataacaaaaataacatctcaataggtaaatgcttggacacagtgacacaaaattatagtgcatctgtatttggagtcactgaatgtgacagttacaacaatggacttaaatgccataagcagcattttcatcataggcattaaaaacggtgcctgactcttggtaaagctgccaaaaaaatagtataatcgcttgtcgttgcattcttggaaaatttaatatgtaagaactgtgcaaaacaaatctgagaaattgcaagcacgtttttcacctatgtcactgccacactgtcagggcttttcataaggttttcatatattaccaagactgtttgaaatacatggggcatgggacagttgggtctttttgttctgtatgttgctcatctttacctctaatccacacctgctaaatgggaatagcactgccgcttcccagtgtatgtttccagaatgcttcctaggggcagtatttttgctgtttagaaatactgctttactttaaattatagaatcatttgggctagtgtttcagtgtaactaaagataggaacattgatcagatgaatcaagcttctttttgtaatagaaatagaaaaacagtgcgttttacagggaacattagtgagttacttatttaaagtggtttaaagtgaactttccaccattaattattgaaaatcaatggctcttttaaaacatggattttccagcatttgaaataaaata

SEQ ID NO: 99066 - DNA, 1015 bp, Homo sapiens
atttctttcctgtctctttttttgtcctctcatttgttcagtcagaagcaagttcaaactgcttcttgtttgggaggaggagaatgttatggggagacatgatgtgatgcaaaaataatttaatgcctcttatgactgaatttgagccactttttaaaggtatttatactagaattggttgggcgcagtgtctcatgcctgtaatgtcagtactttgggaggctgaagcaggcagatcgtttgagcccaggagttcaagagcagcctgggcaaaatggcgaaaccctgtctctactaaaaatacagtaaattagccaggtgtggtcgtaagtgtctgtagtcccagctacttgggagggtgaagtgggaggatcacctgagctcaggaagttgaggctgcagtaagccaagattacaccgctgcactccagcctggactagagaccctgtctcaaaaaataaatgaatgaatgaatgaaagtaagtattctagaatcggctgggtaatttgtaacttgctcttttcagcaatagtaaatcttactgctctaattaggcagcctggagttttagctgtggagacctgtgtgcctgctgcattggtaatgctgaaactagtctgtcccatcaggccttgggatcaggaggcaagataatatggtgctgtattcaacaatggcatggttgccttggtctaaggagaagcagaggctacttttctgtagttggaagttagaaacatttgattcttagtagtacccgtgttaaattttttgggggggcctacaaagtaatagtttatatgttttctattagtaatttcctttgcactatgctttattttaatcaagtttggaattgagtcaaagtcacatcataagcatactggaaaacctataagaaattgtcagctgccatagattgtctcatatccctcactgaggatttgctttcattcttctgatactccaaaccacttttaaaaagctttcccagtcttggaatgccttcttaa

SEQ ID NO: 99067 - DNA, 1080 bp, Homo sapiens
gccaccgtgtctagccggattaggatgttttctagtgaaataatgaagccacactcaagaaggactcaggacaagctgtcagtgtaccaatcaacttaactttccttttcttgatttttgaaagaagtataccgcaaaaaaataaataaataaaatgccaaacttaattcctatctactgatttcagagactaaaacttgatagtttttactctatgcttaactacttaaaataccttgcaatttccttctttagtaattttgatcatgccattttccttttaaaatgcttgccttctgtattctagaccttatcttactgaaattctgccagtctttcaagatccattcaaaagtttccacatcaatgtagtttatactcttttccagtcttagaaatcttatacagatcccaaagcactgtaacattttggagatccccgggaactacagactcagtatctgtctggctgcctcctctctgttcatctgtccttacgttactgcttcttgctaccatgtcatgtccatccaggcagatctcaccatctctttgtacaccatgtttatttctttccctgtgccttaaggcttaacttttaggcctctcatcttctgaagctagatcaagccctctttcattttgaattattaaaaagattataccattttcatggaggtggcaataaataatgttcttcatggtttttgttgtgcacggcacctctccttaaaacagtagtcttgtggaatggcttcccatgcgttttgatgggtagttactctgttctaatacagttttactctgatcctgttagctattccttaacctttggtgaaagctaggggaatcgacgtactccctctttctgagcacagtgataagcctggtgtggtcacatgatcaagatgagaaaagttggaagatttagcttttttctttctggtgacaaagatgggaagatgtgaatctgaagttgccaactactgtgtatgtgccttatggaggaagatggacaggcagagaagagcaaagagtatgtgtgtgctaacgttctggcaagtttaaattcgttagtag

SEQ ID NO: 99068 - DNA, 2841 bp, Homo sapiens
tgcaaatgagatgagaagatgctggctcttctaaatatcattttgccgtcttggcttgattcttttgctcataataaaatgtcaagactgggagtaactttgaaggccttcttatcagcccccaggttgatatatttttgttttgttttgttgagatggagttttgctcttgtcacacaggctggagtgcagtggcatcatccgggctcactgcaacctcctccccctgggttctagcaattctcctgcctctcagcctcctgagtagctgggattacaggcacgggccaccacacctggctaatttttgtatttttagtaaagacgaggtttcactatgtcggccaggctggtcttgaactcctgacctcaggtgatccacccacttcagcctcccaaagtgctgggattacaggcatgagccactgcacctgacccagattgacttttgaaacccctatagagtgtactgttctagcaattatctaaactctcagaaacctttccagggagttttgggagtgagaggattgggattaattgggagagaacaattacagctatatatttattctcttcatgtgactcgtttagccttcctaagtaaaatgctgtcattgtagccttcgtttcctgaaaatggttgacttgccccataaaggtattcacagtgatacagtgattcaactaatgataataatagcagttacacaacagcattaatggagtgttttaagtttaaaaaattattacacattctttcagttgaaactcagaaattaaatatgtaatctctcttacaaatgtggaagcttgctcaactttgtatagctagtgtgtagtcaggacttgtttccagacctcttgactgtaaagtcagtgtaccttttcattatgccagagtgtttcattgcagcccactggatccgtatgatgagggagtgttagaagagggtataaactttagttttgaatttaagtagcacttttctctcctaggatttgtgctaggattcatttttgacccactctgtttttttctaaacctctgcattaagctgtcttctttgtgtaacctccttccagtgacctcttgtgcctttctcccaaatcaagatggtttctttttaaaaatagtttaaattcattcttaagataaatgaaagtagagtctgaggatatatttaatcccttttaattttacctctgctctccttttcacccatccttcatcactatccacagttgaactaggcatcttattcctcttctattatttttcttagcccctttcctctctaattttttggattgtagctgacctgttcctctcttttctgttctctttttcttctataggaaatcactcctttccactgcttctctgttgacttgctctcagggatactacctagccttttccagttctagcacaggtatttgtaggctaccacctccctcttggcaatgcagtagcgtttttattataccgtgtgctttttcttgtttttctcaagtggcagtggtaggattgaatttaattttatagcaactttaagattgctttagtggtagtgtcttcaaggttgatttaactatataaacagtgcatattgagaatagaaaattgggacgcttcaggaaaattaaagaaaacaattttaatcctaccactcagagataaccatggttaatatttctagtctatgttcttacagtcttttctatacgtgtagcttctttttgtttttttcaaaattccacagagatcaatatatgtatacttgcaacatacaaataatagggatgatgttatcactagatgtattttctggaattctgtaacattcttccatgaggtaatttaaagtggctccatgattttctttaatataaaagcccatgatttaaatttgggcctctaggttttttcctcagatttttgctgtaaaaaatattgcttatgcctatcatatttgaatgtgagctggttttatcaagtcgaattcttgaaaatgggtttacagaatctaagggtatgaatattttgaagacttttgtctttcagaaatcttgggccaatttaatacttctaatacttcatgagagtcctcattttgccaaatcctagtcaatagagcataccctttttaaaaagaaaagtttgtggggaaaaagaattccttggtttaaagttagcatttcttcgtttactatagagtggaaaaatttgctccgtgggccattttcatttattttctgagctgtttgttagcgtcttttgtctaattttggagatacttactcttttattagggccctttatgtgaaaggtgttgattcactaacatggacaaattttttttctgttttttttttatggtttattttaatttctacaacattttaaaatcagataattaagtctaccaactctgtttttcttcctttgccttctccatgctaagaataaatttttcctcagctttgttatggacccgtttttacatctgactagaatctgtctgaagtttttgaatgatgagaggaaatgcttgtatacagttgcctacttctcacccccatcaaaaaatttgcctgcaaagttttaataattatgtattactcagtaaaaactcaattgtgagaaatataggatatagccttctatttattatttttctttacatttttagagcagagatttttttaaacccccattagttatatagaaagaaatagagttgtgttttcacttaaaaaaactatttcaaaggattgggatgcagaaaagtacaaaaagaaaataagaactattcagagaaaagtctgtgttaactt

SEQ ID NO: 99069 - DNA, 3096 bp, Homo sapiens
attcacaacaatactgtgaagaagacatgacatacattgttaattctgtgtctaaggaatcctaggcttagaggctgtgatttgtacaaaggcaaacttctttaacacctattccgtcacaagacttgagccatcatcttttgacttgaggtgtagtgcctgtttaggcacaatactagaatggggaaacgaagacatatttctacctgtgctctgttttctttgaattgagaattttctggctattccgtgaaatctaagttaattttatatactgagtccgggaccacatggcttgaatatgttacacgtaccctgacattttgttaacacgttgatcagtcagacttcacagttcagtgagacattgcagcatgggtgaaggctgtaaaatcagatagtttgcagaaaatttccatgtcaccgtaagttcccctcatttcttttccatattgtattttgtacatctgataaattttgtttatttttttttcttttagtgaatggtagtgtctagaaagggtatgtcccttcaagagagaggtgccaatgtccaaccggcctaataacaatccaggggggtcactgcgacgttcacagaggaacactgccggggcccaaccacaagacgactcaataggaggaaggtatgtatttcatggtaatttgaaaaggaattgggaataaaagaaaaaatatttttaagcctccttgcgaggtccaaaacttgaatggttcattgcatatgggtaatttttcctgatttgtgagccaggtacttaaaagcaaactggaatccaaagcagttcctaaatttttccccagatatgctagactcaaagaagtagttcatagccactgacatgatcagacacctcatttagcatgtggtgtgtcatgttttgtttgccctttctcttcacttcgttaaatgtatgttacaacacatctttcaccattcgtggtctttttccttatgtgttgacttaatgatactttatggaaaagaggcctcatttgttttaagaacttgagttttaatactcagcttttgagcttttgtcctcatcatgccttttgacagcatagatattaacagggtagtgaggcactctgactttgttagtgaacgagttgtcttatgtttttagtggtctggtgtttctttttagttggagtagttacatatgaagtagtgtgaagaatcagatcagatgtgttttcttgaatgtaatactccaagtcagatttagccaaggactgtcacttcatgtaaaaaatactcagaactcttcttgcaaggcctagttctctaattttgggactaacattgattacgtttagcttgtgatggataattgttaaatttttttgtttttgagagtctcatcgctctgttacccaggctggagtgcagtggcactatttcagctcactgcaacctctgcttctgaggcttaaaaatccttccacctcagtcccccaagtagctgggattacaggtgtgcaccaccgcacccagctaatgttttttgagacacagagacaagattttgccacggtggccaagctggtctcaaactcctgacctcaagcgattcacccgcctcggcctcccaaagtgctgggattataggtgtgagtcactgcgctcagctgctgaattctaataggattatctcatacagcagtttgcggccataaccatgaatgcatattatctagtaaagtatttaaaaattttttaggccgggcgcggtggctcacacctgtaatcccagcactttgggaggccaaggtgggcggatcacgaggtcaggagatcgagaccatcctggctaacatggtgaaaccccgtctctaccaaaaatacaaaaaaatttagctgggcatggtggtgggcgcctgtagtcccagctactcgggaggctgaggcaggagaatggcgtgaacccgggaggcggagcttgcagtgagcgagatcacgccactgcactccagcctgggcgacagacagagcgagactccgtctcaaaaaaaaaaaatttttttttaatgtcaaatgtaaagaataaaagcacatcatggtgatgtcagactatttagtggttaagcatagggactttggactagggcagctttgcgtgtgatttctttttgttttgttttctttttttttttttttaaaacagttgctgtcgcccaggctggagtgcagcggcatgatcttggctcactgcaacctccacctcccgggttcaagcgattctcctgcctcagcctcccaagtagctgggatttcaggcacgcatcatcacacctggctaatttctgtatttttagtagagatggtgtttcaccatgttggtcaggctgatctcaaactcctgacctcaagtgatccattggccttggcctcagagtgctcggattataggtgttagccaccgcgcccagcctttgtgtgtgatttctgcctctgccattaaatagctatgtgtcttttgttaagagtttcaggaaacctcagtttcttagtccacagaatgggatagctatttcataggattattggtaaacttcagtattttagcatgttaagctcttatcacttatacttagtatatagagctctgttctgaaaatgtttgctcttttacattcaggttattctttggagcagccacactcaacttcatgtgactgattttaaaatattattcctcctgtaataaaagtgttacatgttcattttagattattttgaatatatagaaaactaaaaagaaaaacataattccacacttataacgtgtgctgttgacattggttactattgacatttcttctgtcttttaaaaaactgcgtgtagatgtacattatgtatgtgcatgtaagtaacttgtacctttagaacaactgcggttttatgcatattaatcctcaggttgcattgggactcttgcatgtgaactgacaatcattgtgggctatcaacagcgcattgcttctaaaatccacagtgtttcagcatggtcattttttctatatatcagtgttatgtagattaaaaaattttttttaatttatttttt

SEQ ID NO: 99070 - DNA, 1036 bp, Homo sapiens
ttgtccaacattttgtggactttagaataaaaatattcgtgaagtctatctgttttactgctgtagcacaagagtgcctgtttttctgtaaaacagccacccagcttcatatattttttcctttatatgaagcatgtattttcatttcttcccacctagggaaagcagcttagtctcaagggaatttgaccctgctctctacccttccaccccaggtccaaatgcatttgtgcccttcccccagtagatggcaacaagtaggctgatgtttaagaagattcagtagtcttaactttgtgatcagacctatttactaattatttctcaactgtcattagtaatgttagtgttgattttcacattctggcctcaaaatcctttcagaaaactagactgttaattgcagagttcatcttttttactctactcttcatcctgccttttgaaaagtgttgcctttccagttgctgctatgaactaagacttggggtatttcagcctttggtgtggtgctgtaagataatctccttctgcctcttctaaccatctagtattacttttcagctgcctgtatattaggccatgacattttttccaggtatcttgtcattacagaaagtaaggactactgaaaggaattactgaagagctaatacaccatcattttatatcttcattgtggtacatgttttaattgatactcagtttatttcttgaatcatttaaggaattggtaaacttatgtttgctggaataccagagtttctttctcttctataaaatgggtctactacctaactcatgtgtttactgatattcagccatagtgttacggttttgtttcttattactaaaaaagaaaatgaaggtgattcataattacagagttaacttctgagagtttactgtatctcaagaaacttagaactttttcatgattcctgctgagtttatttaaatttttaatgcaatagtaaaggatttgggaagttttccatatttcttcagacagttgtaaagttaggaatggcttaat

SEQ ID NO: 99071 - DNA, 1189 bp, Homo sapiens
attatgtgcatgtaatagttgataaagtacattgaggacctaaataagttttttttttgagattgagtttcgctgtgttgtccagattggagtgcagtggcgcaatcttggctcacttgtaacctctgcctcccgggttcaagcaatcctcctgcctcagcctcccgagtagccgggatacaggtgcctgccaccacacccagctaattttttgtatttttagtagagacaggtttcactctgttggccaggctggtcttgaactcctgacctcacgtgatacacccgccttggtctcccaaagtgctggtattacaagaatgaaccactgtgcctggccaatatgttttaatgcagtgctaaatgattagtgtttccaatttataatagtatacatcattgtagtttattctgtttgtttctttttagagagcatgtacatatttctataaatatggtgttattacccatacatggatttttgaaggctatttataagcctaagtgtccatcaacaagccttcaagacttgaagttacagcatttcagtgtgtattttaatcaacttgttggctgtcataaccaatgagttctaccctgacttcaaaactcctactcactctagccgtgggcagtgctctgaataaatagatgtaccttgtgctgtgttcttaaggtcagatgaacttaatttaaagattttatactggtaaacatgtgcgatgccctggaaacctaaagtgagttttcacagtagcccatctcttgaaattctctcttcagttgtaatttaagctactttgtgtccttagagagcaggttcatagagatcatatgaatgtcccctactttttttgattctcaaaaaccaagtgcttctagtagccttgtaaataggaaatatatgcaaatgctgtcaacttctcagaccccagtgtttcgtaattctgttttacatccttggctgcaatcagattgaactgtttcttcctctctgaacacacccagcaactttttagcatttttgctttggttttttgtctacttgaattgacaccccctctcacatcttgtatctattatttttattattatttttattttttgaggcagagttttgctttgccgcccaggctggagtgcagtggtgcgatcccgactcactgcagcctccacctccacctccttg

SEQ ID NO: 99072 - DNA, 1007 bp, Homo sapiens
tgtatataatcttagtgcttggtaatttttttttttttttttttttttttttttttttttttttgagacagagtctcgctctgttgcccagggtggagtgcaatggcgcgatcttggctcactgcaggctccgcctccagggttcatgccattctcttgcctcagcctcccgagtagctgggactacaggtgccagccaccacgcccagctaatttttttgtatttttagtagagatggggtttcaccttgttagccaggatggtcttgatttcctgacctcgtgatccacccgccttggactcccaaagtgctgggattacaggcgtgagccaccgcgcccggccagtgcttggtaattcttaacgtgtagtgtaatgtaagctttacttgtgtattttcttttggtacttgtgtatcatttcagcagctgtgttacagacttgaagacataacctcaaagcagttgttctctacctctctgctgggtttctctgtgcataatggatgcttgctgttatttgtaataaatagataagtataccgatgctagacctgtcccttgatttttctttttttttttttaagtaaaatttaactctgctaatgtcttgggttttttaaaaatgtagttctttaatatcctaacttactgatagttttaggttattggcaaaaagaggtttcctagactgaaataagtctgttcagtcatttttctctgaggccttttagattttggttgtttattgtgatttcagtgatttcattaaactgaattggatagaagaaaaaggaacttacccattattcaggcttacctgctttgtcttgagagtgcagaagctattggcagtagtcagtttcatggttatgcttgttcgtttgttgagacagagtctcacttttgtcacccaggctggagtgcagtggcgcgatctcggctcactgcaacctccaccttccaggttcaagtgattctcctgcctcagcctcccaaatactggg

SEQ ID NO: 99073 - DNA, 1093 bp, Homo sapiens
tgaccttgagctagtcacttaacctatctggtcttcatttattttatctgtaaaatgggagtgggtaatctctattttacctcactgggtggttgtgagacccaacagatgtaatgactgaaaaaaaacaacatgctaaataaattaattttagaaaattacatgagctgttttgaggtcatttttaaaagatacagcttctcattagtcgtggtggtccatggggcaggggagaattaatgtaaactaggttgaaggtacagagttatagaacttcataatttgaaattgctgcttaattggtagtagaatttgggtctcatttttgtctttttaaagttaccttctttttttggtatcagcatgccagatacttgtttgccatacattctactgaaaaaacttgttaatatgtttaaagaaacttcaaattcatttacgttttttattgacaaagtacctgttctggtttgtgactctaatgaaattgacttaatgtaagagattacaattagggaataatgcttctgaatcttggtcactgttttctttacagaacctagggaactttccccccttttaagtggatgggtagggatctttttgagcaaatgtgataccagttgctcctttatttttttgtttgctatttgatggactcaagtcaaaacagcaacctacttggttttttaatcttcactgaaatcattccttgcaattgcctgtttgacatggacttttccctcatttaaatcaagcaagcacccactatgtacagaaaaacatagaagataaaggatgtgaagaacaacttacaactcatgtcttcagatcacttcctcgaacaagtttctacctgtgatctttgtatttctgattaactgtacttgcttcgtttctgcattacagtattgcatttgttgacatgtgttgcttttgtttccctgattggactgtaggcttcctgagggcaaggatgatttcatgtcaatgtggtatgtgtgaaggtatactaataaacctgattggtctgggtgaggtggcactggaggtgaggacgtgggaggatcgcttgaggctaggagttgtagcc

SEQ ID NO: 99074 - DNA, 3147 bp, Homo sapiens
gcagaaggatttctaacttggggcgatcgtcccctcttccaagggtcttagggaaccctgatccgtgaaatttccagctccaggtcccgggtgacccgagggggaattagttcctgctaccacggaggggagggggtgaccccggcggagggataccaagtagatctccacagtccccttcctggtccctcgaagggatcgggcggagatcggaggctgctgagagagtcgagccgggaggcgtgggagggaggggcgatgtgatgggccgccagtaggcagcggtgccggtcccgcggacgagcccgtaaccggagcccgaggacaaagtagttccccgagggtgtcagagcaggcggggagggaggcggcacgggcggaggcgcacgccgggcgcggtgctgcggctcagctgataattgaaggaacccggagccgccgccgccgcgccgctggggggggtggggggagctagtggaagttactgccgcgccaccgagtccggaccggagactttggggcctaactaggtaattggggcgcagctctgggcggcgggggcaagccttgggggagggggccagctgaggggttgggggggcggggggaggagctggaacagaaagtcccaggaagcccggttgtgtcatcgccgcgattcggcccccgcttggcctgctcccggcgccggcggcggcggggccgcggaaggaccgggccgggggtggacgggagagacgctcgagggcggccgcggccggagggaccggggcctggcgggaggtaggggtcgctgggtccctcctccggcttcccgcaatgaggagggcccttcacagaaccggggtaaggcttgcgggtgttggggagctcggcggggaccaaggggggccggaagtgggctttggagcttggagggtgtctgggaagagagaaagtggggggccggaagtgcaggtggggggtgtgaagacggcaagggttccccggaaatgggacgaggggcccggaaatcgggaaaggggaggctccggggccgtggacggcccggaaatggaaactaggaagcagctccagtgacaacagttgtgggaagcgagggtcagagaagggagaggccagagagactttagaccgcagtaaggggtttcctgcccagggggacggcgagggacggttgagggagggcgagcccggagacggggtctgcgcggggcagttttttaagccgtgggaagttgaggctgagggaggatgatgacgaggggggcatgcagggaggcctaaagaagccgagaaacttgactgagaggaatagagtatccttttaaatagatcagaatggaaattggtggtaggtgggtttaactaggacttgggggagggaggtgggccaattgtcaccccaatcgtattagcattcagagcgagtcaggcgattaatttatttatatgtggattacataaaacctattatttacaacgtttgtccatcagttcagcccctctccttccttctccatagtgagtgggtttctagtacaggaacaagttagaggggagttcgaataacgaaggtagtaaaacctcaaatcctgtcttcctcggcgtctctcccttcctcagaataagaaatccttcatttcctagacggaaaaatgcggaaaaacataaaaacacatgtaaatcggggggaaatcacactttgaactcctggtgggggacaggagggaattggttaccttacgtggtgaggagataacggaaggggcagcttccaaacccttaagacaaatgttgtgtttttttgataatgctgttttactttgggggaggtttagcctaagcatcgagtctggtggtgggcatagtttaattgcttctttagttaattgggggagggaatgtgtttgtgtgtaaaggttgggccggtgcggggggaggcgggtacggttaatagcgcagtgaatccgttctaagtggacgtctaactgctctcctgctgtctcctttcctagtcgcggtcctcgatcttgcctgggctgccagatcacccgatctccgggctttactccgttttgtaggccctttagtgatgtgtttaactttatgttcctctcgagagtctcattaggtatttttggcatttcattttttaaagacctagcaagttgagtctcagagtctcctctttaaaaacaaaacaaaaaatacggggtagaaagttgaaagagctattgagtggggtaaaacgacgctcagaacaaaggtcctagttgtgttagaaaaaaaggcaagaggcctgtatatgaggcctgtgtgtgtcgcatttacaccccgggggggttgaggaatggaattagcagaggtttagagacaataaattgtagaggattttattgaggctgattttcatatttaccacatgcaaagtgatcaatattaagtgtaagttttaaagtatacagaatttctaattctttcttttgacacttcctgctgtgtgttcagccccagaaatgttgaactgctgtgactatctttgtgagattgagggagttttattttaagcttaagagtacataatatgattggggtttgtgggctttgtacatgtctgcctttctatgaatgtgccaatatccataagaattggaaaactgtaattaagattatcattgtttccattcaatccccagtttttctggagtgtgagcagtttttaagtctgttcagctgacatttatactacttagtttgagtctatgaacaggctttatttttctttttttttttcatttactttcaaaaagtttgagaacaattttggcagttaggttccagaaggtgctaaactaaagtagttacatttaaaaaacgaatgggatgctaggtagatcacggtaaaatcagtactttcacctggcaaagtaaatttgtagtaatgtatgattccatgtatgattcctttcccattgtaactttttttttttttaaagcagaatcttgctctgtcgcctaggctggagtgcagtggtgcagtgtaggcttaatgcaacctctgcctcctggttcaagcgattctcctgcctcagcctcctgagtagctgagattacaggcacgcgccaccacgcccggctaatttt

SEQ ID NO: 99075 - DNA, 1030 bp, Homo sapiens
cgcctgtaatgccaggagatagagaccatcctggctaacacggtgaaaccccatctcaactaaaaatacaaaaaattagccgggcgtggtggcgggcgcctgtaatcccagctactggggaggctgaggtaggagaatggtgtgaacccaggaggcggagcttgcagtgagctgagattgagccactgcactccagcctgggcgacagtgcgagacgctgcctcaaagaaaaaaaaaaaaagagtagttagaggaaggcatgcgcctaagttagacttgagagcaaagtctgaagaacaccaacaacagaattattctttaggaagccgaatgccagggagcactcctaaggataatttactaaaataaaaaggtaacaagatactcagcctggtgaggcttacaaatgagagaaatgaagcatacttgtaaaataccagaccttcaggggaaagaaaatgcaaaaaaagacaaatttttaaaggctgtaaaaattaaaacattctaacttacttgaggtagataaaaatagaaaatcatgtaagattagaacagattatatttttgaccactcatgttaggaggtgaagaaatgttaggatcataaatcttaaagccagccaggctcggtggctcaagtctataatcctagcaatttgggaggccgaggcagctggatcacctgaggtcaggagttggagaccactctggccaaaatggcgaaaccccgtctctattaaaaatacaaaaattagctgggtgtggtggcgcacgcctgtaatcccagttactcggggggctgaggcaggagaatcgcttgaacccaggagatgcggaggttgcagtgagctgagatcgcgccactgcactccagcctgggcaacagagggagactccctctcgataaataaacaaacaaatcttaaaacaaatggaaaaatcaataatccgtttaaaaaatgtacaaggccgggcgcggtggctcacgcctgtaatcccagcactttgggaggccgaggcaggcggatca

SEQ ID NO: 99076 - DNA, 1085 bp, Homo sapiens
cctgtaataattaatttctgaaatctagtcatattcttgtgcttgaaacccatttatctgtaagctttctggaagcacacagatacttcagttttgtcttacaaagaagtggttgagttgaaaagcttttattccctgtttttgtttttaaaagctgtatttaaaaccctagtcccagtagatgacaagagaatggtttttataagggcatttctaccaattacttactaggctgtctttgaacaacactgtcatctctagaatgtatgtagtccttaagatcttccagcattacatctccccaaacagagaggcagtgctgcttacaaatgaggctgtgacaatggcatttacaaatgacagtgccagttaccgtacaaaatgctttcccacgtcctgtcataggtgcctcacagcaaccatgcgaggtaggcatgagtattacaatgaaacctacacggaacattacatgatactaaacatgtgcaccatccatgtattttcttctggattgttctataattcgaatgcacggctgaataagtaaaaagagtattcctatcatgtaaagcaaaccacatatgtagaaggaaaaatcatatttttgcgtgatgtcatagatccaccctacaaaacaaaaaagaatatattcagtgtcatggagttgatacaatgaaagtgaagaacatgaagcaggcatttattgctgctgtacatgtttctacaagaatttatatgtcatttcataccaataaaatgtttcatttatccatttcttttcctttttttttttgttttttatattttttggttctcatttagccattttaaagggtgtgctgtacaccagtgttccccgtgcctacggaggactgcattcgttaagccacttggttgctttggaaggcatttgaagcaattcccagctgactcatggggagaaccttctggttcactcaaaggcccgcacaaggccagcagtgaaatgcgaatccaatgattttcttttttcacaagtgcaaacacgcatttttctaaaacctacaaaaacgattctgaagtttttagtgtgtatcaaaagaggc

SEQ ID NO: 99077 - DNA, 1037 bp, Homo sapiens
ctataaaaatacaaaaattaggcacctgtaatcccagctacttgagaggctgaggcagtagaattgcttgaacccgggagacggaggttacagtgagctgagatcatgccactgcactctagcctgggcaacaagaacaagactctgtctcaaaattaaaataaaataaaataaaataaaacaaaattatgtaatagtagtacatactttcctagatgtttcagtatataatatggcaaaacctcagccatcagatttgaccgaccaatattccacacacatctcttccattcacataaaatctaacaccttaacaataatttgcaatgttttccaccaaaagctgggagcctttatttaattaatacgaaaaacatctattacttatttgacagactcaaatgaaaagaaaatgcactttaacagggaaccagattttactttgaagctgtaggtttgaattggtgcttggatgagggttgccaagaatccagggttgccaagaatcccgggttccaaatccaagaactgaggtcaaacctgcaggaggggtggtgaaggatgcatgaggagggcagcttgtaggaactctcttctctctgaaaaagttgtgtcaacttgtgctgagagtcaaagctcctggtagagtcctgtctctcttgacctgctttacatccgactgggtttgaatttaaactagcagaaatattaaaacaggcaccaaagggagatggcaggatccagagttatttataaataaatcctaaaggtggattggagaaaacctatgggattaacttgacatgaaatttaggactactcctacaatttgcactatgttaaattgttcagtgaagttggatgtgctttttttaaaaaaaactgacatgagttatgtttgaagcttgggcatgtggagatgcttttacacatgcttatatttttagaggaaagaggacagtttttaaaaaaaaataataataataatgaatttggccgggaacagtggctcacgcctgtaatccgagcactttggg

SEQ ID NO: 99078 - DNA, 1022 bp, Homo sapiens
tgagctgggttagtatgagccagaccccctgaggctaatccactctggctgcactgaacaaattaacacttgcacccacaaaaactgagaaccagatcctctgctagggaccccaccaaggtgaagctacactgaaaggctgcctgaagccagatcttccttctttgacatctttcttgtcacctgtcagtatccatctctataagggagacagggtatgggctttggagtcaggactaactggggtcaaatcctagtttcccaattgaccatactaaatacaggccttagaaaatcaccttacttctctgagtctattcccaagattgtaatacctatatatgtgatggctgtaagatgaaacaggtttcatagaagcacttgctcctgggaaacagtaaggagtgttttcaaatctgtatggtgacaaagattaacctgaagatcagatgtgatactggagccactttgaccctgatggggaggtagagctgcacaaagaagatgaagatatttttccttttgatgttccatgaaattatttgttatatgtatttcagaaaaatcttggaaaatgtataccagtcatgaagatattgggtatgattttgaagatggccccaaagacaaaaagacactgaagccccacccaaacattgatggcggatgggcttggatgatggtgctctcctctttctttgtgcacatcctcatcatgggctcccagatggccctgggtgtcctcaacgtggaatggctggaagaattccaccagagccgcggcctgaccgcctgggtcagctccctcagcatgggcatcaccttgatagtgggtatgttcatgtgtgacctgtcgtaaaactgaatcgttatcaaatgacaattccccactgtaagtgatgttttatattgttgtaacattcgatattggatgttactagctactatttttcaattgtgataaaatatgcataacataaaatttaccattttaggccaggcacggtgactcacacctgtaa

SEQ ID NO: 99079 - DNA, 1108 bp, Homo sapiens
gcattctcttttctcctcattctggtccctgcttgctgttcctgagatctaaaactttttcttcctccattcagtggccagtgacaacctgatcccccaaataagagataaagaagaccctcaagagatgccccactctcccttgggctctatgccaggtaatcttggtttggtcaacctaaaagcttgcctttgtttctgtgtttactaagaggaaaagccattcggatcttctagagagggggctctcctcctgcctctcagcaatcttggcccagcttccagttcacccagcacttgggagcttgaacaggcaggagacccgacctctgaatggatacagagtccctgggggagggcaaaggaggcaagtctggaaaaggtagacttggatagggccacggatgatgatggacagagccccaccagtgcctgtaggtttggactccaaatgccacaaagcgcctgaaagggaaacattcacctgccacaaagggttgtggcaggaaccccaggggaaagcaagggaactgagtcaggctggactgtttgacagagccactcttctgaggccacttcaataaagtagtgctcaaaacggctctgtcaaaatgcaaagcaaatgaacaaaaacactgtgtggccctaatagtgaattgctgcagcagacatggatggtcctccttccaagcccccacctgactgtggggaattttcactttcaaccctggtcatttctatatcacttggagtttaagagttgatattatgaatataacttgaaaggtaataaattattccaaagatctaatgactgcttgccacctgcctcagtcacctattcctaagcaggccagcatttgagaccaatctcaatgcagtgtgtaaagaaaaaggtgacagcttcatgtgagatgagcctttatttgttatggcttcaagttctctgtctttctttgtgcagcaaaaactagcagagctttatatgtctttgctgttaacaggtgctagcaagcacaggctagctcctgctttcttcaaacaatccttatatacagaaatatataaggcatttagccttctccactatttctccaagtaaaataac

SEQ ID NO: 99080 - DNA, 1558 bp, Homo sapiens
cttggtactcagaatatagtgtttaagttatagattgtgtttgcttgtttatgtgtgtattcatatgcatgtttcaaagatggggaaaatctagccattatttagtggcagtttgtttttatatggtaattattctttgggagcattatccagcaaaaattgttgaggaccacggaagtatgatactgttaaaagatcacacactttatttggtaatacatttgagaaacaaaacatacattgtgtatcttgatcttaattaagttcctactttgtgatcttgtctcatgaactgtaacttgctctttacagtgtactgactattaacatgctagtcactgttgtctccctccacagtagattatatatcagctgtattgaggcactaggaagaaatacttggacaggtttctgtttacatgtctgtagttaaggcccgcttttaggtttatagaatttggagaggtagtgttagccagtggttaaaagcgcaggtgcagccagactgcctagattttgaaccctcattcctctgctgtgggctctataaccttaagttccttctgtctagcttgaattccttggatggtaatagtagaccatatctgagagggttgtaggacgattaaatgagttgctacatctgatgtgctgccgtgtatcagatgcctagacataagttttgtgatgctcatgataggcttttccaggggggagaaactttagaacttcagaaacaacctaggcagaatggttctttctgcaggtgggaacactgaggcccaccgtaactagagcagagtttggttcactttgagcagtaacaggtgtagctttctgcaaagtgaagtctcttttctagggttttatggcttattagccacaggactgaatctggagcctggttttcttcattctttgtccagtttacttgaattaagtatcatactttatgcagtaatgtcttcttttggaccttttcactaacatttacaaaggttgtattcaaaatatattaaatgttctttgtcatataattcttttttaaggtttaatatactaatattcataatatttgtgatgtagctggcaagtgatttgggaggcgtgtatgaagttagaagtcgaaatagacaaagaatcaaggaaaattaacaaaaattagttagcttgggggaacaaattaccgtttaggtccactaaatgttgggcaaacctcttaggtagtattgtccccaacatcattgatgggaaaccaaagtggagggtttgtccaggataacacaaacattgcacagttgagccagaatttgaactcaggtctgcctcacttcaaaatatgtgctccctgaaatagggtatgactccctcatgaaataattttattttccttgctgagcagttttgaattagtattttagaatggaggtttataaatagatccgaatttggattttaataggtttccaagcagtaaccacattacaatctaaaagagatggtttattataaatgctttcgttgtatagtcataatttgattagtggcttatagttta

SEQ ID NO: 99081 - DNA, 2447 bp, Homo sapiens
aaccttttaattaaaattgagtaccagagaggtccaaggttagagtgtctggtagctgctctggctttaacagttggctcgaatggcaaccaacactaatatctgcctttcaaaacttaaccaggacttgatttcaaatctagttacataagttgacttggagtccaggttagtgttttcctcagaaactagttctgcacccaacatgcagacatttttaatagacacagttttaaagtaatttttagaaaaaattttttaaattgatgacactgaaacccaatatgtaaaactgataagagtgaggtgtttgggctgaagagaagatagaccctcacctgctgcagatcttagaatgggcttaaaagccactatcagaatcatggctactgtcattttagtttgacaaaacttcagtgcctggattgctgttctcccactgttatggaacaagctcaccctgtctccccgctaccctctcaggacacctgcagaaaatctaattttaaacaatgtaacttccttttcaagccactatgagtctgagagattggccgtatggttaacaataaccccagcatttggggagatagaaaaatccaaaggatagatttttgaggcctgcacgaaaatgatcatctctgtttgttagagattacagagcgctgtcacgaatattttgtttagtcctcacattaacttgtgttagtaatattcttctgccaaaatagtaaaggaaaaataaaatgccatgttcaaaatttttgtagaggaaaataagtttttaatgtaagtaaatgtatccattgtacctcttcctgaatggttttaggcctctcactaaaacttaaatttttatgttcccttggatataagatgcttttgttgtgcattttagatactgctttgagattaaaaagcaagttttccagtttgactatattatgatgtcaacacttacctggaaagcaccactccataaagtgtggaatgttctttgagcaataaaagaaggtatgtggttattctgtaaacagcacttgggtttttcaccttctgcctgctttttcacccgatactttattacccatcagagcttgacgaaattacaaagtcatttttctcgccttatcatgcttcagactgttgcataaagtcttccagtgaaacattttctgacccttatccaaatttttcattctacacaacgcagttcaagaaacgtctccgctgaagtctgggaccttcagcacacagtgccctgtctgtacctattagtcttccatggatttaagtcttctgtatttgtgcctttctccccagctgtattctaagtcctgaaacacctagcgaatatgtaccacttatcattcatgccatttagttctcatcttttggtttatgagctgagtttaggctgtatgattgggaacttttttcctccaaaaacacaagcaagagcttttatatttgatcataccagtcagttggcaaatgaggtttggttacttcctctgaagttcagtgttgtttagcctcattatttcatcaggatcaaggcttcatatgccagttagtgtgttgatgtggaggagtggagtggaaagaatatgttgattggttaggaaaattctcagcagaaattatccttgggtagaatgttctatgtgatcatctacagggctgtgtacttgtgcattctgtgactctaaatactgctgctggaaaaagtctgtttacactaaataccaccatacgacagcctttgagcagtttaaaaagaaaccttccaatctcctactatggtggtttagctcaggctggttttgtggcatgtttgtgcttttgtgggcatttggccagaacagaaatagcaatgcttagaccttgaaggagagtgattttccaggtttacatctgatgctgtagaaataagtttaaggttataaattttgcaaataaaactttttttcagaatagttattcattggaatgactaaaaggaaaaactaaaaatcatttcaccactctcaggtatgactttagaaccatagcatttccaatctaccttaattctttgacacaaaaataattttatggaaggccttttccccatacttgaactttcaagttttctcatttgtttaggtattcttttaaaggaattatctctataaaagagcaggattcactgtttgcttttcttatttaccgaaatgtgggtgaggctgtgatgtttgcccatgatcatatggactatgtttacacagccttgtagcaagtgagagtaaatttaaccagaaggaaaatagatatttttaaaatgtggacattgattaaccttttgtattttaaaatacagtgctaatttgtctagaaatagctgaagttcccgttttctgaaactagttctaaagatatgataatttaactcttaatttgttagg

SEQ ID NO: 99082 - DNA, 1464 bp, Homo sapiens
aatccccttagtgggttatgactagtatttacaaggaagggaaggagtagggctaggatagaacaaaatagaataaagaatgtcagtataattttacatagtaagtataagtgctatttggtgactcttgttttctttttatgaatatgtgtgcatcatgggtcatgaggtcaaagtagtctgtacgccaccagtgatactataatgcagttaggtggcctggtggcctcgtggttatttaatgactgtacacaaaatacagattgaagagaggctttattggaaagctccagtactctcttccctgacctattcatacttttaataggaagtaaaggaaaacctgtgtgacttgctaatcagatttgtagttgacaggaatctggtaggggaagctgatgtatactggataacagcattaagatccaagtaaaaaaatttaaatgccatactacatactgagtctaaatcagaaggaattgaataggaataattgttcagtcctgctggcacgtcccaaaatgcagtaatacagcagaccccaacctttttggcatgagggaccagtttcgtggaagacagtttttccacggactagggctggtgggacatgcagggcaggggatggtttcaggatgaaactgtgccacctcagaccatcaagcattaggttctcataaggagtggacaacctagatccctcgaatgcacagttcgcaatagggttcacgctcctgtgagatccagtgctgctgctgatctgacagtaggcagagctcaggcagtaatgctctctcacccactgctcacctcctctgttactagcaggtcactggacccgtaccactccacagcccgggggctggggacccctgcagtagtatacaatggttgaagatggggcttcctatgcaacatgtacaaaagacttgggtcaattaaattgctcagtagaaagtgttttagctgtgtggtgtgactattaaaacttaacataatttaagatcacatttatgaaatatatggaaaggtagtctgcctggttagctgacacatggggagtatgggatccagtttggagcaccacactctgagaggagcagtgacaaataggaatgcctggagaataattcaggcggtcccctgattaattcccccaaggtttatctccctctgacaaaaccacagctggataaattttataggaatttggttgctgactatggtaattgtggtgcagattcaatgtgaatatatggttctcattcccagacaccacacaggttagtgtggagatggttatttacatattaacatgtcttattagactgttgaaaatgctttcagctctttcttcatgacatctctttcattttatcccaatcctggatgcctccatgcttaagacacaaggatacaggtctacttcagaatattcctacctgatacccatggaaatggttg

SEQ ID NO: 99083 - DNA, 1036 bp, Homo sapiens
atatagattctaagagaacttccttgggtaaggtaagtggtactgttttttgtttgttttttatttgttgttgttgttgttgttgttgttgttgttgttttgagatggagtctcgctcggttagccaggctggagtgtagtggcacgatctcagctcactgtaacctctacgttccatgttcgagcagttctcctgtcccagactccagagtagctgggactacaggtgcgtaccaccatgtccggctaatttttgtagttttagtagagacggggtttcactatattggtcaggctggtctcgaactccgcacctcaggtgatccaccagcctcagcctcccaaagtgctgggattacaggtgtgaaccaccgtgcccagctggtaagtggtattgtaaacgcaggattcaagtacatttctcattttattggtcaatggggatataaaaatatgaaaagtttagctccagaaactagaaacaaagtgacctcaagaagttagaggggacttttgactgaaccacattaacatctactaactcagagggtaatagcacataacttgacctccctctcacagttggacatcttcaactttaggaagcactcagcagtcctgatagccctacaggctttgcaccaggtggaggcagctaacagccagcaaagagcagaggtacccaagactggcctctagaggcagtcgggagagagcagaccccacagagtagacatgatacatgtctgctggaactgccctcagtggctattccttaatccttatcttaaaactgcaaattgatgaaaggataatgtgtatgtcccataaattaaaaatggttcatcttttgtctgtggctaaatatgttgtctactcattacattcattctattcatcagaatcgtactgaacacctaaatgctgggtcagattttaggcactggggatataatactcaataagatgaacaaggtctctgctctttcgtagcttccgttctaattaagaaagctggacagtaaataagtaaaca

SEQ ID NO: 99084 - DNA, 1011 bp, Homo sapiens
acatccatttgtaatctgaattttaaaccctgtgatcaggaatgctgattttcagccattcatcaataatgtatgaagcattttaagcaacagcaatgtcttagtcatatttatgttatgaaaagataattctaggtgtgatgtggagaatgcatccccattaggccccctgcaatccaaagaaaccagtcagtacacgatatattaatctaggcaagagttatgggaactttgatttgggtggtgatggtagacggggataaatggatggatttgggagtcagtgatgagttagctattggggcgaggtgaagaggggagagttgaagatgactcctaaatttctgacgtgtagtaacatcatcagtggtatcattacatgaaacggaacaaggcaggatatcaggcactagggcgagatcttgagttctattttagatgtattcgatttgaggtaccttgagacattacgagtggagacattttgagaaggctgcccagtggtactgataaggcctgggagaaaagaactggattagagataggaatctatgaggcatctgcatttaactgttaattaaagcagtgggtgtggatgagatcacttaagagtctagagaataagaagaggaagccctagtaccctgccttgcgggattccctgtgtttaaatggcctagccaaggtgaatgaggcaaaaaggagacagagaaggagcaaccagagagttaggagggaaaataaggatggtggtgagtcacggaggaccagaagaatggttttcagaggcgggtgtaatcagcaattccgaatcctgtggaaagttcaggtgtaattgttgggaatgaagtttttggtgtcgggaaaaagagaaaaaaagaattaacgcgggaagaaatgatctctcagcagagagagctttactttctgcagaaagggtgctactcaatagttgtctggccacgagagcacaccgaacaaaggagacagagttatttataacctgacgtg

SEQ ID NO: 99085 - DNA, 1033 bp, Homo sapiens
cttggaaatagttgcatatatacatgactgagcagccctgctccaagatttgtagtagatcattactgaaaggagcatgatgattcaaagatatgatgggctctattcatgcgtcattcctttccagcattttagtcaatgattgaggcaggtcatgggagacatacatatgagattttcatatgtatgtgagagcgtttagctaatacattggatgtccatcagaatccagagttactgccataatcttgaatgatgggctgatgagattaaattaaatagaaaaattgaagtcttcattgcagtgtcattcgccccagtttaagaataacatttggaaagacctgtctttaccaagcagtacctgtgaaagccaaagacattttgttcactgtaagctctctctgactcaattatacaatataattgcaaaaattcttagaaggtagccttgggctgcactaacatttgtaatggaggagtggtggtctggtgtcttctgcattgtaccattctggatagggctgaatgttagctctgcctttcttaggaggttaatcaaagaacctgaggggaggttttctggagaagatgacaatttagggaagataggcaggctgccctcaagagatttatgtggaagagaagttaaaatattgcctgatctgcagtacaaacccagggccagtagacagtgtagtgaagcaatgtttgtctcgtaaatttgtctaacaactatctgattctgaattcagctcatcctgcattactggacactggaaatatttaaggtaaagtcatgtgatttgataggaagcttagaaggttacataactgaataccatgagactatatgatcctctaagtactgcttaacgctgaggttttgtgaatctgtgcaaagtaatcttgaagtatatttctgatcataaatgcttcactttatataagtttttatagcctttatgttatgtctctttaatactctacttgggtctcctttgttggtttattagctataaatctttgattt

SEQ ID NO: 99086 - DNA, 1054 bp, Homo sapiens
tctctatcttgagcagaagtagaagctctttagtgactttatatctatcactaacaccttagctttgcactcacccattttctgctctcttcccttatttcctccacaccttttctgtgataagacttgtactttcccttctccctcatccctagctcatgccattccttatcctccatacttgcttgtcagaatctcttcattcttagggatcagcccagttgcctctttggtgatgtttccctcccacttgaggaagtgaacctttctccctgttttgtttctgccatagataaacatggttttcagtgtttgggtgtctgtgttgtgcacatgctggccttcctgtggtgtatgcatgttggtccccatgtgcacgcagacatagcgcccagctcctgagggcaaggatggagcttgcccactttgcttcttgttcataggtccatgggtctgtaatatagagaggtgatttgacaaattttgacgtgttatatgtttgttaaaatgaattgttttttctcctcttcccaactcctctctctaaaattaggctacagaagaagtttccaaaaatctggttgccatgaaagaaattctgtatggcacaaatgaaaaagagcctcagacagaagcagtagctcaacttgctcaagaactctataatagtgggctccttagcaccctggtagctgatttacagctcattgactttgaggtaagaaatcaatttcttatttttaaaaaacagtaccctgtgcataattcttttccatacgttctctcttttggaacattgtaagattccttttgggctcttggctcagggttactgacctctgtcagcatgcctgggctgcctgcctgattagcagagcaaaggcaggaacccaggggtgtttcaggcttgggacagggttcttccctgtttcatcacattggacatggagtttcttagatattcattatgccatttcatttaggttgttttaaaaaacaactgctcattagagcactctagtactctaataattcactggcccttgactttcaa

SEQ ID NO: 99087 - DNA, 1027 bp, Homo sapiens
gtcctgcttggcccttcagctagagcagagtagcatcacagggcgtctacacctgggtttgctgtaggtggcacagcttgctcctcctgtctcagggcccatttgcatctcctgcccagccctggtaggcatttgacattgttgcccgagttaatacagttggatcatgctatgttaaatatttagtggatttaacagtgagaataatgatcctggataccatctgaatatttgcgatgcatatatggtaatgaagctaatgaagcgctgtggcatggccatgcctctttaactctttgtcatcagtgtgctttgttttaagccccagtgtttgtcagcctgagtgagtggatgtctgtacaggtgcttgaaagacaggtacatgttccagaggagaaaatgacagacgtatagccagattaaattttggaaaaggatgagagggtatggttcataagttgagtataatactgttaataaaataaagtaaaattttatttctgtcctactgtagagcagatagaactgcaatgttttcatttcatagctgatttcatgtatttttaataatgtatcaaattccaacagcaacaatttgtatttcctctgcaaagttggggatgtagtggaacatctaggttccttctcctttgtctgcctccacccgacctggacactgaatttaatatttatgtggaacttcaaagacatcaacttaaaagaaaagtgtgcccttaaggctggttcttagagattgccatttctgctcctgagctagtgcggggcccaggatgatctctctgtctgtggtttaggtataccctggaaagctagcatttcactccctctcctatgggcttgttagccttgtaacaagtggctgttcagaaatgccacttggagtccagttctccatttgttgatttcttgtgcagctttccgattgtaagattcactggaaagatccgtctgttttgtacagtagtgtaatgaagttctgatctctgaactactgtatcatgtgata

SEQ ID NO: 99088 - DNA, 1079 bp, Homo sapiens
ctactttccattaaagcccagcttcatacagaattattccatttttaatatagcagcagagtatattttcctctccttccatcactatgaaaggaaagcacatatagtgttcccaatgtaagcatcttatttgaagctgcttgttccatttgggtggaattcagatcccttagattgttaacatattgcagggttttgtttctcatatcagagtcagcgtgatcctgagacttagaaatggtggaaattatatgtggaatatagtcaacccattgttgtttttgtcaacacattgttcatgttaaaaatagtacactagtaaacttacaatttggaattacaaatgaagagataatttaatgtctatgaatgtgttaaagtcagatattcagtcataacaataagtacaatggccttattcgagttcatttgggagggtgaatgagcattttgatgtttggtcaggaaaatgtgttaatgattgtattcctaatagggcaaaaaagacgtggctcaaattttcaacaatattctcagaagacaaattggtacgagaactcctactgttgaatacatctgcacccaacagaatattttgttcatgttattgaaagggtatgtacaatgtaataaaatttgtattctcagttgaacataaaggaaggattgccttgggaaaaaaaacaggatgctgaatgtgggaagcattttctctgtagttagataatttttccatagattttgaacacatttccctccttgaaattcaacttgtgagctaaattgaatttgaaaatgccctacaggtgggaatttaaaattaggtgaattctgagcttttaaattcacaaatccagcatgactgaaggaaaaaataataattctctgtggtcttatttctgttctctaggatttaaaaaagttgaatttcattgaagtatcagttaagttatatattgaaagacatctcctttggacataatacgcacgctgtaaggcagtaaaagctgcctcttaaatggagcatggattctctacagctttactttgttgagtcagcaaagtacatgtttatgaag

SEQ ID NO: 99089 - DNA, 1564 bp, Homo sapiens
attgaaattaaataatatttatgattcaaccccacagtcacactagacaaatttcaggtgctcagtagctatatgtggccaatctcaccataatgaacagcacagatacagaacatggaaatttctgttagacctggtttagaactgggtaactgaaacaaaataatgatgccaaattatagaaatgaggaagcaggggggtgggggtgattttatggagggggatgagatttgatttgagacacgttgagtttatggtagccctttaacggaagttgtccagaggcaacagaaaatgcctaactaattcaggagtagacatggaggtggggttagtagtcatggtgggagccatgagattgtatgggctttcattagcaggctgtaggcaacaggtgaagacctcagccaggcaagaaatgggaacagtcagagagatagaaaggagaacatgaaaggttttattttggttttttacagcactgtcaggacacttgagtagaagactctatttagccaagagggaatctttgctggcccgttatttcactagtgtgttgggaaatggaatatgactagaggagaatgtgaggtggaaagaaagccagtgcatgcagcttgagaggaagtagaagagagcgatgtgtttgagggggcggaagagtccagtcagagggcttgtgcacatctgaaggggaaatgcctcttgcttggctgagaggtgtctctctaatggcggggaaggaagaagccagagacatggagatgagcatagggaaggctgtgtgcagagagctgatgaggggggtctgcctgctctgtggcccctgggctctctgatggggacactttgtgaagtcctcaggaggaggcttatcagcttggtagtgtttacatgtggctgagagtctccaagtactatcttgagtattgaattgaaacaacaaggtataaattctatatgtttgtagacctatttagatattctgaatttggggaaatattttgttttctgttttttgatttagcttttggtttttctgagtgtcaagagcaccatctgtaaaagctaacccctgtatggagtggtatgacccgaaatacttctcttgaaatctttcagcttaaataatgaacctttagtcacacagtcactcgtatggctatttttctttggtttaaggcggtcatcaccaaccagtgtgtgtttgcactctggagtcagtttacctgagcacatgctctgctccgactgaaataccttctgtaatctgcgatggtcatttagttaggatacatgtctgaaaactgtctttggcctgaaagtttgaactgttcagtgttggagttttgaaaaagcaatcatgtttggtttgtttgtttggttttttgtttttgcaggtatgaatctccagaaatagctctaaattgtggaataatgttaagagaatgcatcagacatgaaccacttgcaaaaatcattttgtggtcggaacagttttatgatttcttcagatatgtcgaaatgtcaacatttgacatagcttcagatgcatttgccaca

SEQ ID NO: 99090 - DNA, 1131 bp, Homo sapiens
ttgccaggcgcagtggctcgtgcctgtaatcccagcactttaagaggctgaggcgggcggatgacctgaggtcgggagttcgagaccagcctcaccaacatggagaaaccccgtctctactaaaaatataaaatcagccgggcgtagtggcgcatgcctgtaatcacagctactcgggaggctgaggcaggagaatcgcttgaacccaggagacggaggttgtggtaacccgagaatcacaccattgcactccagcctgggcaacaaaagcgaaactccatctcaaaaaaaaaaaaaatgtatacacgcacacacacacacagcccaaagaaaatacatatatacacaccagtatttagcatactgatatgcagacgaccatgctcagaaaccatgaacactatcacagtgagaagtggccacctttcttctgagggttcattttcatgattatgaaaagcccctgaaataatgagcacacactttggtctctgggtgaaatatgtcccacctcagagtgaatgaatgccctaaagataggatgaaacctggggacctgatcattagggttttaccttgaatgagaatcaggtcataaggcccccagggatttattgaatgagaatcaggtcatagtatgagagctccccaggaatttatttcccaaaactcttaaagagggagttgaaagcctcaggtgaggacccagatatttgtatgtaggtgtacaaagcaaaacaaaatgaatttgagattataacatagagtgatcaatatgatgtcttaggtgtcaccacagttggtgggctaggactcatgcttataatgcatcggtggaagggtatgtcccattcagaagtagcagacctgccatgaagggcggtgtagcagcaccatgtgtcaaagagagattcccctgtgtggaaggacagccaggagcctgagggtggcagtactctggccacatgagggtgaaggaagaggattgagcagcagtggtgtgggagaatgcagcaagacccctgaccccgtcaggatgtggttgacatgcttctggcacagatggcaaaggtggctcagaggtgagagagatgtactgactatgtgctggaaatgggatttgcagtgagt

SEQ ID NO: 99091 - DNA, 1976 bp, Homo sapiens
tattcagcatcaggcactcttattgattcatgaggaacattactgctaatctgctgttaagtgaacggtttttcattttacccttttgtttttcagtccaggttggagatcgtagctgctgctgcttgcacactagggcacatgtgggctttctcttgatctttgtgtcatttcagaattcaaagactgtgctacgggagttctgaacatggctgggttcatgaaggcaaatgtatggatgagagtgtggtttaggaaagagggcactgatatcagattagacctatgtgtttgcacccatctttgttggcgatctgagtgcagtgtggcaagtgcacacctggcatccctgcgtcagatcgcgcaccttcaggtcgcgcaccttcgctgaaggaagatgacgcagagctttatctgaaatcagaggggagctatccaaaatgggagtttgggggcagctaaagttgacatgcgaataaattgatactgaaacttagcaacttcttaaaagtgtaaagaagcctcataagatcataaggaaaatgtatatatgcttttcacagctttctagaattttttgacatttgattttcttgagacttgtaaacctggatatgttgaagggtatttgttaattttacttttcaaagatactttaaaacagtagagctagcaatgacaccttgcatttcatttcaacactgcttcaaggtttcttttgtatataattcttagaatgctcatttcttttaaatggtttaatttgtacagcagaggaatgttattgtagtagtatgtaactattacctaatactgagtttttgcaaaaaacaatgaatgctcatatgtaattgaaatacttcagatcacatgaaaatgctgatttaacatttaagtatcacagcattaaaagaaaaagaaagtaaaccagtcctttgtattcagttacctaatggggtgccatcaataagctgcgatacagccctggagctcagtcagccacaccttcctgcatcctattggccttattcattttaaatgagttaatgaatctgccagatctgtgaatgatagagattatgctaaattaatgctgattctttgtgtgtgtgggaaatctctgtagagcaccttttctttcttagactaagtaacccagtacaatagttgtgaactgaataattaaaactttggcttctcttaggaaaagacgacttcctagtcataggtgtcctatggggaaatttattttttttaatgtcctgttccttaatgctgcaaattatcagtatttataaagtaactgattttgcaccacttttttgttactgtgaccacggcagaacaatgtcttctagactatatctatgtaaagttattagaatggtatctgttcattttagtgatatgaagatcacaactaacaactgacaaatcagagtttgccagttcaaattcagcatggctgcagctgattaagaaattgatatgattattctttgctagcctctcttactaatggaattatatactggccagtaaaatgggcctcccaattgctgtttcagcaggttttaaaccttcaggaacaccagttaggaaaatagctccagaaaatatagatatattttatttttattaaaatggcagtctacatcataattggcatttctcaagactgtctttaccagaatctgtgtgaaataaggcaatctagtctccttgaaaaaaaaatctcttggatgtttaggaaggaagacttggccgtgatgtggtgtcctggctttgtggtgtagtgctgtgtgtatggagttagtgtaaaaacatggattacaccaagtggaagaaacgtcttcttgccaagctcattcttagaacttacacatctagaacagcttccactttggcagtgaggtcgtagccttttaggtggaagaagtgagggtgcagcgtgtcagacacaacattcatgttac

SEQ ID NO: 99092 - DNA, 1044 bp, Homo sapiens
caaccccaggctctttctctggtgtctgcacctctgtggagggcacggaggtggccaggtcctagtcctgctgggccaccccttttcccagtcaccgactcaaggacttggaggccagaagggaccttagggatcatcatgctttactgatggggaaactgaggcccagagaggtctgccacctagaacctggcagacccagctcatcctcccttccgtttgtgaagctgggaagcgccttgcccaagaatcagctcatctcctcactggcagccccagaccctgacctgatgccccaccgtctcagtttctccatctgcgaaatgggtctcacagtccctgctcttcttgcttccgcaggcttttggggcatgtagcggacgggtaggcaagagggggccttacggagtgcgtgtatgaccagcctctctgactgtctgtctgtctctccgccttgctcagctggcccgagataacttcttccgctgtggtgtgctgtatgaggactccctgtcctcccaggtccggactcagatggagctggaagaggatgtgaaaatctacctcgacgagaactacgagcgcatcaacgtgcctgtgccccagtttggcggcggtgaccctgcagacatcatccatgacttccagcgggtgaggctggccagggcctgggggtggggggtgggagggtgtcccggggactcagggcaaggggagcagggatgaaaggagactcctcggagtacagcaggtgtctacggttaggcttaccagggtcttcaagacactgcttttctcctgttagcaacaatggttcttgctgagtatgaagcagccgaggctgattttctcctcagcctcctgccagctgcacgctggctgtcatggcagggccagtgcgttgtatcgaggggtagtacattcaccatcgagtgcattgcgtgtacagctcagcgggtctctgcagagtgggtctcatgcgtattcatgtaacccccatgggtcctgagacagggcatctctcgctggggtccaggctgtccc

SEQ ID NO: 99093 - DNA, 1726 bp, Homo sapiens
tttaaagatgaggaaacaggtgcagagaggttaacaccctggaggtcacacagcagggaggtggcagacatgggcaggctgactccagctttcgagctctccccatttctcactgtgctctttgggtgaatctgggtgaatggtgtcacttcctggccctcctgtggctcaggctgaggctggtggtctttgtgactcagccaggatgcagggctcactggggtttttctttttcctcccagggatcaacaagcgtggggccaagaactgcaatgccatccgccacttcgagaacaccttcgtggtggagacgctcatctgcggggtggtgtgaggccctcctcccccagaaccccctgccgtgttcctcttttcttctttccggctgctctctggccctcctccttccccctgcttagcttgtactttggacgcgtttctatagaggtgacatgtctctccattcctctccaaccctgcccacctccctgtaccagagctgtgatctctcggtggggggcccatctctgctgacctgggtgtggcggagggagaggcgatgctgcaaagtgttttctgtgtcccactgtcttgaagctgggcctgccaaagcctgggcccacagctgcaccggcagcccaaggggaaggaccggttgggggagccgggcatgtgaggccctgggcaaggggatggggctgtgggggcggggcggcatgggcttcagaagtatctgcacaattagaaaagtcctcagaagctttttcttggagggtacactttcttcactgtccctattcctagacctggggcttgagctgaggatgggacgatgtgcccagggagggacccaccagagcacaagagaaggtggctacctgggggtgtcccagggactctgtcagtgccttcagcccaccagcaggagcttggagtttggggagtggggatgagtccgtcaagcacaactgttctctgagtggaaccaaagaagcaaggagctaggacccccagtcctgccccccaggagcacaagcagggtcccctcagtcaaggcagtgggatgggcggctgaggaacggggcaggcaaggtcactgctcagtcacgtccacgggggacgagccgtgggttctgctgagtaggtggagctcattgctttctccaagcttggaactgttttgaaagataacacagagggaaagggagagccacctggtacttgtccaccctgcctcctctgttctgaaattccatccccctcagcttaggggaatgcacctttttccctttccttctcacttttgcatgtttttactgatcattcgatatgctaaccgttctcagccctgagccttggagaggagggctgtaacgccttcagtcagtctctggggatgaaactcttaaatgctttgtatattttctcaattagatctcttttcagaagtgtctatagaacaataaaaatcttttacttctgaccttgacttgagtgtggctggaggggagatgggtgtaggaggggtgctccgggcagggtcgaggagctggacctcgggagcagcaggcagggagaagcctgcagaccttgacatctggcccctaaagagctgggcatcctggattcagccaaggagtgtaggatatccccttcgtagcaccctggatctgagccaggtagagttcacactttccgggtgaggaggggaacagggctgggagag

SEQ ID NO: 99094 - DNA, 1063 bp, Homo sapiens
aaacaattgaaagccacttttctgggaaaaaaaacaaaaaacaaaaaaaaacgctgtttgcggcagccccaattccctaagcattatctggtgggagatgtgttgcagcgagacctcccaccagtaggtggcactgcgcgcaatgctcgcacctcccctcaacaccctttctctcagcaatggcgggtgatggtgggggtcctctctttgcagggctggccattctaatgcctgacctcaggtgcagaccagtgttccgttgcgcgggactcctgacctcgaggaggtttagagaaaacaatggtgttctctgtgtacccttccgcgagggctggggagtataccgccgcgcagaagacgcaggccaggggagaattcgcgccgggcggcaggcggggtggcgggcagcccctgggcgggcggggtcctggcgagaagcgagccggcggcctgaggaggcgactgactgagcagcgcacccggggagcaaggaggcgcggtgaactgagcggcccctgagctgacagatacactgcgcagctggaacggcgagcgagccgacgggcgagtgaggggcgcagccatgatcacctcggccggtgagtgcggcccgtagccagcgcctggagggaggagccgccgccgcgccggcttttagctgagtcagggccggtgactgggcgcctcccggcggaacgccggcctgggcagcttcttgctgcccagggcccacccccgggccggggggctgggagtctgatcaggtcactgcgtgcttctctggcttgagggaatcgagccgggtcgaccgcctcggcatccctccccaatcacaccccagcgccaggacccgaggggcttcctgggccttcccctgaccccagaagggcttaccttttttctgtgcctcccattcttggccgtgtgaggtcgtccagccccagttcttgcccgcagggggccggggtgggatgggcccctgtgccattgaacagtaaggcaaacccccctgatcgggcagcctaactgctacagaagtgtttctggacgtggccgagctcca

SEQ ID NO: 99095 - DNA, 1333 bp, Homo sapiens
ctgctcctgggctcaagtgatccccccgccttgacctcccaaagtactgggattacgggtctgagccaccacaccttccgcttcccccgccccagtttcattatcaacagaaaacacaaaaagttgttgcttctgtttcacatatttaaagttttttatttgatgaaaatttggaatgtccttctggtggctctagatacttgattcctttacatctaaaccagcaacctggagttaattgtttatattcaaagaagaaaaatgttgatgattgaaaacagaaaagaaatgtgtaaactcaagaaaaagtgtaagttggtaaatttttatatttgtcatagagtaaaagtttgagtaaatattactgaggatttgatcattgatttgctgaaaagaattttttaaggaagtgtaatgataagtctatctcaaaataggattttggttatcttttacaggaatttgcactacacaaattgaatgcagttgttaatgacttctgggcagaaatttccgagtccgtagacaaaatgtaagaaattatttttataaatcagaataagatggatcaaatttaattgtgaatgtgggtcttgtggcttattgattcatttagaaatttgctgttaactgaattgtggcttgaatatttagatttgggatttttagggaaaaccacagtttgaactagacctgtacttcctaatttctttcagagaggttttatacgaagatgaaggtttccggagtcggcagtttgcagccttagtggcatctaaagtattttatcacctgggggcttttgaggagtctctgaattatgctcttggagcaggggacctcttcaatgtcaatgataactctgaatatgtggaaactattataggtaattatcgtctatctggtaaggctttatcttgtcggcttctttcttgctgtagtgcacatagaagcttttttcctgaatttgatgttgccaaatttcattttaattggaagttcctaatctttctataataattttatgcaggctgagtttttagatctgcccttcaactgagtgctggttctcagtggttatgatgatcaccagtccagtgagcctactgttagaggaaaagattaaatcagattagtatgagtaacaagtggtaccagtttgtgtagttttttcgaatacaggaaaccattatttagtatctgcattgtgctaggcaccgtgctagtcactctgcataccatggtttattccacagctaccccatgaggaaggagctagccgttttacagatgagacaacttggattttgagatgataaagacatggttatta

SEQ ID NO: 99096 - DNA, 1365 bp, Homo sapiens
ggtgagttttgatcagtagaccagttctgtttgcatttatttatttaaaagtggggttcacccttcctctagttttgtagggcacattttttaagatgtcagtgagattcatgagggggtatacaaaacagaatttgggtaaggcttcctagcgtcttaatgaatatcgtaaacagtacctccagaaaatccaggactcataaatctccaagttatgacaaggctttagcaggaaatgaggctgagttttagttataacataaacctgggatatatttatgacatatatgcaaacctggtgaatgagaacatgaatctcatttgaaacctgggacatacatttttccccttcagttatataatctaaggaaaattccccaaatgttctaattttgaggttcctctctgatggggtaggggtaatgtttcctcacttagctacagttggttcaaaaagctcacattagggcctggtggacattttcaacaactggaattctttaaggtctattttgcattataacatccactgtgtttttttgtttgtctgtttgttttttggcagtttttctctgttgcccgggctggagtgcaatggcacgatcttggctcgctgcaacctccacctccctggttcaagtgattctcgtgcctcagcctcccaagtagctgggatgacaggtgcacactaccacacctggctaatttttgtgttgtagaaatggggttttgccatgttggccaggctggtcttaaactcctggcctcaagtgatccacttgcctcggcttcccaagattttgggattacagatgtgagccactgacccaacccactatgttcttattaactgtacctgaaccttcatggttccagctgaatcttgaatgtagtatattccaatttataaaagtcctctgcttccttcaagatatagacccatttaacccgggtcatctagtaggccaacaatcatttatgctagttaaaattatttttatttcttggggctatggtttgtaactaataaatcttgccctcgtcttcttacttatctttgaaagggaaagaaacaagccaatgaattatggagaggataattaatgtatatgtcattcctcttgggtgactgggttttttgtttttttgttttttttgtttttttgtttttttgttttttgttttgagacagtctcgctctgtctcccaggctggagtgcagtggcgcgatctcggctcactggaacctccacctcccgggttcacgccattctcctgcctcagcctcccgagtagctgggactacaggcgcccgccaccacacccggctaatttttttttttttgtatttttagtagagacggg

SEQ ID NO: 99097 - DNA, 1030 bp, Homo sapiens
agtttcattaatgcaaagaagtccgatatactactatgtgataattgctataataggccttttaaaatatcttcagtaatggcaaatgtttgttttttgaaagtgaagcagcagctatttgtagccagttcttttgaataagcagcttaatcgggtagagtaataaaattttgatcaaaatggagtaacaagatagaaactttaaaaataaattaaataagagacagggtcccattgtggtgctcaggctggcgttgaactcctgggctcatgtgatcctcctgcctcagcctgccgagtagctgggactgtgggtgagcactaccacacctggcagatagaaatgttttgaataatgtcaactggattggaattaatgtgtagttctccggtgtaaatattatgggagaacagtattcaaatgcataagttctagcatttcaaaatttgcttattgctttatagtcatcccataagtatatatgattataaatataggcattgccctttctgatagtttagcccaatttacaagataatcagttattttatttcctcaacagcaaaatgcattgatcactacaccaaacaatgtgtggaaaatgcagatttgcctgaaggagaaaaaaaaccaattgaccagagattggaaggcatcgtaaataaaatgttccagcgatgtctagatgatcacaagtataaacaggctattggcattgctctggagacacgaagactggacgtctttgaaaagaccatactggagtcggtaggtagatgatgttattttagaaattattgttgatagggaatcagcaaagcaagttattcaaactgaaactttcataggcagtgaaaagaaaatctagtttagaaatagcaggtgatcttttgccaaatattttattttcatatttatgtatgaaccttggttgtgttttgtgttcatgaaatatctgcttttatcttaccacataatcctttgaagtcttgcatggggaagttgtattaattactctgccctttttaa

SEQ ID NO: 99098 - DNA, 1320 bp, Homo sapiens
ccctacttaatcattcccctattgttgaccacttattttgtttgtgttatttcgtgttcttaatttataataactttgattaatgtgtttattttgaagttgagttacttgctgcctaagggaacaagaaaatttaaattgagtttttaaaagaaaaattctaactttgttggataattttgttaaaacaatggcagatcataagagtagtaagagaaatgcttcaaaatggtaattttaatgtctcttgtcctggcccaacacaacacaatgtatgttaaatgaatgagtaacttccataatatatggtaagggagaaaataacaaattaaggagcacttaggtataacttatggataagatttaaagaagccaagattcattcaacaaccaatgttgaatactgctgattaccaggcacagcattaagagttataaatataatttgtatgaatttttttatggaagacagatgccatgtttagaaaaatttcatctagtgctgggtttagaaatagagtgctagactggatagtctgccctagtttgcctgtgcttatattttaaggttttctataatgttgattttgtctccttaagtaccttgtagatgaagtttttaattattgaataattgttctttatctccatttcagtgcttaattttcttagatgatcctcaggctgtgagtgatatcttagagaaactggtaaaggaagacaacctcctgatggcatatcagatttgttttgatttgtatgaaagtgctagccagcagtttttgtcatctgtaatccagaatcttcgaactgttggcacccctattgcttctgtgcctggatccactaatacgggtactgttccgggatcagagaaagacaggtataagtacctttttctgcatcaaaactaattgaataatctttatttcattttggggacaggtagaatatttataggaagcatattctaagaataaattttgccactagctttcatagattgtaaagtcttattaggctgttgctctgttttgtactgtgctgggtgtagtaaggaaaaccgaagaaattgacccttctggaaagaaatagaagtgattatctcgtagggagggcctaccagacaacatgtgtactatttaatcaagtaaatttaaaaaaacaggtggggataggttggggctaccttttagatatttgggttagatatatctgggttagatatttagaaagtaaagaacattctcagctttttatgcttttattagaactaaatacacaaatttctatagtattagaaatttgcattctgtacaa

SEQ ID NO: 99099 - DNA, 1102 bp, Homo sapiens
ctttcacttaagcactcagaggccattgtagggttattaattggcctaatttcaatattgttgtgtctcagggaatagggagtcccaaggagaaggagagagatgggggaatgaccggtgtgtggagcagtcagaacacacacatttattgattgagtttgctgttttatatgggtgtggttcgtggtgtcccaaaacaactacaatggtaacatcaaagatcactgatgacagattaccataacagatataacgataattaaaaagttttaaatattgcaaggataactaaaatgtaacacaaggacaaagtgatcacatactattggagaagtggctccaatagacttccttgaagggcagtaaaacaaaggtatgcctatatttttctttatatcactacctctttccttattactaaaactatgctaagtcttgcagtcaggtattgtaagacctacaattttgattcttttttctttttcaagattctttgggctattgtagattttttgcattatataagtctgtgggtgttctgattgggattgtattgaatatcttcaatttggggcacattgaaatcccgataatattgaatcttgtaatccaggaatatggtgatctttttcatttacttaggttttttatttttttctcagtagtgttttgtagattcagtgcagaggttttacacatcttttcttaaattaatgttcttatatccctaagtataatttgttttttgatgctgttgtgaagtggtatttttaaatttctattttttttgttggtagtatatagaaatataattgatttttatatactaacattgaatcctatgaccttgataaaatcatttatagctttataaatgatttttttaagtaaattttttaaagtagatccttttacagaattctgtttattggcatcttggtcatctgcagttagagagcattttactccttcttttgtaatctttataccttttccctctcttttttttctatattggctagaattcccaatacttacagaagtgataagaggcagtgaaaaaaatctttaatttttttcaatcttagggggatagaatttt

SEQ ID NO: 99100 - DNA, 1006 bp, Homo sapiens
tttaaagctagtctttgtaatatagtctcattaaaaataaacaaaatttgaccaggcacgatggcttacgcctataatcccagcactctgggaggccgaggcaggcggatcacctgaggtcaggagttcaagaccagcttggccaacatggtgaaaccccgtctctacttaaaatacaaaaattagccgggcatggtggtacatacctgtaatcccagctactcgcgagactgaggcaggagaatcgcttgaacccaggaggtggaggctgcagtgagccgagatcgtaccactgcactccagcctgggcaaccaagcaacactctgtctcaaaaaccaaaaataaacaaaattatctggtaactgtcagaggtgcagcactgctcctcaggttatctcaacaccttggagaccttgggcaagatggagaagagaaaaagcaagtttaattaaaccaaagaatagaaaatctgctgtccaaattccccacttaaaatctgttgttgagctctgttaaaactgcaaataaaactttgacttgcttgtttgtataaactagctatttagtctttataaaagaaatacccaagatccatattttaaatctcagttcagtttgttcatgcttttaccacaaaataggacctctgactgtgtgtgtgagggtgtgcatatatgaatactttgccagtgatgaaacaattctgtatttgttgttgcaggatgcagtacggaattctgtatgtcatactgcaaccgttatagcaaactcttttatgcactgtgggacaaccagtgaccagtttcttaggtaaatatgcttgttgattttcactttggttcaaaatctttttcttttttttttttttttttttttttgtgcagtcttactctgtggcccaggccggagggcagtgatgcgatctcggctcactgcaacttccatctcctgggttcaggcgattctcctgcctcagcctcccaagtagctgggattacaggcgca

SEQ ID NO: 99101 - DNA, 1470 bp, Homo sapiens
gaatcagtagtaacttgagatccacaaagtaatttggaagggttcaaggtaaaattttaatgcttttaaccttagagttaaaaagctttaaggaattcatttgttttaacactaattaaaatacatcatctttttttacagagataatttggaatggttagccagagccactaactgggcaaaatttactgctacagccagtttgggtgtaattcataaggtaatatatattggtcagtgtatacaggcatcagaaaagaagtaatttttctggggttaagaaaaaataacagtttattataattcattaacaagtacactttgttaagtcagataagtcattttgtggagaaggctaaagtaaataagatactgaagtatttatatgtgtgtttgtttttaataaaaagtggaaatttgtttctataaagactgtgtaagccattgaaaggataaattgaaatgttatttgcatagtctgagatggatttgggcaaatgttataaaacaaagggaaaaaattgaagcatttgtgattttttttttttctaaccagagtgtaactgggtctctttaaaggcttgtcctcttgtttgagttatacaattatatgagagagagccccactacctccttctctcttagcaagtgaacattctggggaaaaggcagtaatcatagaaaacattgtcttttttcttcttactttctctttttgatgtctttgttatgacttacctttacagggtcatgaaaaagaagcattacagttaatggcaacataccttcccaaggatacttctccaggatcagcctatcaggaaggtggaggtctctatgcactaggtcttattcatgccaatcatggtggtgatataattgactatctgcttaatcagcttaagaacgccagcaatgatgtaagtattaaaatggaaaactaaatttccaaaactcaagaatccaggataacatatttgccacattattttagtgactggagattttgtagaatttgcgaatacccaaaacaactgtcatcttggattttttttttttaggtaatttcatttccttcttgataagctaaaattgtgtttctcactcctttaaaccctgcgtgtatttgtaaaacatgttgttttcccacactttcatcttaaaatgttacaactacaagtgaccttagttatcatctagtctaggccctaacattttactggaaattaaggcctaaagaagttgcagtctctcagaagttagaatccttgcttgttttgatctttgataattgtttaaaatgtaaatcttttggaaaagcttactaagtagccctgttcttattttaaggaaccttaaaatgtaattttacactaacttctatattggagtgagggccatcaggagagtagttaagtgagccagaaaaccttgccctcatgcataagtgaaaagattgaagccagggct

SEQ ID NO: 99102 - DNA, 1033 bp, Homo sapiens
tgctgggctggacacggtggctcacacctataatcccagaactttgggaggccaaggtgggtggatcacctgaggtcaggaagttacagaccagcctggccaacatgatgaaaccccatctctactaaaaatacaaaaattaggcaggcgtggtggcagccacctgtaatcccagctacttgagaggctaaggcaggagaatcacttgaacccaggaggtggagtttgcagtgagcccagatcacgccattgcactccagcctgggcgacaagagcgaaactacgtctgaaacaaaaactgcaattgctgagtttatcactgaccttttgattatcacatcctttgatcattcttactgagccaacctctgcatatttaatgtgaaactgtattttgaaattagaataaaaacttgtatgttaagtacagtgtaccaaatcaatggaatctatgttttttccttagatcgttagacacggtggcagtctgggccttggtttggcagccatgggaactgcacgtcaagatgtttatgatttgctaaaaacaaacctttatcaggatgatgcagtaacaggtaagcatttctttctaaagctaacaagcttaagtattaattaatgtaaatgtaattacattagtttctacctatattttgtagcctcttaaaattccgatggatttctctagttgaagaggaagtgaattttgctccatttgtcaaagttatcttttaaaacaagttttgtgatatataggctttctaaaatggtatatcctgtgtgtccactttcataactgacttttgcaaacaggaatttattagggtgatctgcttactccatactgcttggcgataatatagaaaaaatgttatctaaatgtctcctttgaaatcactgtaggatttgatggtacattctgtcaaagtttaaaaggaaaacaaccctaaatatgaatgtgcgaaccctaaatgtatgaatgtgcttccacataaagtatcctttttaccaggtggtttaaaaaaatgct

SEQ ID NO: 99103 - DNA, 1903 bp, Homo sapiens
atatggtgggtagttagtggcaggtaatactgtcctctataatcaataagaaccactgctatagtttattgataaaattattaattaatttgttcagttaccaggctccatctttcttccactcagcactcagtacccaggaatttaaataaggtaaaaatgtagaattagaagccaacttccttgcttgattgttaaaaggaagtggactgccataggagtggctgttgctgttgacttgactttatacttcctaaaaagtatgaagcagggcaggcatattgcatagcgtattgggaattaagagcagctacctccttctgtatttatgtgttttattgccccatttatttcaaaaactaccaaccacaaaagagttattgagctcatcatttcctatctgagaccagcttacttggtggatgccactatgcctattagactgtagaagttaactgtttgaaataagttgatgattaatgttaaattatttttcttaggacccaattcttcgaaggtctggaatgtatactgtagccatggcttattgtggctctggtaacaacaaagcaattcgacgcctgctacatgttgctgtaagtactctgacctttcttgggaatggggtggacggaaaagcttgcagatggacaataagtgtctaggtgactccagcatccacagcgcatgaccaccaccagtggtcttaggttgtgattctcatttactggacccaacaggccataacctagcactagattcacttagcttttcagaaggatatgggatgggataacagtcccatataaatggaagtccttaaagccattcaggtgcaacttctaaaatcctactgcaaggagcaccctcatttgtaagggataagaccttgtgagtatgtgtggccaccctaggatagagaaattcagtgaagaacaggaaccatttatttctttttacagccggtagagttagcttccacatacccctaatgggtgcagtggctcatgcctgtaatcccagctactctggaaagtgaagtggacagtgagctataattatgccaccgcactctagcctgtgcgacagggcaagaccctatctctaaaaaacaagcaaacaatcccccacccccacaccccgggacccctaaggaacatgatctattacaagagatgcactgcacaggaaagccaatgcacatgttttccaaaaggctttccactcatagttctcctaatccaaatgtagttatcagcaataagtaatattgcctggtcacacagtggacattccacgtgtcttaataggtttttatcatcgtggtgctgggaaaaggtaaaccaagggtacctttctatgcagaaagacttagaactattgttaactcctttttcccagagataatattttccacagtatttattaataattaataaataatttttttagcagtgcagtatgttctaaatgttcatattttgcaaaagccataatgcagctgaaatagtctttttctttttttttttttagcgactttgagacagggtttcgctctatcatccaggctggagcgcagtagcacaatcacagctcattgcagcctcaaactactgggctcaagtgatcctcctcctacctcagcttcccatgtagctagaactacaggcacacaccaccgtgcctgcctaattttttaactttttgtgtagacagggtctcgctgtgttgcctaggcagatctcgaactcctgggctcaagcaatcctcctgttttggcctctcaaaagtgctaggattacaggtgtgagccactgtgtctggccagttgaaatggtcttaagaagtagccctggggccgggcatggtggcgtacaccagtaatcccagcactttgggaggc

SEQ ID NO: 99104 - DNA, 1110 bp, Homo sapiens
gaaaagtaaccctgaatcttaaactttgtcaagctgtgaagacttctaagcccctgaattgaaatttttcaataactttttctaaactggggacagaaatttattcttcaaaaatacatgtggccaggtgcagtggcttatgcctgtaatcccagcactttgtgaggccaaggtgggaggatctcctgagccccagaagtttgagaccagactgggcaacatagggagaccctgtctctataaaaataaaaataaaaatacatgtgtctattttttgaatgtattcatttattgtatatgtttagaggtgtgcaacataatgttttgatatacctatcagtagtgaggtatacactcactgttgaatgatgctgacctctcatgtcagtttggtctagtggtagactacatagtataatataatcttaaacttttccccctaggtaagtgatgttaatgatgatgtcaggagggcagcagtagaatcacttgggttcattctattcaggtaataacttcaaacttcttattctatttatatttcattttttttggaaatgtagtagtcactaccgaaactaccaaacagtttagtcactaaacaaaaactaaatacctgaggagtatatctgggttcagagtgaggaccatttaatagcgagattagtactgttcatctgaaaaagaacaaagcatatcatgggattctgagaacctcttttagaagtagttatttctgttcattttttggtagcattctgcttattcatttaactttttaaatccaaataacacatccagtactcctcttcttgtatattggtagttcaaatggatattatctcttacacaggtttgtaaagtttttgaagggctttaatgaaagtgaaaggtaataggttttgtttaaatgccagagtgaaaatttttaaagattatcttttacttatagtcatggagatgtccttggcagtatgatatagttgtgtttaagaagtcatactcttggctgggcgcggtagctcatgcctgtaatcccagcactttgggaggccgaggaaggcggatcacgaagtcaggagttcgagatcaccctgactaacacggtga

SEQ ID NO: 99105 - DNA, 1089 bp, Homo sapiens
attatcagagaactagataattttagtatggaaagtatattcttccaggtatacccttagtatctcttgggttgtgtaaagcatcctactcatgtttgactcttaagttgttttgtttcctgtcagttaatgttttgtattgtcagtgactttatattttataacaatataaatcagtggcttggtgtttatattctgccacataggaagttgacggtcatttaaaactgtttttcttccatttttaatctgatggtgctttgctctctagttaacaaaattcatgtctgcccttttatttcctgtagctaacacaggttaagttcccagtttcagcagcagatgtctcccgtgagctgcttaggttttgctgagttttccactacatagtatagtcaaataagttatttatgtgcttgctacttctaagggaccattcttggttctcttttcataaaacgaatctttaagaagtgggaactggaaaaattttgtctaaaatttattttataaatgaaaattaaatataattgacctgtttaaagagctggagttaaaaatcctctctatgttctctaagttttagtttactgccatttccctagagtgagaattttttaaagtagaagaaaccagtattcacattttttttaaagataaggaaattgaattccaaaatgtttaataaatttccccactgtcataaagctaaatactgagattctaaacaggcttcatgatagaccagtgctttctccaccttgctttcagtcagagcaccatctttttgagtggctgtgataaaacagctttattcttaattttccttattaactttaatatttgagaagtgtctgtcctatatcctaagactggtacatgttttctgaagtgacatcatttactgtcgtagcatgctctccatcttttttcccccctttagatttcccttttaaaatgaatttgtggacatttggtcttataccatgttttaagagtttatttcttcataatttttaaaaacttcttttcaagtatacttattggatatgaatactaaaaacatgttagtaaacacatatttgtagt

SEQ ID NO: 99106 - DNA, 2912 bp, Homo sapiens
actagtagtagggaaacatacctaaagctttgatgatttaggaattaaatgtgtatgatatactcttcccagcagattatatatagccagtaaggaatcataacagatcaggatttatgtattagagccgcattctagcaaaggattctgccactgtgaaaatatatgccttgttcacttatacactgagattctccgtagccaatacatttcttaaggcaattatcctaaactgagttgcctgcagaaggacagcaatagagtcataggtcgagggacaaatatgggtgaacctgaaaaggaaaagctaaggtatgagttatcttcactgcagacccccttagtctaaatttgcacttataacaggagcattaaaatatatatcaaaagtagattgaattgtctaccatttacttagtgccttctatgtactcatcctcataagaattgtataaaatgcagatgagaatactggggcttgaagaaattaagtatttttcctaaatttaatcagctgtctggtaagtggcacaggttggactcattctgagatctaacagtgcaaaataatatactgaaaggatgaataaaaaattttgtgctggaagttcacttgagtcactggacaagcatacataggcaggcatgatctcacttaaagtttgtatccctgattaagatcccatgcttgtgcacgttaattaatatctctaagaaacctaatgtggttcaggtacccaagagcgattttatttgctttttcctccttctccaatagacctacctgtgctgagtagaagctcaatatcagtcatttaacaaacaggtctagttccaagttcttgttattttgtgtgatatccagctactatcctccctatcccttccatcaaaacagtttcctgatcagaggaaaattatgactgcattcaactaaatcagactataaatggcaatcttaactcacctccagatgtgatcactgttttgtgcacttatttttagctctgtgttccttttgttctgtatcatgccttatgcttttaagacctggaaggcaaggctaatgtttgttttgttttatttcattcttagcacaactttgcatataattagaaaccaaataaattttatgatgacagtggttctttttaaagcctgaaatttattgatttgactttatttcattcgaataccttaaaatttaaccagagtgctggattgttttcatttgtagctatataaaattattttcctcatggaataatcttgtccaaattaggaaaattagatattcttaatacttacatcttaggttaaagagatgatttgatatatgacataaaattctttatataatatattcttggcacatttacatctcattcatcatcttactcatcattatgtttgatgacaactgccagttctgctatacataactaacttgctcttcagttttgtcaccttcattttcagtgaggagaagcgtatctagtagaatgattgatgaagactgaatggttgaacttcggagcctcattggactctggtacatggcagggttaatcccatttcgaattccatgtttcttgaaaaacttagagttctctgccattggattccggaagtagatcttactggagcgttttctgagagtttttactgactttgtggcccggtaattgcaggtgatatatcggccaaatgcatcccgaaatgtcttattgaagagggtgtagaccaaaggattcactcctgaggaaacatagcctatccacacaaatatctccaggagcatttggagagtagtttggttacaggaatcacataaaactaaagttatatttgtaataaagaagggacaccacataagcaaaaagaggaaaaacacaatccctaggacctttgaggctctctgttcgttggaaatggtctgcactgactttttcccaattgtggatgttcttcgcataagtgtttcatcacctgagttgggcagagccttgtcctttcgagaaccatccagcattgccaccttttccggtgacgagcaaggtgtttcatccctttggaaaactgtagacacagtcaaccatgttaggcgttgaggtggcttgtttttgactaagtaagccttcttctgtaaagcatggatagtgagaaagtaggtgacaatcataattgcaagaggtgtgaagaaggcagccagtgagccaaagagcatgaaatcgccaaaacgttcctttgtcagcacacaagtgatattgtttgggttgtccacatcagtctctatccctttaatagggactggaatggcaatgcctaaggaagaggaaaacaagataaattgagtcattttatgacctgtaactcttcgattagatccttttggattgtatccttataactttatgcttgttggtgcattataattcctgggacccacaatgcaggatttgtcgaagcattcatcagtgaagatttgacaaacagaacctaagtgagcaaatctgtttttaaacggagattggttagtaatttcagatttataatgaaagctcccctaaagctatagtatatccatgatacagtggagaatgtcttcatttattctacatttctcataatctatttttgttttttaagctatctcagattaaggaagagaaattcagaagagaacctgcttttttcttattatccagtgtagttgatctagaggcacttcagagtacatttattcaatatctttactcagttttgtctttgaggttacagtttcatttaacagtttttccttttgatatgtgtgaatgtcttttaatcctttccatctaacttcttagggaaaactaaagttcattaaaaagtgctacttaaaatttgagtgtgtgtgaatcatgatgttg

SEQ ID NO: 99107 - DNA, 1022 bp, Homo sapiens
tgtttatatgtccgcctttcttgaatgcaaagattctttttcttgatcatctgtgtattcttagtacctagcacattataaacactcaataaaaatgtggtcaatttataaattgatggtatccagccttaatctagatgccatttataccagcaggctgcttaccttattagcttgatcacatttcacagtttcaaatattttaattattcttaaggatccatttcttcaactttttttccctttctctgtccaactctcccaccccaccccaatatacacatacctcacactctcccttgccctctccctcattgcagtgagcttaccaaatgtgagtcatctggcataaatgactttattatagttttcctcctctgcacttcaaattttaattttcacccattgtctcccattccctttctgtagctgcttttggggggctggttctgctctgtcggcatctgccccctcatctagccttttctcactgtttttaaatctcttcattctgaatagactttttcttgaccctgttttcttcccataccagaggagtaacacagcttgcttttacctccaaactttttcaaagagatcaagcccttatatcatcatttcaggaatatgaaggtcaatctcattgttttgctttcttgctgtttttgccccagtgcccctactcagattagggaggagtaatttaagtattccaggtctcttaattttttgcctctttgaaatatttttacaaggaagaagagaatctgctggtcaaaccattgtaatttttgcaaatctatttgtttttctgatactaacatataagagttttgaatgatttacgcatacttcatgataagaagtatagctttgagtattatagatgagtacagggccgtaagacgatttagaagaaaaaggatttcttttatacataatttctgaacatcggtatgttttctttgcatctctcttaaaactttgaattaaacatactcaaaacacttaagtgcagtgac

SEQ ID NO: 99108 - DNA, 1003 bp, Homo sapiens
ttgtctttctacctgctgtagcaaaagtgcatgcatctgattcagcttaaaactttaagctgtactttccgggggtgagggaggatgggctgagaacagttaactctgtttaactttcaattgaatttgtcataaaagtatgttttttactaacgttgaattttaactgctgtttattttatatacggtacaggaaaataacctgtatgcattgcatgcctgggttttttgttggtttgggtatttttttgtttgtttttgctttcttttgaattagtacaaaaacctgaggagttttactagaaaccccgtatcttgatgaggcagacttattttatctgaaacctgcttaacctttgggcagctttttagtttgggaagtcaggttacactatttgtccggaaaataattagcatcagtccataaatctgggacataaaatgtttccctttggaggatgtaaaagactatttttaaaggcattccaagtgggctgttcctatagtttacagaggtactcagttcatgaacttattgcagcaggacaaatcataaatacttcttatgtccaaaaagaacataattttcaaatatacatttatctcagaaattctaatgcttctgtctttatcttccagaaaagaaagacatagttcagttcaaattattgtttaaaagtttctgttttgttttttacttttttcactacatttgagcatatgagttatcctggggttcagtgtctaatatgatagtgttttaaatgttttaagcattttaatgcttacagaattttttcctggtttttaaaatttccactttacaaaaagaagtgcctttaattcattgcttttctcctccatttcagaattgggtaggctaacattttactgcataaatgaataactgccatttttctcttactgctatacatttgtttcatctctgattagacttgcatctcaactaaatcatatttaatttgcatgcagtactctacca

SEQ ID NO: 99109 - DNA, 1080 bp, Homo sapiens
atattaaaatgtctatcaattatttaagacataaatatgaagacatttcacatattttatgttaacatatgttgggttttctgctaacttgtattgctaaggatatgttgggtaccagcattttaaatatacacttaaagttttcagctgctggatacctatttttctatagaatacatggaatctattaaacaggtaaatctttgttacctgtttttgtattttgtttgttagctcactttaattctatggtactttgccttttaagattccttaactatttagctgataatttaagtatctaccatggtactttgcatataatagatgtttgatatttatggactcaaagattttaaagctaaaattcacttctgcataattctttcaatatcatgtattgaatgacgtattaaattttatggtagtctgaaataagcattttgacattttctgtgtgcctagcaaagcacagtttgaagagtatgattttacatcttaagctactattatgcacatggagatgagagctagaatcatatgcctgtacagtatttatcaaatatgcatatatatttctacataatactttcttttaagctttattcagaattagggttatgttctctattatagtaagatttcttaattatttttcatggtttcatgcagcattagattatttaaaagattacaaatttataaaacagggagatagaaagactgttaattattagaaagtctaattaaagcagtagaactttactcattactgcttgtcctgccacataattttcttgatttattttaaagcccaggtaaatgttgatttaaaatggaaggtgtaaacctgttactatctgataatagttttagatatctttctgttattacttataaaattgtaatgtgtaaaacctgggtataatagttggaatagcaggggttttttaccttctaatatggattctagtttaataaattttacttctgtaacttaaaatatttttatcttcatataagtaaatataattctaagaaactatatctgccacaagtaatcattttgcttaggcagtt

SEQ ID NO: 99110 - DNA, 1027 bp, Homo sapiens
agttccaattttaaactggggtttagtgatttaaattgggatttagtaattcaaagaccttatcgttaacccagcgcatatctgtcccggaagtgtcctagttattgctttgaggaaaaaaagtatcagtgtagaaaagttaaagtataggcctatttactataatttatagataatatattcagaatctataaatatcactaacttgaatgactttttaaatgattttattagatagcttaggagggagaaaaatagtttacaaaaaatattttttgctctttaaaactgctgatcaaccatagagaatgatataaaacaagggactgtttacttgccgtatctttaaatagtccaagttcatcttttatttcaagaaaagtaaagattaaatgagtgtccattctctaatagtatatcatagttctgtggtttgatggcacaaacaaagtgaaatacttaccaaacattattgtcaagagggcaattggcatcacaaacaatccaaccagcaaatcagccaccgccaaggacattagaaagtaattagtagcatactgcagcttcttctccagtgaaacagccagaataacaagggtatttccaccaattgtgggtattatcaccatgagtatcagaagagctgcccagtgcagtttatttccctgttcctcaacaatctgtttcatttcctctggtattgattctgtctgtaatccagaccagttagaagagataacgtgaacaaaggtgctctgcaaaatgtgctcaggaattgtgctttgaagttcagacactctgtaagagagagccatttgctgtttttctgtgattcaatcccgttccgaacagtggtcagcatggttagtagctaagctgctcatctgtttttttaaggcattgtaaccatgccaaacactcaaaagccaaagttgacaccttcctttaaaaaaaaaaattcaagttctctaaaatgagcgcatacacacatctgtccatgtttgtaggtaagatatccaagtattta

SEQ ID NO: 99111 - DNA, 1899 bp, Homo sapiens
ttacttacagaagaatagaaaagtcgaaacacaatagttcagaatagaacttttagtatgcgctggccacccacctagaaacactcaaagcccaacaagggtctaaataaatgttttaccagctagggatccttatatgtaattagctttgtcttatcaggtttgtgagtactgatataaatgtcattttagatttcctttagtttgagagaaggaaaaaaaaaggtattactaggatccaaataattgtgtttagtaatttcatctctcatggtatgtctttgcaacaattgtgttctaaatttaatcactaaatttgccaaattcaaaccagttctttttttgttttaagtagtgtttatttttttaaccttcccagttgccttgagaagaaagggaaaccaaaaggaagattagaccatttatttgttcatcaaatgtacaaatcacgtttttaaaaactctcctttagcattagtaaatttttcattttgatttttaaaccgctgaatagaaatgaaagattatgatagcagaattcttgaagattaaaaaaaaaaacctttagattaattccatatgtgtttattaaatgcttacctctggtttcgttgttattttgctgagcatgtcatcttatctgttcactagacttgcttgctgctgtgactgaaatcctcctcccattgacttattctgagcctccagcacaggcggttgaaagcagtgaaacaaatacgttgtatagctgcaagcatgccaaggaggttatttcctctttgatacattcatttttagagagtagcagcattcattgtaattcataaaaccactgttaagcatgttgaaccagttcatggcccttattcaagttatatttttaagagctctctttaatatttggggggactgtaataaacttgatcattttagcttcagatagttttgtttggggttaagcctgagctgtttttcacatttgagaaaaaataagatataatctagctattttagaggtttcattctttgaagattctgccgttttaaaagcctatagtgatttctacagttctgatttctagcagtgaaacaagattcttatctagcttttgtgcctttgctgtggaacaccattaatttgctctggttgcaaccttatatagaagagcacagaaaggcctgaattctacatgtatacataggttttagcagaaacttttttactgcttatttttaaacagatgatctctgggtttaggagtggttcacagctttttttccccatagactttacgttggagaaaatacaagtaatgaaaatacgtttttgccttatttcagaaaattggtgtttaaatcttaatagttatgctatttaagttttctgtaaccataagactagcttagtattagaacctcagcattctcaaggtttccttttaaaagatcattatagatgcatattttaaaattaattacttataaatcagtgatgacatttgtgcccttttcttgtttcaaatttgtattcctttgctcatgttgaatgttattggaaaatacttagttcattttagctctgctgagcacttcagattttattcagtatttgctgcttttttaaaaactcaaaatttactatattagaaaaaatacttgtgaagaattctagatgaaataatattcaagagaaatcagatgttttttaatgtaccagaatttctattcaggaatatgaaaatattttaaggcaaggtgcggtggctcattcctgtaattccagcactttggtagaccaagacaggtggattgcttgagtctagaagagaccagcttgggcaacatggcaaaaccccatctctacaaaaaaaaccacataaattagccaagggtggtggt

SEQ ID NO: 99112 - DNA, 1048 bp, Homo sapiens
agcactttgggaggccgaggcgggcggatcacgaggtcaggagatcgagaccatcccggctaaaacggtgaaaccccgtctctactaaaaatacaaaaaattagccgggcgtagtggcgggcgcctgtagtcccagctacttgggaggctgaggcaggagaatggcgtgaacccgggaggcggagcttgcagtgagccgaggtcccgccactgcactccagcctgggcgacagagcgagactccgtctcaaaaaaaaaaaaaaaaaaaaaaaaaagaaagtttttttgcccttttagagttgcctgctgaaacattgaaataaacatataagaatattatggttttactgtactcttgaaaagattgaatgtctaaactaatttaataaagaatttctcatttcttgtcttaacacttgttttttctaaagaatgtgtcagagttggaactgttgttagattgagacactgtcaggttttttatatgcttttgagtttatagccttcacagcctatttcagtctttattgcaattaactaggtaaagttctgcattaggctcctggtatttatgttctcaggcaaaattttttctaaacctcatggaattgttagtgccttttgggaagcaaaacttaagtctaacttctatcccctttcagaaaacttttctactaaagaaaagaacttgagttttgtggttggtttaagaatagtatatatgttatattttatttactcttttataacaagtaaaaatgacaaaataaatgaaatgttgacagattttaggataagctctttcctgtgagtcagttttccctggaatatcctgcccttgcagccaaggggtaacttgataagtatcctgcatgccattagttccctaacaagttgatgacgaaattctggaggtctgaaccctaaatataaccagctttctaggtttaatattcagcttgttttatattttgataaacctttggacatcaaatgttagtagccaaagttctggttctgatccaaagccagtttctggttatgcatc

SEQ ID NO: 99113 - DNA, 1004 bp, Homo sapiens
aatctttttattgaagtttaatatacattcaaaaacatgcacaaaatcattagcccacagcttgatgaattttcacaactgcatacacctgtgtaaccagtacccaattcaagatcataacattaccagccttccagaagctcttcttacattctcttctagttattaccctagtcctgctgctcttcaaggatagccactgtgccagccaggatcatcttttaaaagatggggtcaggtataccattagtcaagtttgtcctattttttatcttgttgcaaatatggagagaatgaaaaataatttctcttcttaccaacacaaaaataattgctaaagcaaaaatgcagaagtcagaatttcttcattatcaaggcttctttatcagtttattattcaactaaagtgatactgggggatttaaatctttcatgtaacttaggaaatgtccaggaattactataaatgacttttgtcttctggaacaaaatgcaaagtaaccaagaaataggaaaatagatgtagagcagtgtgctacccccaacatggctgttcctgccatggaggaggtaccagagaataactggaatccagacctatggctgaggactcacttatactgagaaaggagtcccctttctgtacatatattctctgaatattgaagatcagatttcttctatcaataattagaactctatgaaagatttttaattctgcaatttatgttttaaatgctcattgtttcctataactttttcaaaaacaacttggttaaaactcttctgtcttaacttaaaatagattacctataacagtggcttcgctttctgtttcttatcagaacccctgaacagtgcccaagtgttgtctctttgttgtcagagagttacaaccctcatgtgcgctacggagctgcaatggccttggggatatgctgtgctggtacaggaaacaaggtaaagcccacagccaatggggtcagttctttcttggcgccaga

SEQ ID NO: 99114 - DNA, 1053 bp, Homo sapiens
gtaatcccagctactctggaggctgagtcaggagaatttcttaaacccaggaggcaggggttgcagtgagccaagatcgcgccattgcactccagtctgggtgacaagagttgaagctacatctcaaaaaaaaaaaaaaaaaaaaaaaaaaaattgtaccattgtacaaaaatattttttctttatgttctgtaaggttttttctgttttcaaaatgatttatttatattttttaaacttttttgtaaaaaactaagacacacatacattatactaggcctacacagggccagtatcatcaataagtcacttaggcaatagtaatttttcaactccattataatgggactaccatcatatatgcagtgtgtcacttcccagaatgtcgttacatggcatgtgactataaattgaaagttcagccatatcaactttatttaaaagttgtgtgtttttttaaattctttcaggaagccattaatttgctagaaccaatgacaaacgaccccgtgaactacgtgaggcaaggggcactcatagcttcagctctcatcatgatccagcagactgaaatcacttgtccaaaggtgagcaaacaaagaaattccctggaagagagatggtttggtcttttctttagtaacttatcgtcttttgaggacgttttttagttcaaatatggtaaacactgaaagtaaagtaaaagtaaagagagcattttagagtataagagaatggggaaactttaaatatgtaatgctctttaaatgtattttttagacttaatggtccctttgttaatttaagtatataaccatgcttgaaaaattagaactcttggggtgttaaaaccgtaaaatgaactctttttttgcctttcactgtccttttaaaatgtattcagtgggataactttttcctctgataatataggatgcaaacttaggcagtccatgccttttttgatctgtccttctaaagtaatttttaaaaagcctgcagtcactttgtatcgtacataccatcttagtttagaaatgagtacatccacat

SEQ ID NO: 99115 - DNA, 2531 bp, Homo sapiens
tgggaggctgaggcaggagaatcacttgaacctgggaggcggaggttgcagtgagccgagatcacaccactgcactccagcttgggcgacacagtgaggctgtctcaaggaggggaaaaaaaaaaaagtatatatgtctatatagatatatacagatatatatacacatatatagacatatatatagagacatatagagacatatatatatgtgcgtatgtgtgtttatagccctttatctaccattacagaatccagaaagctctgaaaactcagaggtttgtttgtttttcaagactcatttggatgcaattattaattcattatcatttatcctacttagtataaatattcatatattgtgctacttcagaaataatttatttgattatgggatatcataatatatagagcagtactacactgggagtattgtataatatatggatatgtatcatgttagccttctaaattctgaattccaaaatacatctcacctcaaggatttcatggaaggaattacagacatatatttgaagtcataagcacaaatataatttcacagacaaaaaaaacacctccaaaactgatccttgatgtacagctacatttccataaccaggaagatagaaaaatagaaaggaggagtaacactcagatgataagtaccaacagaaacaacgctaaggaactttattgctttctccctgatatctaagagtgggcttttttccagcagtatagggtatacaagtaaaaacatgatgaatgtttaaaatgcagctttttgagaaggtagattttaaatactcctacatagtacaatgcatggatcacagcgttgcataaaattttaattgtctttttttgtgagattgttgtgatataaaatggaaagctaatatgatttttctcctggaaattctactttttgttttttttggtggggggagaccatactattcataacaatgaaattgagttagaaaatcttaatcctcaccctgattaccattaattgcttgtgatagcaagcaaaccaattgttttgcttgtctttttagtcttcatatctgtaactagatgtgaatagagggagtagaccagatggtctcaaagctgacttcgaaatttaatgtatgtcctaatctatcaaaataattctttaccaagaattacaataatgaaaattaagttactgatacataagaaataaaatgtgagaaaaaaatttaaaatgataaaaactagctttttaaagcattctatttaatattagttagataagcctattgtatagttggactgatttttttatccatttgtcagttttactgaatgcttttctattgttttgggtacaattttaaatttaaattttccctataatgtacattcagtgctttgttctatgtttctttttataactttgtgaaatacttcttaagcctttagcacataaaatttccatactgtataaggtaatgtaaatgttcatctaaaataagttcagaatcaaaggaacttgacttgtcgaaccagaataaaagcgtcaaacatgagaattttttttttttttttttttttttttgagatggagttttgctcttgtcgcccaggctggagtgcagtggcacgatctcggttcactgcaacctttgcctcctggattcaagcgattctcctgcctcagcctcctgagtagctgggattataggcgcctgccaccatgcccagctcattttttgtatttttagtagagacagggcttcgccatattgggcaggccggtctcaaactcctgacctcaggtgattcacctgcctcggtctcccccaaagtgctgggattacagtcatgacccacctcacccggccacgtgagaatttttttaagtagaggggaatttagtgatgatttaatcatgctaggttttatagttaaagaaatcctgagaagtaagtgacttaagtggttgtgtgctgggtagtggcagagttagttcattgtttccccactatattctgttgctgcctgtgaataaaaaatgagaaccatgttcaaggaatattattttgttagtagcatttagattgcagagataataggagggattggtaggattcttcccccatatggtgaaacagtcatgcttattgaactatgaaatgccctttatacattacacgacgtatatgttacctcatataatcctataatagccatgtaaggtaggtgctaacatccctgtagagatgaagatactgaggttcataaaaggtagtaacttacccaaacagcttataagaacagcttataagccagggttgtgtgattctattattctgccactgtatcacattgtggcctcccagaccaagacaaatgaaaagggggaaaagattctgaaagaatatgtaatgcagataaagtcattatattaggaaactcaaatttgatattttctgcttttggcagatttggggagctccatgattatgtgcttcttgaacaagccgacttcttcctgg

SEQ ID NO: 99116 - DNA, 1050 bp, Homo sapiens
cttcatgcaaaagatacctcacacagctttggtgaagggtaatttactttaaggtggaactgaaggaccatgctttttaggaaacccgcaaggttggtggtaaacagaatagctataattcaaaatgcaatgaaagccttagtgtttgcttggactttttaggcctgctgactaacagtggtaatgtatgaaatcgcattcaacattcctttgaccttgaaacatccactgtggaatgaggattcaagacagagctggtgctcccacactaaaaagtcataacacccgtgattgcaaccacggaactgctctgccttcaagtctggtccatatccctctcttgagcattacgaaactcagaactaactcattatcattggagcaatattattccctgttctaaaatggtaccgcaaatgagtagacttagactataattctttctcttgctccttcaggtgaatcagttcagacagctgtattccaaagtcatcaatgataagcatgatgatgtcatggccaagtttggcgctattctggcccagggcatactggatgcaggtaaatgtttttaagtcttcaagatttatttatttaaactaaatctaataaaataactatctgctctaactatatgacataatggaaattgagtctgaggcaaattattcctggagaaaatttggagcctgcagttcacagagatcatgtacatttaagagtacaggccgggcgcaatggttcatgcctataatcccagcactttgggaggccgaggtgggtggatcacctgaggttgggagttcgagaccagcctgaccaacatggagaaaccccatctctactaaaaatataaaattagctgggcgtggtggcacatgcctgtaatcctagctacttgggaggctgaggcaggagtatcacttgaacccaggaagtggaggttgcagtgagtcgagatcgcgccattgcactccagccggggcaacaagagcaaaactcggtctccaaaaacaaaaaaaccaaaaaaaagtacaggctgttggccag

SEQ ID NO: 99117 - DNA, 1565 bp, Homo sapiens
tcagctatgtttcagaccctcctttgggtctgaaacaaagtcagcttttacaccagtattgcccagcttttcacctttgttttcagcaagacccatgaaggagaataatataggctaaccactcacccactgtgtattagcattgtaagacatatagtccagagaggatatctacaaccagcgctgaaggaaattgttctattttccattgctttcctgtaaagcaaaaaggctatagcacccaaatctcaatcttggaagtacatgagagcaaattcatatccaaggtaggctacagatcaaaaaaaagggaagagttatattggacacaagcctccaagaactaaagattcacttgatgacaagagtagtaaattatttcagtaaatgtcctgcttagttttcccatttattctttgatttatatatatttatatatatatatatatatatatatatatatatatatatatatatatatatatatatgtaatacagctaggaaatagaatagtgttgtaggactgagttctctagggcttgcatgtttgtatgtcagtaagggattacaacagtttaccctgctcatttccccaggtttctactgctgtattatctataactgccaaggctaaaaagaaggaaaaagaaaaggaaaaaaaggaggaggagaaaatggaagtggtaggtataaattggtggtcatatggattgaagtatctctgtctctgtcatggtcgagattcttccttagttgaatattattctaccttgctcttggcttccttcaaacaattatcctgttgccagcatgtagaatcatcaaactgtacttgaaagagactcgaaaatatatccatttgtgggaagaatagaagggtacaaatcagtaaaaagttcctggagcaaatgacaactaaaataggttttgaagggcaaagtaggtttttcacagacaagatgatgaggtaggagaaagaaaaaccctttcaagcaaagggattatcacttgtttaggtagacctttttctgatctctgctggtagaaaaacctttttaatcctttaaaaccaagtcaaataccattctcattcctaagcagagttacttttccctcctctgagtctgatagcactttagttgtacttccattactaccgaccactacctcttgtaccttatagctgctcagtcaacttcagatgttactcagttctgtggaacagaaatgaacttctgttgaactttttttaaattttattttataggatgaggcagagaaaaaggaggaaaaagagaagaaaaaagaacctgagccaaacttccagttattggataacccagcccgagttatgcctgcccagcttaaggtcctaaccatgccggagacctgtagataccagcctttcaaaccagtaagttaccagtgactcttagctgtatataccagtgggatattaatccataggacaatagaatattgatagagaatgataaatctccaaagcattggagcaagctcactagttctaagaaattatttaacaaaagagagaatgttcttt

SEQ ID NO: 99118 - DNA, 1083 bp, Homo sapiens
agactgcttctcaaacttcagtgtgcatcagattgactgggatcttgttagaatgcagattctgcagatctagggtggggccagcttttctgcatttttaacaagctccagatgataatgatgcttctggcccaggaccatatcttgagtaggaaggaattaggatactatatttggacagtaaacattcttcctgcagtgagactgaggctggtagtcaaggccatggctgggaaataactattcttaaattgggatgcatcatccaagtagaacagcatcacatgttataccatctagagctactgggttaagtttgcaaatacttcgtatagatcacagttatctttatcccagtaaagttctactccagtttttcacttccaaatcatttaagtagttttaaagtaccatttaacaagtatttactctagattgtggagcacgcttgaaatatgagtgtacgcttctgcacgcccctgtgtttccagctctctattggaggcatcatcattctgaaggataccagtgaagacattgaggagctggtggaacctgtggcagcacatggcccaaaaatcgaggaggaggaacaagagccagaacccccagaaccatttgagtatattgatgattaagggccagaggtgcgtgtgcaacaaaattatgaagggaaacttctttgtcaatacttcacaaatgttttttgcaaggacatcatctcacgtttttccttccttttgtgtttaatccttatttacctaaacagtattaaaacttccccgtttcaacctttttctgcatatataaccacaaattcctttttctttcctctttgactcgtactctactcacgttattcaaagtggctggtctgcaaactatttttataggtccataaggagataggaagcttactccagaatctgtctgctcaacgcttctttcatcaagaaagtcttccccaaaacatcagctgaactgcagtttgcttagtgatagagctgatttacattctgatgtaagcttcttgttgtggatcagttatagttgtggactggcactggcccataggtgacactt

SEQ ID NO: 99119 - DNA, 1516 bp, Homo sapiens
ggctgattttgtatttttagtagtgacagggtttctccatgttggtcaggccggtctcaagttctggacctcagctgatccgcgaacctcggcctcccaaagtgctgggattacaggtgtgagccaccacgcccggccaattcattctactctttaaaaaaaataaggacagtatcatttgttatatttaaaggtctggttgcaaatctagcatgctgtgtgttagatactgactagcaatttaggaaagatttgcagaaatctcagataaatattaaggtagaaacctgccattagtaggaaaatatatttatacctcaggaagactattagtttgggccttagagaaaggcagatttatactaaccttcctattttctaaacttacttttgaaaattatctttcagccttgatagtttcctaagctttacccaacttgcacagtacagcgtaggctatcatgatcactcagtctgtctgagaattgaggtgactcacgttagctcccatcaagcctttggcaatacctcatggaaaacccttgattacagctttcaaggcagttaattacaaaatgacttagaggtttatagctggaaactggaatcttgttagttttcaaaggggtaaaatattcagtccattaggagtttggaaactataatctgtcgtggcacaaactggtatattaggactgcagaggcagggttggggcctagttttagatttcaacagttaatagtaaagaggaaaaaaaagaatgtcttgaaattaagaatgaccctagctactactgttctttcttccctttcccaggatctcacttgcttatctgaagaagattgtccaggctcatattgggaatgcttatgaggaaattcatgccgagacctgctattcaatgcatgtatcgttgcctctgcactgacctgaagaaccctgtctccaagtctttggttgaagagaagatatatgactgttgagtgtgctctttcacagaacttggttttcaaataaatataagatctccagatggacaagacatttgtttttcagcctgggtttttaataaatgtatctaatcctccccacaccatgaaatgcctaaatcccaagagccagagtcttgatttgctaggatgagtatgcacgactttcatattgatgaaaaagtcaaactattcttaaattatagaccatgaaaataatggaagggaaaaaaatcaaaccttgctcatcacccccaagaattctctacagttttgttgtggttgtgggttgttgtttaatatggggtctaatcagccagggcaacatggtgagacccccatctctacaaaaaaattgaaaaattagctgggtaggccaggcagggtggctcacgcctataatcccagcactttggaaggccaaggtgggcagattgcttgagccaaggagtttgagaccagcctgggcaacatggcaaaaactcacctctacaaaaaaaaaaaaaaaattagacatgcacagtgg

SEQ ID NO: 99120 - DNA, 1561 bp, Homo sapiens
gttgcacgctgtgggtcagcaggtccaaagggtgacttcagtatatttacgtgtccaagagttctctggccccaagtctttgttctgtgcctgattctttccatttcaaagaccttaaatgttttgtgtgttctttatagtgcccagattagatattgcaaaggtgtgggaaaccagggttggtgtgcaggaatcgcaggctcaggagcttgaatcctgtgggatctctatttttctatcctttaccactgaaaaggagtatatgggagatctgtggtgttgagtgggttgtgagaattttgggtgttgaaatttacaacgaggtatgtagtctgatgtcttctccacagaaggatcttgtcgctgcatttgacaacggagaccagaaggtgttcttcgatctgtgggaggagcacatttcaagttccatccgagatggggactcctttgcccagaagctggaattctatctccacatccattttgccatctatcttttgaagtactctgtggggagaccggtgggtttacctggtgatgcgggtgggtctgagtggtgtgttaaggaacagtgtttgctgtcattgtccacatgggcatggatttcatatgtggctgtgctgtcataatgcttacgaggtacaggcatcctctctcctggtgagtgattttctactgtattcccagcagtttatattctaatttctatggagatttaataatttctgtaatcaaagctatattcctaaatacctcaagtttttgaaacctcatcaaaataaagtttatttggcaacttagtatgtaggcgtgtatgtctaagagaacatatatttcagctgcatattagaccctatattagaacataaatttatttacttatttattgtagagaaagggtcttgctatgttgcccaggctggtcttgaactcctgggctcaaacagtcgtctcaccttggcctcccaaagtgctgggattacaggcgtgagccactgtgtctggccagaacacacatttaaacttaggtagtggaaaagagtacgtctctttgtggaaagcccttttgagtgataggttgaatttagcatctgtagtcctttcccagatggggctggagatgggaagagaggagaaggctgaaatgtgaagctgctgcggtggctgagctttgagtgcagagtaaatgacagaagggcagcagaggcaagctggcatttgaccccgtgcattaatgactgccctatggaccaaggtgaacacatgagaatgtcagaacaccaacggtggggacagtggtggagggagcagcaggaccatacattgtggtagccgttgttggaaggctcttcctcaggttatcactcttgcagggaagatcacaggagattttcattttctgtttgtatttctgtttaagtctgggggtcaaaagagggctcatggtataggtcaactgagatgtgtttgtaagaacaggcttagtctatgtacgagactgtgaaggccatgattagtagagccagtgtgggagcaaagccccacattcacctcctctggt

SEQ ID NO: 99121 - DNA, 1031 bp, Homo sapiens
ttagcacaagaaaggaaaggagtgacttggaagcttttgtttccaacaccataaagaaatgcctgttaatctttagaaaccgctcctgctggaggcatggtaatgcagacagatacttatttatatctgaaaagtagaagcaatgtgtctaggtaataatggggaagctagttaaataaatgtgatagacaacatgaggttttgtcctgccattaaaaatgtttatgaagaattttaaggacatgagaaaatggcaataataaagttaaaaagcagcatattgaactgtatatatagttgtctgatcttcctgacatagtctcattaagggggaaatttagggtggatggtagaattctagagacaatgcacctgccaggttagataggggatgccagcgacacgactgggacagaaggagcctcagagagaggatggggtgagcagatagactgggcattgatctggagacctcaaacaagtgttttcccttcttctaggacaaagaggagctggatgaaaagatttcctacttcaaaacctacctggagaccaaaggggcagccttgagccagaccacagagtttcttcctttctatgcccttccttttgttcccaaccctatggtgcacccctcatttaaagaactcttccaggtaaatgtcagcttttaactcttgtgtcagatcctgggtgacattgtggttttaccttctgtatgctgggggcttctgaatgatgctttaaaaaaactaaaatttgcttacattagtattatttttagttataaccataatttgtttagtcagtctcctattggatggttagttaggtttggtttttgccatcctatactagcagtggtttgcaacttctacatacattaaatctggaagagttatagtaattaacactttgtaatagcaaaaactaggaacaacccaattgtacaccaacaggagcatgcataaatacattgtattatattcacacaatggaatattatacatcaatgagaatgaatgaactaa

SEQ ID NO: 99122 - DNA, 1029 bp, Homo sapiens
ggttggggatcagtaggagtggatggaaactttattctccttttttaaaagcactgccatagtggaaattgtgtggtctaaagcagggacactttttttccccctaactttttacttggaataattgcaaaactgcaaaagtagcacaaaggacattggtatacccttcacccagagtcacccgctgctagcattggccccttcctttgttgtgtctctacacacaagtgaacacgcacacatatgcacaaaatctgttttctgaactatttgaggataaattatatatattatgactctttactcctaaatacttcagtgtgtatttcttaaggttaggaatattctctcatataactatacagttaccaacttcagtaaatttaacattgatacagccttcttatctaccgtccattttccaattttggtagttgagtcaataatgtccttcactgcatttcccgtcctctggtcatctagggtcaattgtcacattgagttggcacagctcttagcctcttctaatcttgaacatttcctcagcctttctttgagttacatgacattaacatgttagaagaatataattttccccctttaaaaaaaatagaacattttgctgggtgcggtggctcacacctgtaatattccagcactttgggaggccaaggcgggtggatcacgaggtcaggagttccagaccagcctggccaacatggtgaaaccccatctctactaaacatacaaaaattagccaagcgtggtggtgggcacctgtagtcccagctacttgggaggctgaggcaggagaatcgcttgaacccgggaggcagaggttgcagtgagctgagattgtgccattgcactccagcctgggggacaagagcaagacttagtctcaaaaaaaaaaaaaaaaaatagaacatttctccttttgtgtttgatatttccttataattagattcgggttatgcatccctgaatcacctaggccaaatacgacgtcggtgatcgtgtgtcctcctt

SEQ ID NO: 99123 - DNA, 1071 bp, Homo sapiens
aagtgccaggtgaggtcagccgtggacatttacttgctggttgccatgtaagtgccaatcgtatgctcagcaatttccttctatacaaagtgctcagatctaagagttgctcatatatttactcaacaaatatttgagggcctcgaaataacactattgtaggaactaatggggaagggatgcaaaagaaatctaaaagagtatctgtggtttaaaatacctccaagaatttccagcctagatagggaagatcacagtgattctgacaacagcagctcccgcctgctggcagtgccgggtgccaggcactgttctaggcgccttatgggtgttcagtcatctcctcttcttagcagccctgtggtaggtgctatttttattcacatttcacagatgaagagacagagagaaaataggtcacttgccaagttcacacagctaataagtaactgtgatggggctgggattcaaatccaggtggtctgactcagtggtccatgctcctaaccactgccctatattaccttcttgtgagacatacatgaatgcaaaatagcaaataacagaaaataaatatgtgatcacagattcataaaggtgatagacacaggaagtgccacagaaattccaagtactccaggaatactgggagatggctggcgtggggtaaagaggaagtgagatgagttgaggaagggaagggtgtggccagcaggggtggcatcctctgggggagacagcacaagcataagctttatcctttgcctctccactgcactcacatcaacccccccaagaaacccatgttagtgatctagtgtgtgcatgcgctttcatacttaaaagatgcacacacagagtacacggaggtatgtactacacacagatccatatatacttttgtcagtatttgtttttcaaaatgagataacatagagatagaaatacacatacttctacaccatgttgcctttttctcttgttaatgtttcttgaaagtccttctgagttaggcagtgtagcaagttgatactttttaatgctatgaatgtataattttctagatttttt

SEQ ID NO: 99124 - DNA, 1049 bp, Homo sapiens
ccagaagcagaacggtgctgccctttttgctgagtcttgttacttattggctgtaaacgttcttgagatgagcagacctgttctagagttccctatcccccataaggcctgtgtatgactgactggctgttctatatggtgccttgatctcacagagagagaagttctgagaactgtgattaggagagactttaaagagccttctggaacctccgcacaactaagcagtggaggctccctagctccctagcttcctgaagaggctggttggccttgtccctttggtcttcatggagaggttgggagcagaggcagactgcccctgagcccccttggaatataagcctgcaagttgctgtgattggccgaggccttcttgtttcatgacagctacacattctggggagccacgccttgggagcttgtgtcagggtgtccatggcattcaccccatgtctcctgaaacaggaggaccatgacatcatggaagccgatctggacaaagacgaactgatccagccccagctcggagaactctcaggagagaagcttctgaccacggagtacctgggggtaagtgccacacaaagggtggggatcctgaaacagaaaggccagatggacattgatggatttcgtgttttcagtgacacagagggtttagtttggtttgttaccatactgtatttatgagaaggtccatgttagccagtctgctctcagtggccctgaaatgcactgtggccctagctacctgtcacaagtagacaggtgtacggattggggaaagatataactagaaggcatatgccaggggcctttggaacatcagaagatatgcctggccccagtagcaattgcctaccatcccactttttaatttctgcatgccttatgtattggaagggaatactgaggtagacttggaagtccttggcgcagaggtgttggctgaaaccatcatagcccatgaggttacccactgaagcacagtgtggagagagagtgggggctgagcaaggaggggcattccagcagtcaggagtggg

SEQ ID NO: 99125 - DNA, 1078 bp, Homo sapiens
ttgacttctaggtcagctctctaatagatatttctccagcccttttttctctttccttccaccagatcatgaccaacacggggaagacaaggcggaaggggctggctaatgtgcagtggagcggggatgagcccctgcaaaggcccgtcacccccggcggccacagaaacgggtacccagtgtaagtcagggctaaaggaagcgggaattgactttcttaagctttgttttgattacagtgtaagatgtatgtatttttaaaattcaaaataaagcattcattttgaaaagcatttatctctttatttttgggggatttttggagggaaagaggttgagtccttctcccttcccccaggatttttttattccagaaggagaagtggttggattacaggatctccagggccacttcagaagacaaatgttggccagagtaatttcaaaagaagggacctgaaaggaatcgggctctctccagaaggactcctgtcgtgccttttctgtggcctctcgtcacagcaccaagccctgtgttgggattggaatgttacagtttaagactcgaaatcaatttattttagatgactttttggaacaactggatgctgttttagctgccgagccttattcatcttccatagccttgctcgtaccccatttatagaaatgaaattttagtctcgttacgtagagcctctggtctccctgggggcctagaccccttgtgggctaaggagccccagatcagacagtccagtgggcggtagagaagccacttctgtggtctgggtggcctctcttttcctgtctagagagaatattacagcaaaatattacagagagcaggctaaaaacctccatatattcattcaacaaataatggccgtgtaatttttaaaagaatataccgtgttttacttagttatcccctgaaactgggcactttattttttccagtcttactctattgcaattttgtaatgaacaaccaggcaacggaattgagcaacaaaactcagaaatgcctgccctcatggagctctgtgctgccacggacaccagggacaccaggcaa

SEQ ID NO: 99126 - DNA, 1081 bp, Homo sapiens
tgcaaggatgctgcctaggagactgtaatttcccagagattcccagtgattctcaaagtgtaggcaggtttgggaaccaccggttttcagccctccaatccctgctctcttggtgggccttgagccagggccagaggagggccactgcgtcattgaacctgggcaggaggaggacagaatggggaagcggcaatggaagcaattggggccagaaaggaacgagttaaggaagttaaaatttcccactgaaataggtggcagttgaggaagcagaagtgggtttagagcttgaggaatggaagagggtgtccacagcctctgtgcaggatctgagaaggccagggaggaacgatgaggcatgtcgagggccaggcaaaggtgctccctggaaacccagctgtgtggttccaggcacggatcgctcagggctcctctggttgtgagagacagcagcccgacccaaggtggctccagccagagggatttgttggctcatataacaggatcccctctccctccacagcctctctctctggacagttgcccagcccctagctcttccctaaggtctgcggacttcttcatgaagagcaggagaaacacaggctcgcaaatgggctgaggcatttgtcacctcatctcagggacctcagagaaaagagaggtttttccctgtctcggcctccatatacagatgtctagggaaggactctcactagtctcacttcagtcatgtccccaacctaggccaatgatcacgttgcgggggggcgggggtaccacagtgggccaggcctgggttatgcattcccttctgtggttgggacaagtcctgagatttgcagccccatgagaacagcctggagtgggcagatccgtcaaaggaagctgctgttatcaagaaaacctggttccagaggctcactcagcagctgcagagatgcctgggcctggtctcccactcatgccaagcccctgggactctcagatcatccaaaacagagccctagatgagagtcccagaaggctggagaatcaggtgagaggtgctgggaaatgcctccacatgtgctcctgatca

SEQ ID NO: 99127 - DNA, 1321 bp, Homo sapiens
gttttgagtgataagtgaaaaaagaaaggagatagggctgggccaacaggccttcccttggtggtggggagccctcagaggtgggaggaaccccagaggtgaagagagggacatggtgggggcacaaaaaaagcttccagagccacaggcctgggcgagtcctgacatggagcccagtctcatacggcctctttccctagtggctggctttgctcctggccctaggtagcccaacagctgggcaaggggtccgtctggtcaggggaaaggtgcaggggcagaaggtagcagagggagaaaaggacaccctgtctgcctctggccccaaagacaagtccgaatggggccagagggaaatggctgggccttggggtgccccagggtcttggaggggaccgggtgttcaggtttcgcacaagtacaggagggaccggcgaccgccctccccccgccccgggaggctccgccagggacaggcgtccccgggattggaggtgacccccgtgggttccgaagccccgcctcggccatgcactgtctactaggcgcgcttggggagcctaggggccgtctcggagaaatggggtggtccccgccaggcggcggcggggcgggccctgggcgccgaaggggttaaggcacctgggccaccgcccctgccggcccctcctcccgcggccgggaagaggaaagtcgcggcgggggcgcggcccggtctccgtccccacccgcccgccgtcccgccggcccgagccgtggcgcccagagctgcgagccgctcgcccctccgccgctccggcccgggccgccatgtcgctgtggtgagtggggctgggggccgtcgggggcctgggcgggggcgtgggcccggggctccccctcctccgtggccacagacgggcgccgggactcccgggataggagatgcccccgcgcgcgccgcgccggcctcagtttcccgggggcggatgggcgggcgggcgcggcggcggcggcgggagatgttcgcggtacgcggccccggacccgtgggggacgtcgaggggtctcggggcgccgcgctcagctccccggccccgcggccctggacaccgctccaggaccctggcggctgggaccccaggtcttgccggcagctgggtcccctctcccttccagacccctgagggccccctgcgtccgggccactctcctcctctcggggcttccttccgcgggacctcggaccgccgcccgcccggcccctctccgcccctcccgggctttccctacgaatggagcggacccggcaggtggagcgcccgcagcccagggcctcgcc

SEQ ID NO: 99128 - DNA, 1024 bp, Homo sapiens
ctctggctctgagtcacctaatgataccgatacctactgctgtgggtaggtacaccgcagggaaatgaaaggcattggggttccaggcgtggggaacagggcagaggtttccacctgaggccctcctgttaaggtgacagcattcccctaactgtgcacccgctgcctggtactttatatagcactccaatcctgtgttttagccccatttgggggaagaagaaatcgtggctcagagtggttgtaaaccactcattcagcttgtaagcgtcagggcctgattccacagtgctccttgaggagagggcagggtgggagaaagaaagggcagggtgggagaggaagcgggaccctaccctgacagcttagggactccgggactgagcctgtgcccaggtccacttgcccgtctgggaccacccagcctcccaaggggggcgccaggagagccctgggctcatcttttctctctcctctgtactgtccgctctcccccacaggaagaaaaccgtctaccggagtctgtgcctggccctggccctgctcgtggccgtgacggtgttccaacgcagtctcacccctggtcagtttctgcaggagcctccgccacccaccctggagccacagaaggcccagaagccaaatggacagctggtgaaccccaacaacttctggaagaacccgaaagatgtggctgcgcccacgcccatggcctctcaggggccccaggcctgggacgtgaccaccactaactgctcagccaatatcaacttgacccaccagccctggttccaggtcctggagccgcagttccggcagtttctcttctaccgccactgccgctacttccccatgctgctgaaccacccggagaagtgcaggggcgatgtctacctgctggtggttgtcaagtcggtcatcacgcagcacgaccgccgcgaggccatccgccagacctggggccgcgagcggcagtccgcgggtgggggccgaggcgccgtgcgcaccctcttcctgctgggca

SEQ ID NO: 99129 - DNA, 1393 bp, Homo sapiens
cttcttcaacctgaccctcaaggagatccacttcctcaagtggctggacatctactgcccccacgtccccttcattttcaaaggcgacgatgacgtcttcgtcaaccccaccaacctgctagaatttctggctgaccggcagccacaggaaaacctgttcgtgggcgatgtcctgcagcacgctcggcccattcgcaggaaagacaacaaatactacatcccgggggccctgtacggcaaggccagctatccgccgtatgcaggcggcggtggcttcctcatggccggcagcctggcccggcgcctgcaccatgcctgcgacaccctggagctctacccgatcgacgacgtctttctgggcatgtgcctggaggtgctgggcgtgcagcccacggcccacgagggcttcaagactttcggcatctcccggaaccgcaacagccgcatgaacaaggagccgtgctttttccgcgccatgctcgtggtgcacaagctgctgccccctgagctgctcgccatgtgggggctggtgcacagcaatctcacctgctcccgcaagctccaggtgctctgaccccagccgggctactaggacaggccagggcacttgctcctgagcccccatggtattggggctggagccacagtgcccaggcctagcctttggtccccaaggggaggtggagggttgaggcctacgtgccactgggtgtggtggggtgcaggtagccagaaagggacctccctgtgtggataattctaggaaactgaggcccaggaacggttggagctgcccagtctggaggccctctctgaggagcgaggcgccaggccctggcagccctcctgacctgggtccgttgctggccccctcagatgtggtgggaggtcctggtgacctctggaggaacgctgtgctcaggtacctgggctaggcctggcctgatgggtctgtggccgcccctcgtcttcacagggaagagtcttctgtgaaatgcctcagtctccccagaggccgggcggccctggcaggagaaactcaaccctgtgcgggctcacaggcaccccccagtccacaccctggtctcctgggagagagggcccagccggctctccgcagccccaggcctgcctggagacgggccgcctctgccacagggcctccactcctggctgtgtcctgtaaggtctggaagggcgaccgctctgactacctcagcgcccctcagaatctccctggggctgcagccctaccccaccccgacacagggcagaagagcagcgctcctggccccccgaagtcccagagctgctgacccccaccccaggcaagtctctcccgcagcccccacacccccaggcctggctccctggctggaaagcagccggtttg

SEQ ID NO: 99130 - DNA, 7772 bp, Homo sapiens
ctgggcttggtaccgccacccactgtaggagccccaaatgatttaataagttaatgcttggagcctcctatgtgtaaggttctgaataatttacacatagcaattcatgatccttaaacatgtaaggatgatactattaccattttcagatgagaaagttggggcttgggaaagtatgaggtgtaagaattcagagggtctggttcagaggtatttttaagtgttcaaaagagttccttatgtctgggtattcaccttatgataggggctctgacttaagacaacataacagaagcctggagtttaacatgctaatgtgtctagtgcatgtggtcttgaaccagaggcattgccagagtctaacatctcattgggaccatggttatctttttgggtgtggggctggacttactggtttggttttcatttattctcaaggtcgtcatacctcagaagaaaggcaagaaggctgctgcaacctcagcaaagaaggtggtcgtttccccaacaaaaaaggttgcagttgccacaccagccaagaaagcagctgtcactccaggcaaaaaggcagcagcaacacctgccaagaagacagttacaccagccaaagcagttaccacacctggcaagaagggagccacaccaggcaaagcattggtagcaactcctggtaagaagggtgctgccatcccagccaagggggcaaagaatggcaagaatgccaagaaggaagacagtgatgaagaggaggatgatgacagtgaggaggatgaggaggatgacgaggacgaggatgaggatgaagatgaaattgaaccagcagcgatgaaagcagcagctgctgcccctgcctcagaggatgaggacgatgaggatgacgaagatgatgaggatgacgatgacgatgaggaagatggtaaggagttgtcttggtagttactgggcttctgattacaaggtatcttgagattctgggatcaacatattccttccacgacaacctggagatgagattagaatccttgtgggaattctctgggttgttgtggtgtgctagacttaattacccatgaatgatttttgtgcctcttgagaaaatttcaatagcacattctattagtgttttttataatgtaggattttgtttctaagtgattttttttttttttaaatttttttgagatggagcttttgctgtttcccaggctggagtgcaatggcgcgctatctcggctcactgcagcctccatctcctgggttcaagcagttctgcctcagcctcccgagtagctgggattacaggtgcccaccaccacaccctactaatttttgtatttttagtagagacgacatttcaccatgttggccaggctggtctcgaacttttgacctcaggtgatccacccaccttggtctcccaaagtgctaggattacaggcgtgagccactgcgcccggccccaagtgatctattcttgccatgactgttaactaaacatggtgacaggattgcattttctttacattagatttgaaaaccgatgttggttttgggagattgctgcaatttttaggtgacttctctttcagactctgaagaagaagctatggagactacaccagccaaaggaaagaaagctgcaaaagttgttcctgtgaaagccaagaacgtggctgaggatgaagatgaagaagaggatgatgaggacgaggatgacgacgacgacgaagatgatgaagatgatgatgatgaagatgatgaggaggaggaagaagaggaggaggaaggtacttaaattagattctgacatacgacatgagttatgtttaaaggaggcacttaagtgtttgtggctactgatgtgtgatacattgtttgacatcttgtccagagcctgtcaaagaagcacctggaaaacgaaagaaggaaatggccaaacagaaagcagctcctgaagccaagaaacagaaagtggaaggtaacttgcagaattaggggatatgggggagataaacagcacaaatgatgaataacaaagggacttaatactgaaacctgatgttacattgtagtgtgctgatgtgctgtgtatagaaattttgctttggaaactaactttttaccacactacaagtagactgagttgagctttttttgtgcaggcacagaaccgactacggctttcaatctctttgttggaaacctaaactttaacaaatctgctcctgaattaaaaactggtatcagcgatgtttttgctaaaaatgatcttgctgttgtggatgtcagaattggtatgactaggtaagtgcttcactgcacgttacatacacgtgggtctgttaatgcttttccttcccctgttagcacagttactttagcctgctactgttaaacatgaatactgtaaacatcttcaaggattagcattagtgaactaagttagaattaaactgtagatcccctaagttgcaatttccataatcagtcgtaacttggtatagcacagaataatttttagtaagtttttttgttgtttttgttatgtattgagacggacgctggcttttgctcaggctggagtacagtggcgcaatcttggctcactgcaacctctgcctcccgggttcaagcgattctcctgcctaagcctcccaagtagctgggattacgggtgcacttcaccatgcctggctaatttttgtatttttagttgagatggcatttcaccatgttggtcaggctggttttgaactcctgacctcaagtgatccacccacctcggcctctcgaagtgctgggattacaggcgtgagccaccctgccagtaagttttaataatttggtgttaggtgggagaatcgcttgaacctgggaggcagaggttgcagtgagccaagttcgcgccactgtactccagcctgggcaacagattgagacaccgtctcaatttaaaataatgtttattttcttggaagtacctgaaactattagacctgtctagtcatcatagtgaatacttttatccagacaggattctcctgtattagtgcttataggtgttcttttgtcagctgctactgtgaattcttataagcaatttagctccatgatgaagacctcaaacgtgaatgtgcatgtcatatcttcatgctgagaccttgttctgtagctgcagtttgcagagccttgactttgttttgctaatactaggggtgctttttaaaatgtgatctttgtttgcaccatcacatttgtctagaatacatattgtggattttgatttgtgttttcacctgttgtaattttgccctcctctccaccttgaaggaaatttggttatgtggattttgaatctgctgaagacctggagaaagcgttggaactcactggtttgaaagtctttggcaatgaaattaaactagagaaaccaaaaggaaaagacagtaagaaaggtatgtaaggctttatgagattatgcaatgaactcaggagctagactgctagggaaaatgctttgtaacccatttcccttggtttcctcttatttttttaaatcatttttttcctttggtttcctcttaatgtgggaattaaatgagctacagtgtttacaagagtacttggcactgcttgtcagtgttatagtgtaaattcctgagttaggcaagcaagagcacttttatacagaacaagaattattagatgcacctaaattaacgtaaagggatctttcttcactgaaactagattaggtccctaattactccctatatacagttgtaatgttttgaattggtacattcactttttttgttatgcgcgtctactctaggttgaactccagtgtacctaacagagagtttgacatcagctgtgacaacatggagggaccacttgtgtgttgacactgctatatctccatatttagcaccgagccttgtacattataggatctcaaattatttgttgaatagagctatgtgtgtttttcccctctttttgttgttgccccccacctttggtttttcaggccacagagctcatttttgtttttttaatctagagcgagatgcgagaacacttttggctaaaaatctcccttacaaagtcactcaggatgaattgaaagaagtgtttgaagatgctgcggagatcagattagtcagcaaggatgggaaaagtaaagggtatgttctgtctattgaaatgtaagggttttattaacattaatgcactttcctgctttataaaagaaatattggtttgatttccttaggcgtgtaatcttggacagtttaacctgtaagtttgtgcctcagtaacccatctgtaccatggggataatgtactcatagggtgattttaaaagacaagctaatacttacaaagaagcaagaaatgtgcctatcttacaataaatactttgtaagtagtagcagttctttcagtgaggtgaggttactatgaaaaaattccaagtatttgtaaaactagtgggaagtaagagggaagctcgagttttgattgaaaagtggcataaaactaagggcatttattgtactcagatctgaagcaagttctgtgttgctgaggtaaaagcatttgtgttaatatggttttaaaaaccatgagttcttctccctccattgcaggattgcttatattgaatttaagacagaagctgatgcagagaaaacctttgaagaaaagcagggaacagagatcgatgggcgatctatttccctgtactatactggagagaaaggtcaaaatcaagactatagaggtggaaagaatagcacttggagtggtaagaaattaggcttgttacaaggtttcagaattggtggagggaactcctttgtgtctttgtatttcataagtttataaatactttttaatcaaagttactcaaatgtaggtgaagatcaaggacatgataccccaagtcatactcttatttggaatagtaatttccaatcttgaatgagagctctaaaatcattttgcattggaatacagtaggcaaatcaagcttcctttgtaggcatgttttatactttaaatgacttgaccatgtgcgttttgaactcagatgattctaggaaaacagaccagtcatcagcctatgtaagaacaaccagcaggacattgcaacacgtactaggtacttaatatgttgagtaacagaaatggatttagcttacgtcatgagtatttgtatattaactcaagcactgaaattcttaggaataagatattactgttgtgaccgaagctgggaaccactgtttcagagtcttaggaatgtggcatctctatttgcaggtgaatcaaaaactctggttttaagcaacctctcctacagtgcaacagaagaaactcttcaggaagtatttgagaaagcaacttttatcaaagtaccccagaaccaaaatggcaaatctaaagggtaagataatacctttgtatcatcagttataggctatatatgtcttagaggtctaaaggaacgtaaggtcatgtgatcctgtcagaaaagccaaataattttagctacgtaaatgagtgtaaaataaagatcatcatttaggtaccaacttgagagaaggggcttggcagcatcatgtgacagtgaaggagcatgtgcctggtaacttactctaagcattaactgttcatcctcaggtatgcatttatagagtttgcttcattcgaagacgctaaagaagctttaaattcctgtaataaaagggaaattgagggcagagcaatcaggctggagttgcaaggacccaggggatcacctaatgccagaagccgtaagttcacctggttagggtgctgtggttgggggtagcactctcggtgctttgtttattttttgcacaaattctgtgtttcctgttgctactgagtgaacaataactggatatgatgactgattacctgagaaataattgatgaaatctcaagaaaattcctctagatagtcaagttctgatccagctgtgtcaactcagagtagcaagtttgcccatgatttcctgccccatccactgggccccacctgcttgggttgcttctcccactttccatagaagatctggggcaggatatcaactatgcaatggcaattaaaaaatgtaaacccagaatagcctttactttaattaaggactagttggcttagttgcttttaactgctttttcactataacaagtattcttggctagtagtcatactaggcattgtgcaaattcagtgttacgaactgtgacttcacataaagtcacatttttttttccttcccagagccatccaaaactctgtttgtcaaaggcctgtctgaggataccactgaagagacattaaaggagtcatttgacggctccgttcgggcaaggatagttactgaccgggaaactgggtcctccaaagggtaagggaaggaagcgtgagtgctgcttccacttgaaggggtttttgttctgtgcagaccttgagtctaatgtgtcttctcattgagctcctttctgtctatcagtggcagtttatggattcgcacgagaagaagagagaattcacagaactagcattattttaccttctgtctttacagaggtatatttagctgtattgtgagacattctggggttcaagctgtcacaccagttagttttccatagagagctactctgtcactggtatcttttcccaaataaacaaggctactttctgtgggatggctccccagcatgtacagttaacttgggacatgtgtagtaggtgctttttataatgggcaatttcatttggtgttctaggtttggttttgtagacttcaacagtgaggaggatgccaaagctgccaaggaggccatggaagacggtgaaattgatggaaataaagttaccttggactgggccaaacctaagggtgaaggtggcttcgggggtcgtggtggaggcagaggcggctttggaggacgaggtggtggtagaggaggccgaggaggatttggtggcagaggccggggaggctttggaggtaaggcacgcagagataatgacaccacatagcatgtgctcttcagaccctgtgccctgtcacggttcctaatcactggggaggaggagctttgtacccattcttttaacagtgtcttgccttcctcctgtagggcgaggaggcttccgaggaggcagaggaggaggaggtgaccacaagccacaaggaaagaagacgaagtttgaatagcttctgtccctctgctttcccttttccatttgaaagaaaggactctggggtttttactgttacctgatcaatgacagagccttctgaggacattccaagacagtatacagtcctgtggtctccttggaaatccgtctagttaacatttcaagggcaataccgtgttggttttgactggatattcatataaactttttaaagagttgagtgatagagctaacccttatctgtaagttttgaatttatattgtttcatcccatgtacaaaaccattttttcctacaaatagtttgggttttgttgttgtttcttttttttgttttgtttttgttttttttttttttgcgttcgtggggttgtaaaagaaaagaaagcagaatgttttatcatggtttttgcttcagcggctttaggacaaattaaaagtcaactctggtgccagacgtgttacttcctaaagagtgtttcccctggaatgtcactggagagcatggcaaagccagctct

SEQ ID NO: 99131 - DNA, 2273 bp, Homo sapiens
agggccaacgggaactccgcggtccctgaacttccggtgctggcggactcctcgctccagggccaccaggagccgcggcgtgagtgcgtgccgggaccgagcgcggggtctctgaggaactccaaggctgcccaagcctacggacccagccacattggcgaaccggagaccgcccgattccaccacccccgcgctcccctcacagccggcgccaaaaacgccagtcccacgacgcaggccgggacccgcgcgcccacggcccaatcagcgcggaccttgcacaaagcgagccccgcccccacggcgccgttgccagcccctccccctcccgtggccgcctcggcccgcctactccccgccccgcgccgttcacggttagaggctcgcgattggctcatggggacggccgcgagctttggttggtcggcgcggagtcacgagggcgccgtcgtcgcctttccacaggcgattactgggcaggctcagtctttcgcctcagtctcgagctctcgctggccttcgggtgtacgtgctccgggatcttcagcacccgcggccgccatcgccgtcgcttggcttcttctggactcatctgcgccacttgtccgcttcacactccgccgccatcatggtgaagctcgcgaaggtaaacggccttgagcgcgagcgcagacgtgtaggcctgctttccgaggggcgagcgcggcgccgcggggaggagggcctgcgcgcagtcccgggcgcgttctagggcgccatgctgcgggaagtctcgcgcgattagtggggaggtctcgcggcttctggctacttggtggcgaggtgaagagcttctgcaggtgctgggggcggcgaacgcggcgggaaagacagagtcactgagcgcggggagggggcgctgggcctcggggtggagagatgagaccaaacttttgcgacgcgtacgagctgggactcgactcctgacgcacgtgcccgggagcgcggcctgccacgtgggccgcgccgcgtgggtcctggaatctccagagggaccgggtgccttgggccgggaaatggcggtatcggccctagtcggagtcccggctgcgctcggatgtctccgccccggcctggcaagccgacacgtggtgggccccggaaggtggctctgccgcgtgccttttgcgctgtgtttcgggcacgtggtggcctaccaggtacccccacgtggccgcgccgcctctttaaggggcggggttgtctcgctgggaaaggcataagcttcatgagaaaatcaaggtagtcatttttttaagtgccttaatgatcttcaccgttaatttggattcagatgagggtggtagaataaagtaccgggatttgtagtattaaaacacggttgtgcttaactaaggtaacgggaggagaaatcatttcctcaggttgactttttaccttagggcaggttttctgttggtaaagcctgggaggaaaaatgtgggcggttgagagtagtccctcttgcattgccatcaggagtagtttctatgttagttgtggtgtttggcactatgagaaatggatctgaggacggagatgatggcgtatgaacactaatggcaaaatatgaatggcctgaaatgtcgaggtggaggtgtaatgatctatttgtgtccattttaggcaggtaaaaatcaaggtgaccccaagaaaatggctcctcctccaaaggaggtagaagaagatagtgaagatgaggaaatgtcagaagatgaagaagatgatagcagtggagaagaggtaattttatccaacttaatgcagaattatgttaaaactacaaaatggagagttaagacatgaaattggatatctgtggcaaaaataagattttattcaggtatgtcttattgtagtggttgagtgtttcacaagctcttcattgacatgtcaagatgtcatttggctaagtatttgaatgtgagtgtaagacgagatctgggaatttcttttacatgttcctctgcagggcttggagtgtgatttgttgtgttaaatcattacatttttccagtttcaacatgttagcctcacccccacatgtagagctgggcattgtattcagagctgaggataaccttaccagattcctttcctagcctccaattaaaattaattggtctccattccattatatataaactttgtaatactactcactgtgttttatagttatctctggtgtagactgagggctgccacctctctttgtgttaccattgaccctcttt

SEQ ID NO: 99132 - DNA, 1031 bp, Homo sapiens
taaccgtgaacggcgcggggcggggagtaggcgggccgaggcggccacgggagggggaggggctggcaacggcgccgtgggggcggggctcgctttgtgcaaggtccgcgctgattgggccgtgggcgcgcgggtcccggcctgcgtcgtgggactggcgtttttggcgccggctgtgaggggagcgcgggggtggtggaatcgggcggtctccggttcgccaatgtggctgggtccgtaggcttgggcagccttggagttcctcagagaccccgcgctcggtcccggcacgcactcacgccgcggctcctggtggccctggagcgaggagtccgccagcaccggaagttcagggaccgcggagttcccgttggcccttttggaggcacagcttatccctgcttgcccgcgagcatggggccggaggcaccccccggctgcaggcagtctcctgagagctgttaataaaggcagtcgcgggtctgtgcgaggttttctgtgagaaatgcacgaacctcccctaccccacagaacctcaagcgggagatatttctcgacatggggaacggcctcggagaagtaactttctggcctcacagggcagggagaggggcctgggagggccgaccgcagagccgggcctttgaccgcccacaggttccctggttattatttgggtcgaatgcgccaattaaggtggtggctgcgaagtcagtgtcaccagatggcccgggagcaggtcgagagccaccggcagggttccccggcggcagggcgaaggaggccgccagtgacttccacggttagctttgtgggtgggtctcactcgatgccgggcttagcaaaccagagcatttccctccgtccagggcctgccggggatccatcccatccataggtccagctatggatccatccatacctcattgttcctacagaaccaggatatctgcagctacggctgtacttgttaaaaatcacctcaggccgggcgcggtggctcagatccgcaatcccagcattttgggagg

SEQ ID NO: 99133 - DNA, 1044 bp, Homo sapiens
atagtggttactggtgcatttctggcttcgagctgggcctctgggctgtttcctgtccccatatctctgtgtcctgtgacccatgacacatggcagagtgtgtcattctaaaccctgccacagctttagaatggctgcaagcagttcccccacagcctgctaagaatactttacaacacctgggctgcaaagcgctggcttcctacagacgcaaatccacatacaggtggcctgattttccaaatcccaagtcagaacacctggtccgaccagggagctgtatttatggggcggaaggggcgagctgtttgcagtgagtctttgccggactcccccgtttctggccttcgtgcatttggccacctgggggagcccctgtgcccttcagtcggagggtagaggggccgtgtgggaggggaggggtgccaggagtccagaggggtttgcaggctgacggggcatccttctggagccaggccaggagttaacccatctgctgccagcccccagccctcacgtcccagggctctgggtggagatgcccagggtggggtaaggtcgaggggattcgtcctccttgagaccagtggcagcagacagaacacggtgttccgtacaaatggtcgaggccctcaaaacgcgcctgccccttgcttggaagagtaatgcgctgagctgtgtgggaatgtgtgtggctgcttgggtcactgggactcccagatcagcccaaatgcctgaggacttatgaagccctctgcaaacctctcactgtggctgaaagcactggtgccagagtccattgggcaaatctcagccccctgggtgtgcagcagctgcctggatgtgtgcctctaagtcctcacaggacccagaggccaattccacgttaccaacctcactttatgcctgaggaaaccaaggccatccagctggtacacagtgaggcctctttgcacccagggtgccctatgccagcctttgttcccagcctccccacttccactctcagagggaaggcagaaagaaggcccaggcagaaagaag

SEQ ID NO: 99134 - DNA, 1015 bp, Homo sapiens
cctcaggtgatccacccgccttggtctcccaaagtgctgggattgcaggcgtgagccaccgtggcccgccactctatttctttttgtaaaggtgggaatagaatgagaaaaaaggtactttgcagactctgaacagctctgtagatattatttattatggtgaaaccatttgagaccaattacagagcaacacatcaaggatcatagaacaataccaggaaaattgcacacatatgtgctaaggagacccccaggacaaacactttgagccaagttctgctgtggtggcagtgcatttgggtggcatctctatgccctgcattccctgcacaagatcaatgcctcagagccagcaggggggcggggggttggcctcacatgaccttgaggacgttttggctcagagacaggatcacacagctcacagacaaggccaggtttggaattcaggtcttttggcctcagaatatgggcgtttttcactctgtggccgcagtaggccagttttcaagccagagacatggagacatgggagcagatgtgagccacgcaagtggatgaagcacgagccacttgccgtggggaagggtagctatgcgtccgtgcacccgtcagcacatgcgcattgagcacctgcctccactggaggaagtgaacattctgggggccatggaagggagagggatgggttcctcagggcttttgtggctgggaccaaggggctgactccctcaaccttgttagaggctgccaagggcctgctttttggcacaagctgacctctgctattcatcaacgccagttagtggatcctggggctccagttgaggggggcagaaagacacagaggtgggggaaggaggacaaaggggcctcccttgggtcacccaaggtgccaggggactcggagtaggagacggagcctggcagggtgggtcaggcctgcgtgtgggtgggcctggtggatgaaggcagcggaacagtgggagggagcagggatgtcctgatgaataga

SEQ ID NO: 99135 - DNA, 1050 bp, Homo sapiens
gccctcgagtgggacagcccgcgggccccgcacggcatagcggtcccctcattctaggtttctagttagggtctgtcccgagcggtcactgccgtcgcgacagcctcagggcagcctcctccaggggcctgccgggccatcgagtctacccttctcccaccccactgctggactgcgatgggcacatgaacattacagagttcctcgggaaaaatcatcgtctctggagccagttgggctaatctttggggactacctgaaatttgggggaccatttagagaaccatgcggagccccgagaaaggggagcatcaaaacgccacactcaagatggcgccgggctcggcaagcgtggcgtgacgtagcgatctagctcacgtgggcgatccgagaacaacaggctacgctggccttatcgccaccgcacttagctgtcgaactaagaaatcggttgtgtgggaaaaaggaccagaataggtggaaagatagtccagaaatttacctgtgccacacacaagatggcgagacgtagggttcgtccctgtgctgccaaaagggggcgcccgacacggaaggcgggactccggagacacgagcgcacattggccgagagtggcgggcgaacacaaagttgacgctttgcgtccttccattggcagtttcttccgtctgtctctcggttgcagccgagctgggaatggggaaaacccggagtgtgggatcgtggagggcggacgatgccaagtccagcagagcttgcgctcggggctagaagagagactgagtctcccttctcagtttcattaggtaatgggcgacatggctccgtctccacagcggggctttgctgagcttagcacgcagtctcccggcggggaggaggcgcgcagtgccgggcgccactccgtctccagtacgcgttaggcccgcgttcccaggtgcccgtctggccgctggactgttggcctttccggagcgagttttactttaggaagaagcccgggatcccggtagtttagcctgaagaaacgtggggcagatgctgggcag

SEQ ID NO: 99136 - DNA, 7341 bp, Homo sapiens
agcagccccagcaaaacagctgcgggagcgcgcgtccggaacgcgctcgcgcacccctcccccgcgccctcggccctgctgagacccggcaaactccggccttgaatgacagtgcgatcggcgactgcgcagcgcgggacgcgccggggcactgccgctttaagcacgcttgtccattgttcggaatcgagccaatgagcgagcgcccgctccctgcgctcagccaatagcggccgggcatgggaagccgagcgccgcccactaatctatattaaagcttctggcgccgcgtgagtcccccactggctgctctgaaaagccatctttgcattgttcctcatccgcctccttgctcgccgcagccgcctccgccgcgcgcctcctccgccgccgcggactccggcagctttatcgccagagtccctgaactctcgctttctttttaatcccctgcatcggatcaccggcgtgccccaccatgtcagacgcagccgtagacaccagctccgaaatcaccaccaaggtgaggctggacgccgcccgccccctcggggtccgcgcgccgccgctcgggcggtgtttggcgcgcagcagctggactgtctcaagcccgctgttgctccctctcgcggggaaacggcccgcccccggcgcggtgccctcaggcagcccactctttgtgtggtgcgggggagggggcgggaaccgccgcgggcagacgtgatgcccgtcggggagtgggccgggcgccctcgggggccgagggctaggcgcggaggccggctcacggccctcgaaactcgtctgtggccggtatgagtggcggcgggaggagaagagcctggctgggggtcgtcggcccgccgggcgcacggaaataactttgaaactcaagcgcgttgggaatcggaagtgctggggggcgcgtgttggggcgcgggccggccgcgggaagtggcggcgagcgcccgccggccgcgctgctctttgttcggcgccaggccggcggtttcgcgccctgcagcggacctgaggtggtttgtctagactaagtcccgataaggcggatggggcgacgggctggctggccgcgacgtcggccgtcccggcggaggtgtgacgggcttatccgctttgggcgctctgggaggcgggggtgggcgcccttcgaggtgagtgcgccgggagcggccgcccagcttcagtcatgcacccgcggtgccgggcttggctgaggaggcgagagcccacgcgccgcagggaggaaagagaaagtgaagcgcggcgctggggcgacgatgggcgccccccgcggctgcccgggagcaccgtgtgcgccgcagctcggggcgacgcgggccaacacggcggccgcgacaggccaatggtagggtcgaactgggggggcgcccgggccccgtggcgggttcactgccctcggctatgaggtcctgcgcggctggtgcggctccgctcctgttgtcggcgccgcctcggtcccactgcccgccctgggtagcgtctccgcccttggcgggagcggggcgctctcagactgactggctctttcttaatatttcggccctcgtccgcgcccgtcgtgcccctgcagggattggcgcgagtcaccttggcgtctccttaacccttgtgtccctggcgtcatctctgactctcccaggggcgacttcttggcagagcggagctcggggcccggatctccacaggggctctcagtgaccccttctggactcagtccgggaatgagtttgtggggtgagaacaccgtccccagtgcggggcctggctgttcgattttctccgaagcaccaaaaggtgacttcccgcgagggcgatgagtagtagcccgagaggcgcatccccgacagtctcggacctacgcagcccggtggactttggggcgacctcccgtgggacttggcccgccgaatgcagacattcgggcctgccggggtggcggcagtggggcgtcgagtcgagagcccggccgaccgacgcgcgacccgcgcgcgtgccactgcaagctctgcctgccggccgggagtctccaaggcaagggacgcactcggcggccccgggccacgtgctccctgcgcgcggtgcgtgccgaggcccgcgcgcaaagcccgccgggcgggggatgcgcgcctgcgcgccgcgacctccctgcccccactgctccccggggcttcggccgccagggggcgagagcgggcggagccggggtccgcggagcggagcggggcgggccggactgagagggccgacaggtggcccggagccgctcgccggacagcggccgaggggttcccgcaggcccggacgccggacctctgttggtattggtggccgtgtcgtgtggaaaaagttaccgggcgcccggggccgcgctgccttttggatcccgggcggagtcccacccccgaggtgctgtcgggatccctagccgccgcggggaggccgggagttggtggctccggcggcaggccccggcctggggcaccgccaagcagcggtttgcggcctctaggaacagcggtcggatttggggggtcggtgtgctttggcttttttagatacctgtcctggccggggcggtgcggcctcgcgggccttccaggctggcgcgcctgtggggctctccccgagcgcaggcccctctctctttgccttatttatttttggaacataacctgccgcctttctagacggctcgaggggcgggctctttgcacttggaagcaggctgatgggcgtgagtgtccggggctcgtccacccggccggacgggctgggggctgtggcgccacatggctcctttttcctgggaagcgccagggggcagtgggaaccgccaccggggccgctgtagcgggccttaaaggatgggaaaccttgatcacagatgccccccgccggccttccttccaccagaccagtgggagagggaccgcaggggcatcaggcctttctcaacatgcgactcttaatttgggacggacagaacagccgtacagaccagtagttctcagcgcctttgcttaccctgggttgctcagaagacttactggttactggttccttcttcccttttgaaggacttaaaggagaagaaggaagttgtggaagaggcagaaaatggaagagacgcccctgctaacgggaatgctgtgagtgtctgctttgctcctgagccctggcagctaccgccccacaaaatttttcctgttctactttaaacatacctatatatgtgtgtgtatgtgtatatgtatagctttgcacagtggcagtatcgtagccaatgagctttacccgaggcgcgattattgctagttaaatatttataaaaacctttcgagcagcgcctgaacaagaataggttcagaggagactccggtagtctgagtttgggcttggcccagggtggggaaaagcccttgtcctggggcagttaatgtgcaggtttcatgatggagcctggagggtgttgactggagaagggtctctggggtgggcttggcttggctgggctgtagatgcagccgccagcctctggtgggaggccgggcatcaggagcaacgctctgtccagcctggggccagctggtaatgacatggcctgttttctgtcgaggagaatgaggaaaatggggagcaggaggctgacaatgaggtagacgaagaagaggaagaaggtggggaggaagaggaggaggaagaagaaggtgatggtgagtagccttgtctatcttccccttttcaggtactttttcctggccttgtctggcagaaggggaaggaaggaattggggctcctgggagtgggacaatggtacttggggccagtggaccacatggccctgggcacccacctgtagagtcagggaaggtctccctgacatggagttgtgcccatgcccactcacactcactcgcacacctgaaagtttctttcgtgcagctctgaaagccactgatctattgggctggccttttggggtgcagctgcttgggcctctctcctctggagagtcccacctgtgtagtgggcgtgggtgccctgattgggcccagttgcaggcagtagaggcagggcagggaccttgcagtccactacatgttcctcgggatttccccaggagccacagtaggagggaagtgtggtttacctggcctttgattctctccaggtgaggaagaggatggagatgaagatgaggaagctgagtcagctacgggcaagcgggcagctgaagatgatgaggtgggttctggcttgagaagaaggggggtttggcatctgggtctccccacctgcctttagctgaggtgctcaagctgcggagggactgtttctgactttgtaggtggccactgtgtggtcctgaatcttaagaacaggaaggaaacagggctgggctcaacttcccagaggccttgggctgtggagctgggggtccctggttcttgctctgccagcaggagctgaggcagtgggctggatagggctcctggggttggaggggcctttgacagtctttctctgcttaggatgacgatgtcgataccaagaagcagaagaccgacgaggatgactagacagcaaaaaaggaaaagttaaactaaaaaaaaaaaggccgccgtgacctattcaccctccacttcccgtctcagaatctaaacgtggtcaccttcgagtagagaggcccgcccgcccaccgtgggcagtgccacccgcagatgacacgcgctctccaccacccaacccaaaccatgagaatttgcaacaggggaggaaaaaagaaccaaaacttccaaggccctgctttttttcttaaaagtactttaaaaaggaaatttgtttgtattttttatttacattttatatttttgtacatattgttagggtcagccatttttaatgatctcggatgaccaaaccagccttcggagcgttctctgtcctacttctgactttacttgtggtgtgaccatgttcattataatctcaaaggagaaaaaaaaccttgtaaaaaaagcaaaaatgacaacagaaaaacaatcttattccgagcattccagtaacttttttgtgtatgtacttagctgtactataagtagttggtttgtatgagatggttaaaaaggccaaagataaaaggtttctttttttttccttttttgtctatgaagttgctgtttattttttttggcctgtttgatgtatgtgtgaaacaatgttgtccaacaataaacaggaattttattttgctgagttgttctaacaaagctgtctcaagcctggtttttctgtttcagtttcttcagaccttccagggcacaaggataggagggggaggatcctggggacagtgggttgacattttgggaggcagttggatgtgtcctgtgatgggcagcagagtctggtgggtgggcagggactgagctgcagttggctgggggggctgctcactggggcagtcagtgattgccccaagaagccttaactggggaggaggacttcatcactgggtgccacatggggaccctggtgccctgggggtgggggtttgcagtcctagacactggaaacgggccacacgggactgccattatgtggagcgcagggtgctggtggtataggccaagagggaacttgccaagcctcccaggatgagcgtccaagtggtggctgcctctgcaggcctcacaggtttagctccatgacgtggctccccctgctggtggcacgtggtaccccccggcctcttagaatgccggggttttggtttggcactggtgcagcctggcagtcatccaacctttggtctccaggtcccttaggttagttgggcaggcccaccctgccccttgaacacagttggagaagttactgtgccgtttggatattcatacacgggctgtgagcagtgggtcaggatagccaactggaggaagtgccaccagctcgtgccctcagaggtggaggtaaggattagagctcacctagaaccttctgggatcctccaatgagagctgcaggggcaggggccggtataggcactgctagtgggcctgttgcccaggtaggacctgaggaagccatccagtggtatctgcaggaaaactcccaggagcagactgaagtgtctgcagaggcctggcctgggttaaggggagatgctgggaaggagggaaatgtgtgcattgaagagagcaagagagaccagttccctctacctgccccttgacaccgtgtccaccccattccatgcccccccgacctttgtgtttcacaccaggcaccagagttctggggggacctttcccttctctggctggagcttagtcactctcatggggctgctcaggccgcttgttcagcatgtccccaggcagctgccaccaggatcgggggcaggttgaggccttggtaggagggaccctctgacctgtatctaccccacaccccctgcacagcctgggtatctgcatcctggctcatccagggaagaaagggagggtctggagccaaaacgctggctcctctctgttctgccgcccaaggcgactcagtactgcagtgttcccaagctcggcgcccaggagggtgtctctaaggcaggagtgcaggcgaaggccgtgaaggaaggccacacagggcaggtagcgcttggagctgagagcagatctaacccagctccctcaggctgcagtcctgctcgggaccactaccgcaaggcccctgaaaggggagaagctgtgccctggtccgcacacagacacggcaggcatgttagcatgaggcaagtaactgaaccttgtgggcttcaatcccctcctctgcaaaatgggaacaataggatgaggcatgagccagggcccagggctgccttgctagggtccccctgagacacccatatcagcagagcttactgcctctgctgtctgagctgcctcatcccaccaaaggtttggcctggaacagcatttgctggttctagcagaacacacttacccctagtcctgagcctagcacacaattaaccactgcctgaggatatacctcagggcccagagtcaccttgataccactcccaaagtccccgaatgacctcccactggagcccaggttaaaagattatcaaggaatgggcgccccctggtggacacagaggaactgtaaagcgtgccgctgaattctgtccaggaaagacccttcagtgggccctggtcccaaggtaggcaacgccagtcaccctccacctgactcccgcaacaagacctttctccctctctgttgctggaacccca

SEQ ID NO: 99137 - DNA, 1050 bp, Homo sapiens
gtttcaaaaaaaaaaaacagagggggccactacaaagcaatttgagagttctgtgcttgtgggtgaagtttatggactgtggcattcactatagagtgatcttcatgagttgtttccttggggtacatctgatatttgtttctttaggtattttatcttggttggtcagatcctgttggtaaattttaaattttgcactattcgttttctgtccctttcttgcagtctctaggtgtgtgcagtcttaggattctcatagataaaagtaacttctctaggtttctgcttcttcctttagatgtctttttgactctcctcacattcttatgtgcttccatggcaatgagcagtttgacaaactttttaaaaagtaaacaagagttggtgggagtaaacatgagacacctagaatacaaagtgggagtcactttcagtgccttatttttccttagtcatatttgatcagaaattggatgaaccttcgggatgctgagacagggaagatactctggcaaggaacagaagacctgtctgtccctggtgtggagcatgaaggtactttccaaccctttatctacacagggctgtgaccaatgccagactagcacctgagcataagagagctaagttaacacatacctaataggcgggtgagcccctgaagacacagcatgttaatccatgtgttgttgacagtttcagttactttctttttttttttttttttttttttttgagacacagtcttgctctatcacccaggctggatggaatgcagtggtgtgatcttggctcactgcaacctctgcttcccaggttccagcgattttcatgcctcagcctcccgagtagctgggactacaggcgtgcgccaccacatctggctaatttttgtattttgagtagagatggggtttcaccatgttggccatcctggtctcgaactccggacatcaagtgatctgcccgcctcagcctcccaaagtgctgggattacaggtgtgagccaccacgcccagccagttactttcttaacagttctttctctca

SEQ ID NO: 99138 - DNA, 1188 bp, Homo sapiens
tcactgcaacctccgcctcctctgttcaagcgattctcctgcctcagcctcctgattagctgggactacaggcgcacaccaccacgcccagctaattcttgtatttttagtagaaacggggtttcaccatgttggccaagatggtcttgatctcttgacctcgtgatccgcccgcctcggcctccaaaagtgctgcaattacaggcgtgagccacgacgcccagccgagacttttctcgtatagcagcaaaacctagacagaatctctccagagggtaaaatatagtgttattacacacatgatgattccagtcagctgtgttgtttagggttcttcactgcaagctattcaaacaatgggaaagggtatctgaggcttttggagctgcctggaagttgaaggacagggtctgtagcaaagaccacacagtaggaaagggcaggttggcatgcccctgctgcccccaccctgaagaacttccaactccctcgaaagtcctgtagcttcaggaccccagaactgggtagcacgtgtccaaggctaggccttcttgtgctcacccctgattatgccagggctgggagaaaaggatctggcctttctagctgctgtagtgcaaagcagtcactgccttccacaaggtagagactctcttctttgggaagagagtctgatcacaagatagcaaaaaaagaaaaccaaaaaaaagacacatgtaaactatatctatattatacatatatttatctgcagctcagtctcttcgcaaatattaacgatcttttgcagacagcctctgtgcttgcataatgttaattttcttttcctttaatggtttgtcaattgttttttaaaacaaaacaaaaaaaaccttagcactctcttcttaaagttagtctttatttttattaagttgtatgtgttcatcatttaaagaatcatagtcagccgggcaaggtggctcacacctgtaatcgcagcactttgggaggccaaggcaagcggatcacctgaggtcgggagtttgagaccagcctgaacaacatggagaaaccccatctccagttaaaaatacaaaaattagccgggcatggtggtgcatgcctgtaatcccagctactcaggaggctgaggcaggagaattgcttgaacccaggaggtggagattgcagtgagccaagatcatg

SEQ ID NO: 99139 - DNA, 1045 bp, Homo sapiens
tcagttggccagactggtctcaaactccccctgacctcagatgatccacccttctcagccttccaaagtactgggataataggcatgagccaccatgccccgccagctttcatttttttaagagttataatttgaaggagttgagtttcttcccaatactatagcattttttaaaaactgggtgaaattcaggaatctgaatgtagattttgacaggattcaaggcaatatccctgtgcctccaaataacctgaaagaaacagtggcccttttgggaacatgcccttgggaaaaggccttgtattatttcttcctcagtcaggaggtgctgggaagcaaataaaagtgcaaagggagcctctaagaatctctttggatatgtctcttctagcttgtttctgaccagttccaggcacataactgtacatgtcagtaggataatgggctgactagaaaaaagaaaggtttgcgttattgtttgactttgctagggagaagactgtgttatgtttcaaatactgatctttttctcattactaaattacttgcctccactgtttcccaggccagtttgaattttgattgtatactttccaagcatagtaactttgccagcacaagagtattatttcacggggatatcaccactgattacaatgctgcatattatgtttcaaggatactgaaacctgggttctcagagatccatttatattttctcatcttatcccccataaatgggaaaatcactgggaaattattgggtggagaaatgcatttaaatgaccgtgaattagaattggtccttaagaaggaactaaaggcagaatgctctgtataaccaacactaaggcagaagcataagagggctctgacataagtggtatttaagaattaatgaagaaagtgggagtaagagaaggaaatgagttcagaaaggaaacaaggaggagagagtttgagaggggagagatcataaaggcaaagtgtgaaaagatagagaacaggaagaaaaaagccacaaccaaaaactatgaaaacagag

SEQ ID NO: 99140 - DNA, 1055 bp, Homo sapiens
ttatttttcttatttgtagatgttctttacatattgtaatatcaatcctttgcctattatgtattttgcaaatattttctttcaatgtattgtctccttttttgttgaacagaatttttaaattgtcatttcaaatttattttatttcatttgtttgagacggagtcttggtctgttgcccaagttggaatgcagtggcgcaatcttggctcactgcaacctccgcctcccaggttcaagcaattctcctgcctcagcctcctgagtagctgggattacaggtgcatgccaccatgcccagctaatttttgtatttttaatagagatggggtttcaccatgttggccaagctgttctcaaacacctgacctcatgatctgcctgcctctgcctcccaaagtgctgggattacaggcatgagccaccgtgcctggcctcaaatttattaatatttgccatctggcttttgcattttgtatcttgtttaaaaagatctttcttatcccaagattaactaaatatcctatcttttcttctcttttcaatgtttagctctttaatccacctggaacgtatttacacatttggtatgtggtagacatctaagtacttctgctgtttggatagccaatagttccagtactatttactaagtagttagtccatcttttcctcactgttttgaaatgccatccttgtcatatactaaattttcataagacataggtttttttttggattatttctgtttcattgatctatttgtctcttcttgtacctatacacatttgattgaattattatagctttataatatgatttagtatagtttacaatagaatggtctgtgactaacataatatgtgtgtttaaggtccctacaaatatgtgccccttttgttcacatggaagcttgcccatatgcccatagtagatagaaacatgaggacttggctgggcatggtgactcacacctgtaatcccagcactttgggaggcctaggtgggaggattgctcaaggccaggagttcaagaccaacctggccaacatagc

SEQ ID NO: 99141 - DNA, 1035 bp, Homo sapiens
cagaatcttgagaagatttgaactccttccaatgcttaatgctttgtatgtgtgtgtgagagaaaagcagttcgttgggcatgctgtatagaaagtaaaacattcctgagagagagaaattaaatttggggctttaataatcttgtttattttttcccgaagaaccagagttggtagagaccccaggggccaagtaatcaaatagtacagaataaacagccatggcatctttgacacatgctcacccgtcctctgtttgaacactacagtgattggtagacagtttggtctgtggtgaactttttttttcctcttcagcttgcggaaggagctaatgctgcttatttgcagttgttgaacctgtttgcctatgggacatacccagattacataggtgagttggtgaagatccttcaaaagacttgtgttaattatgttgctcagtttggaagaccatcaaggtttgagatataaagcatggggtagtggggagacttcttgacctggctgcctcccattttgctgtgcccggtgggtgacctcacaaagggaatgttccttctcaccttttatattctagtgggtcaaatggggcctgtgtgtgctcatccacaaatgtagcccttgtttgttttccagatgagattcttgaggactggtgtttgtagggctcttggagtgctgtgaagtgcagaatacccacctgtagaatgtttcaacattttaaatattatcaaaataataccagcatattgaagaaaatttggaaaatagactttttaaaagtcactcataggctgggcgcggtggctcatgcctgtaatcccagcactttgggaggccgaggcaggcagatcacttgaggtgaggagttttacaccagcctggccaacatggtgaaaccctgtctctactaaaaatacaaaaattagctcggcgtggtggtgggcgcctgtaatcccagccactccggaggctgaggcagcagaattgcttgaacctgggagatagagactgtagtaagctgagattgca

SEQ ID NO: 99142 - DNA, 1040 bp, Homo sapiens
cctccccatccctctcctcctctcttctagtagcttgtacctttcttctggtagttctgccttggatttgtagctatggaaacatctgattgtaagaccgaggacaagtccagggccatgaagttgcacacctccaggtggttggtggccctggagttgtgccatgcagcagccctggcaaagcccatcttgttcatccttgattcttctcagtacagagcattgcacacaacagatgctcgatgaagatatgtttaatttaattgaatgtcacaaggggcacaaatagtactccattaagataattgccacatcattttgcttgtttgctttttaggagactaaactctgtgtttgtagaaactgagtcttttcttctttggaagtacatagtcttccaaagaagacaggaatatttgtcaaatgaataagtgcaaagtcatgatagtgattcagtagtagatttggtttggggagttggtgagcttattccataaaagaaatcctaattttattttgtgtcttgatttttgtggtgggtgggactgagcagccaacaaggagagcctgccagaactgagcacagctcagcagaacaagctgaagcatcttaccatcgtgagcttggcatcaagaatgaaggtacggtactgagccttctcttgtcttcctccttaccccaagtcagctgtctcattgacatcaatgaaggaagtcccagctgcacataggagagtcacatcataaatgcataaaatttgcttgacagaggaaaagataaaatggtgtagaaaagtactccccattccatacaggaaaagtatgcccagaagtgattgactcagcaggtcttagtcctggcatgctgtggtgccgcatgtggcatgatcattttgccatattaaggggagactgctgttaaagatatacatttttcaaatagcaaggcatctcaaggcaagttaacagcttaatctgttgctcagtacacagtgaactatgcccatgctggaggaaaaacttgctatgtcggacttgct

SEQ ID NO: 99143 - DNA, 1025 bp, Homo sapiens
aatcttattttccccctggctgatcacttgccctccataacgttgagacaagagtataaatgtttttgttgcatctgacaagataaatctggtgaatatgaagtccgagaagttggtttaaaatgttcacgaccagggctgggcacggtggctcacgcctgtaatctcagcaatttgggaggctgaggagggcggatcacctgaggtcgggggtttgagacaagcctggccaacagggtgaaacctcatccctaccaaaaatacaaaaattagccaggtgtggtggtgcatgcctgtgatcccaggtactggggagtctgaggcaggagaatcgcttgaacccgggaggcagaggttgcagtaagccgagatcgtgccactgcagtccagcctgggcgacagagtgagactctgtctcaaaaacaaaacaaacaaaaaaattttcatggccagtatggggcagtggaaagctccagacttctatctcataggggcctgaggggcctggtcctaccacgggaggcccctcacgggaggtgacgtggaggattctaggtcagcagcaagagaaatagcccgatccatagtgggggcaaaagaagtggcaaccaagatgtagacctgaaagcgatgcttgagcagacctcttgatgacaggccatgcctggtttgttcacagaggtaccacaggacccggatctctgccaagtaccttatatacatcttctcaataatttacgaggtaacaatcactatccccatttcacagatgagaaaactgaggcttgacccaaggaaaggctgtcaggtgctagaggtgggttttcaacctctctgaaccacaggacctattacctctatacagagtggaaaccaacaaaatgccagttggacagatggacggacagtggatgccaggatgggtgctgctgaacgggaacggggacaggtcttttttgctggatatcctttggtgacttttgaattctgcactgagtgcttctttctaaaataaatacataaaa

SEQ ID NO: 99144 - DNA, 1091 bp, Homo sapiens
ccatcttggcctcccaaagtgctggcattataggagtgagccactgtgcctggccacgtagtcatttttcactcctaagagtgacctcttcttattaaatgacaatgttagtaaatatatattcacaatgtgctcaggcactgttctaagtactttacatgcattgactcatttaaatctcatatcaacctcatgaggtgatatgactatcattatctacatttcacaggcaaggaaaacagagaggcagagaggttgagtaacttgtccaaggtcacacacagtgagtaactggtagagttggatttgaacccagcagtttggctccctctgtcctaagtgctatgctgaattgctgctgtattggatttgcaacacaagaaatccctttttgttataccagcttcatatgaggctggtctctggcaggcagtaaggtacagaagaaagtaaaatcttgtacctccctcttcagtgaattccccaacaaaacaaaggtacaagcattctgggttttgtgaattgaatgccattctttttttctcttttaaagcgtaaaaattattagatgccacttgtagctggtgagatgtgtctgtgattaaaagagaaatttcaaaaccagaaaaaaatatgcaagatagaagacaggagaaagaaaagataaaataggatgatgacagaatataaaaattaagacagatttaaagctaaaaacgtgggaataaaaatgtagaaagaatagggcaacactgtaaatcagggaattttctaaaatccactttaatttcttattttttttttagagtcttgctctgtctcccaggctgaagtgcaatggcacaatctcagctcactgcaatctctgcctcccgggttcaagcataaaatccacttttaaagtagcatttatgaaattaaaaaagaaaataggaaagcactagaaaacaaaacaaaaaaattaaacctaaaaagttaagcataatatgttgataacatcccaataaaataaaattaacaggtaaaatatttaaaaagatgacattttaaataggaaccagaaggtaaaagagaaattaagctaagacctc

SEQ ID NO: 99145 - DNA, 1045 bp, Homo sapiens
gttgtcttgcatattagaaatagagtttataggaaaccctaagttgtctgggctgtgtgtttcaggccagataaggatagtttcttccaggacattcttcagggcttggtctagtctttgttaattgtctcaaagaaagagctccactatccctggaggaaggcagttttctaatctctcatctttctggaaggttttctttgtaataagatgtggcaattaaaatgtgccttattctttctaagattcttttaacgtcactaccatctgaagtaatatgaaatacatgtgtatgggtttgccaagattgcagtttccgtgggaatcataacattggatttaatcacatctgggttaatgaagcgtgcacaaaggctctgcatgaatataggttttatatttaatgtgcatctggaggcagcaaggtcttagtgatgtagtttccctgtaagtgacaagttgaacacttgctagctgaaggtttaaggtaatcccaaggctaggaactttgccacggaactgaggtcctgcaccttgaccctcagtttagaaggcatgcgtaagcactgggaatctggagctctttagtggagctggaggcccagcttatttccctggagtctgtagactttgggtttgttttgtctccatgagaagcagggattacagtgctggtgttttgacttctttttttgaagtggtagggagaagaagtacaccaggtctgtcatagttgtactttggtgttttgggaatgattttggtcatttttctttttctttctttcttttttttttgagacagagtttcgctcttgttgcccaggctggagtgcaatggcacgatctctgctcactgtgcgcgacctctgcctcttgggttcaagcgattctcctgcctcagcctcccaagtagctgggattaaaagcatgtgccaccacgcccagctagttttgtatttttagtagagacagggtttgtccattttggccaggctggtctccaactcccgatctcaggtgatccacctgcctcggcttcccaa

SEQ ID NO: 99146 - DNA, 1049 bp, Homo sapiens
gccagagtaatcccatggaattgggaggatggtctttggtccaggcaattcctgtttttctcaggaagaatgacttcttgtttatcagtatgtggttatttattttatgctgtcttattttaatactgtctagcttccaaccttgccttagatagagtagctatgtctgtcatagaaactggattcagccatagattgtaggacctatcttgtatacacctaggtccttaaagcttttgtttatatctcaggtgaggtcatcagaaggaagaactgaagaggtaagagcccagctggggtattaaagtaagagaaagaatataatgaggtattgtcagttttaacatgaagcctctattttgtggaatttttaaaaattatgaaacaatttgaaacacacaaaagtagagagaatagtgcattgagagaatagtgcataacccaaatttagtattttttgtacatttgccgtgtttatctttcttttgctgaaatattttaaagaaatcctgacatcatttatgtacatatcttaactatgcaatgtgaacattttcacatgtagtcaaaatgctgttatcacatctaatataaaatggattattctttactactatacataagactgtggaggctttctattttaaagtcctttgaacatgctgagattgttcctccttttctgtctttatacttgtcatactgtctgtctagaaggctctagtctgtgacctccacatggtggccttagtgacagtattatttcctcaataaaggctttcctgatgactgaactaaagtagtgtccctttcccccaccctgttggccactgcctccctgctctgtgtcactgcctgtgtgcttgtgtattgtctgtctcctcccctagattgtaagcgccatgagagtagggacctggtctgtcatggttattgctctatggccagggcctgaagcaagcctagcctattgtaaggaagcaaaggtttagaaacaagtcagctattagattaataaagattccaaaatttgcttaatattttataac

SEQ ID NO: 99147 - DNA, 1001 bp, Homo sapiens
gtcctggagttggaggctatggtaggtaagtcatgatcatgccattgtgctccagcctgggcaacagagtgagaccctgtctctctctcttttttttttttttttaaagagtaaaatcagctggagaatacttggggatgaattaaagatgaggggaatagatgtgatgttacagtggaatgcccagccacttagaagggagagatgatattcataacattaatactgggggtgatgagagaactttagctctgcaggcattaattaattaattactgcaacaaatgtttcttgacttcttactcagtgccaagcgtataccagtgagcaagttaggcaagtcactggggaggtaaggaaaaacaactaaagaaaaagagaagaaattatagactgatcattgctaataaagaaatgggaagggtgagagagaataattagagagagcctctttagtagggtcgttagggaaagcctctgtgagatgatctgtgggttatctgagatgagaatgaatcagccaattgaagaattaggagaagaacataggtggatagctcagctagtagaacagcagcaagcagaagaaggcttggtgtttctgagaaatgagaaggaagcctgttggaacattgtgagcaaagggagttatattatgggacaagtggagagttaggcagcagccaagtcatgtagggtctctaggctatgctggagaattggattttgttcaaagagcagcaggaagtcactgaaggctcttaagcaggggaagaaaataatctgtttcatgctttgaacatacctctctgggaattgtgagatgaatagagtggaagctgagaggccactcaggaaggtatcaaagtaaaccaggtcagaaaacatggagatgggaacaagaaagtggcagtaaagatggagaggagtggatggatggatggatgtggggctagaactgatgtgacatggtgatggatgagatatggaaggtgaggcag

SEQ ID NO: 99148 - DNA, 1010 bp, Homo sapiens
tgactgtttcttcaagaatataccagttgaaggaacttgattgtattaggagccctcatgtatgaaagacacagatttttaagcatgaaaatgtcactcaatgtagtaagttcatcctgagagacagctgggaactgggtatattcagacctcttgtctcttgtgcatgcttaagtttgctcttattgattggtgtgataaggggaactacagcattttgaaaattttgctgcttcctctcttccctgataacacagtatagaatttccctaagttaaatccctattgggttggctcctagcaagtgtgggacctaggacagaagtagaaaagaaggcacacataccttaaatcaaatattgaaaagttagacatcaaaaccaccatcaagtaaaatatattattctatatattccatgtaggaatagacaaagtctattccttgccaaatacaccttcatatacctgagttcaaatgtagaattctcagatttcttgcagctccatgctgaaacatggcttcacctctggcttgcccctcttcccttctcagtgctagctccctgtccccttgtgattcccttgcattcagtgagggccctttcatgcccaaacgtgggcatcctatcccatgtatctaagctatgtccatacccattagaaatacctgccattgagtggaggcacccccattgagggggtgcctccggtggtggggaagtgcctgtatatgtcctggaggtaggctttgggctgcttattttagggaagcacatccatttggccctgtgaactccttgtctgatggggagggttgtggctggagcagggccagagcagaggtcctatggttcctgcaagctaaattcaagtaatttacatctgcaaatgatgtatctccatggtgtaacctggcttgttaaagaaagctaagacacaaaagcaaaaggtggtgatgttttaaaagctcatagttgttctcttacttaaaattgtattcttactacgtc

SEQ ID NO: 99149 - DNA, 1720 bp, Homo sapiens
aggccaagtaacctggcatcctttctgcccttggacccaggcaagagatggccaaaataagcaaacatatgaataagtaagtctgttgcattgttttccttgtttctcaccccctttattgataagacagtcagcacagcctttcctgtgctgttagaagtgctcttgcttcaggcaggaagtctaagacgatggggtagattgttaaccaaagcttgggggtaggttgagggttaaagtgtttgctgttgttgaggtctggaggaaaggtttgggacttgagcattcttgtttctgccttggtgccttttttcttggacaaaaatcagtacctcttttaaaactgaatacaacaaagttgtgtttctccctagaggcctaattttatgaatttctaggtcataaaattagcttagtgctacctacttctacaaactgttatctgtttaactagctcctacagaggggctgctggctgcctctgaagctttcagaagatttgaaatgtagagggtagccccgggttccttattattttgtttctgtggagctcccgagagtcttcacagtggctgcctgacaattgctttttgtgttaacgtcagccccattaggtacatctctcaggcctcattagttagaatatttcacagcttcttattctgaagtgggggagttctgttgtccttagcccacctgtgatagttgttggtgacagggtcaaagtagggagaagagaatattcggactgtcatcaagaatccctgacgtctagaatataaacatctccaaacatactggccaattgtcttacaggtttgttagtacaaaagcatattgttatcaaaggaatctgtagtcactagcgtgagccaatgtggattaattggattattcatctttgcttctttctgcttgtcgtgctcactcctcttgggtatgtaaactacagggcttttggggttttagaaaaacaacagttcttttcgttgtagtagtaaatagtcaatttatttcacagcatgatttttggcaaaatagatagctgtatgagtatcaagctgtgaggcaataatgaaaaataatttactcttatataactcttcgaagttcagattcttccacatttttactgtctccttatactttttattacagacatctaatgaaagatagttgaggggcaaatgatagtttcttcctttgtcaattggaatattaaggtactgtgagagtgactggtttgaggactgagagtttttggcagaaccagggatagaatccagatctcttgacttacagcttaatatccttttcctcagattttcaaagtggagatcatgtccccaaatggttaggaagcattgatcctgacagttctgcctggagcagttcaaggtacccagtggcttctcatctaccattcatcctgccctgtgttagattctagagatacaaactagaataggtcacaggctttgcgcttaaggagttcataggctggttgggaagagaatggaaacaattatggtacggtttgcaggatggaaacagaaataccacactgttatgggagaaacaaactctatttgaaagaattggggaagacttcatagaggttacattagagctaaggtttaaaggatgggaatagagaaagagagaggatttgttttatttcaagatgagaatgatttggcaagagaggattgtgaaaatt

SEQ ID NO: 99150 - DNA, 1066 bp, Homo sapiens
gtcgcaattttgggcagaggtaaagggcttttgcagatgttattgaagtccctaatcagctgactttaagttaaccgtaagagagattatctttgtggacctgacctcatcaggtgagccctttaaaatagcatccaggagttagagatttttcttgctgcccttgaagaaacaaactgccaggagttttatagctccaagaaaacaaattttgccgacagccacccaggcttccgttaggaccctaatcgttaaaccatagatgagatagcagccccagctgacaaacatcttgattacagccttgagatcaccactagagaacccagctaagccataccgagatactcgacccacagaagttgtaagataataaatgtgtcttgttttaaactgctaagtttgtggtaggtttttgtgtcgcatagaaaactgacatactagtgagactctgtttcctcatcttggttagtgttgtatgtgggcattgtttattttgtaaaaattcatcatattatgcatttatgatttgtgtatttttctatatgtaattaaaaatgagttatattacccaaaagtgtttactttaaaacaggagaaaaattaatggcattcctctgtatttcctttaaccagtacacaaatataatcaaatagttatgttgtaattgcaatggttagtttgaacacaagcagatttggtcacaaaattaagttaaatatttcttcccataagtgaactcaccctctgtccttgctctcattgacatgtcacttatattttacatctcctcctccatggtttcactatgagagtggtagagtcttgaagctggagatgtaatgatttttcactttcttatttcaaaattgatgaaactggaatgtgcctcaagttaagtattgagtagcaaagccagtacctcggttcttgacggctctaattctgtgcccatttcctcttatcatagagcttctggaatccaaaggaaatacaagcattttggtagtggttatgtcatagatgtagtttgatctgggtggagggtactgagtgggggagtaa

SEQ ID NO: 99151 - DNA, 1033 bp, Homo sapiens
atgactttatgtgaaatgtgaattagaaatgatgttgggttatatacagttactcagaaataaagtctccatggtggagaaggaactacctcattaaggacatgcttctttccctcaccactccttattcttcaaggtgctgatgctgtaccacacttgggcccaaacaaggttaaaacggcaacagccctttggtttataaagctaaacaacttttctttctttgtaaaagaaaacaacttctttagacagatatatttttttaaaattaggtcattacttattcagagatcataggaaatttgcttccagagtcatcctgttcagctacggggcgggctgggttggggggccgctatgccgagatgaaggaaagtcggccttggcttcagaggtggatgcatgttgctttctctggagtcatctcagctgagaggcagcttctccatccttgcctggtctagttttaggtggcttattctagagacaggcattcatgttgtcatgatccactagaagctcgaggctggaatcttaggtgtggaagtgatagtaggcctcttgaagggagagaaggcactaccacaccactgagtgaatgtttgaattcacagttcctggaaagtgggtatgtttagtatagagatgctctttgggaaagagcagattattttgcttctcagaggggtaatcaattactataattatttattgaagagtaatgtactactatcattattgttcaaactgcccctgatctgaccagtggtagccccccaagttgatctctgtgccatttggacatgtcctcatcgttctttgaacacttgtttatttcctggtgatgttcccacctcatcctgtaactttctctttgctatccctcgaatcagccattttttctaagactccctagttccttttaatggagatatccagactctcccaagccctcttaatgaacagaaactaggaaagacatgtatgtatctcccctccttccctcctttcttccttcctgccttcctatcag

SEQ ID NO: 99152 - DNA, 1026 bp, Homo sapiens
gggaagagtcaaatgtagttgcaaggttttcagcttgagtggcctggaagaagtagtagtggtgtttgaagaaagagaagaacaggaaagggaaatgctttgaggggaaggaccagagtgcttttgatgttttgagtttcaggtggcagtggccttcatggagtttgtgttgcactgggaaagatataataatattaaataaaatactacatgtagcatactcaatggtgatatgtgctgaagagaaaaaaaataaggaaaggaaatatgattttgggggataaggattgagattttaaatagggtgatgaaagaagacctcattgagagcatgactttgggaagaaacaaaggaagagaggaagctgtccttatggagatcttggggaatggcagtgcgttcctagtgtgctcaaggaatagcaaaggggctgaggtagagaattgtcagagacgaggtcggagggatccggggtgggggtgcagtcaggtagagcctttacatcataggtaggattctgtttctggctctgattgaagtggtaaggcttagagtggtaggagtagagaactgacatatcacttatgtttcataggctcactctgttatgttgggaatagactgaaaggaggcaagggtagaagcagggagaccccttacatggctattgcttacttccaggatggagatgatggagactaaaccaggatggtggcaatgaaggtagagctgacaagatcagctgacagttgggatgtggggtgtgtgtgtgtgtgtgtgtgtgtgtgtgtgtgtgttgctgtgtgtttgagagaaggggaggttgaggtggggtggggaaggaagtcgaatgattgattgataaggactgcacagggattttgggctgagtaattggaagaatggagagagattgttcattctttggctgttaactagataaaaggtacgtttggattagctaccctaagcaaacgaagttcccaacaaatacgcccttgaaaatgtctgtaaatatgtctttt

SEQ ID NO: 99153 - DNA, 1043 bp, Homo sapiens
tgtctgagttcaggaccttgcaattatttttgacccttccttccccttccccttgcttcaggttgttcttcaggatgtaaaggctcccaactgagtgtactgttattattaaatccttcactttacttaagctcctaccatgttccaggcacctgtgctaagagtttttcatttattatcttagttcccacaatagttttgtgatattagacactcttgtccccattttaaagataatgaaattgagattcaaagaaactgcttttccaaggtggcattgcaggtaagtgcagagccatgactcaagccagttgtgttgtccctagagtttgtgctctgaatcactccactctgctttcacacttcactgacttgacagtaaagtcccaactcattaagttggcatttagggctcttgacatcttgatcttcctttctccctcttgttgtatattttcacgattatttgccattcctaaaggagaatttgcattttcttatctctttgcttttccatatgttctttctcagcttagatacctctttttcatgtgtacctgtcagaatcctgaaggagacagggcagtgtagtggaataagccagggctccggagtccagtggatctgctttctgctttccctcatagtcctggtctcttctacaaagggctggaccagttcacattcacactagatatgtactgctgtgtgttcttgctagcatttggtattatcagaatttttgggttttgcccatctgtgggtttgtagtgatatctcattgtggctttaatttgcatttctctgactaataaggcagagcacctttccatctttattgctacatggcatctctattttgtgaagtattttaagccttttcttccatttttctattggattatttgtcttttattgatctatagtagttctttatatattctggatatgagctcctctgtggcttgccttttaaaatttcttttattatatcttagaataaaaagaagttttaatagagttgaatttatcattatttttct

SEQ ID NO: 99154 - DNA, 1004 bp, Homo sapiens
gagaagcccctttatgatacttcctgtgtcctttagacaagacactagtagccattgatagctttcttgttttcccagtatgacaggaggttccagggttgtcttgtccatttcctgctccagatttgaattagccatttctctaaggagtcccacacctttactttttttgtttgttttgagacggagtcttgctctgttgcctaggctgaagtgcagtggtgcagtcttggctcactgcaacttttgcctccgggttcaagttattctcctgcctcagcctccccaagtagctgggactacaagcacatgccaccatgcctggctaatttttgtatttttggtagagacagggtttcgccatgctggccaggctggtctcgaactcctgacctcagatgatccgcccaccttgtcctcccaaagtgctgggattgcaagcatgagccaccgtgcccggcctcacatccttacttttaaccagtatgcaatatgagatggttagagagtacacaggttttgagtcctgtgatctcataatgatcttttccccccataccttttgttcttttcttatgtgttttaggataataacatagaataaaatgctttaaagaagtaacacattaatttatattttaattgcacagttttgaatgacttaatttattaagtcctattacctcaggagtctccagcccctgggccatggactggtactggtctgtggcctgttaggaactggaccacacagcaggaggtgagcagtgggcaagtgagcattaccgcttgagccccgcctcctgtcagatcagcaggggcattagattctcgtaggagcatgaactctactatgaactgtgcatgcaagagatctaggttgcatgctccttatgagaatctaatgcttgatggtctgagatggagcagtttcatcccgtaacagccccctacttctggtctgtggaaaaattgtcttccacaaaaccagtccctggcactga

SEQ ID NO: 99155 - DNA, 1080 bp, Homo sapiens
cgctctgtcacccagactggatggagtgcagtggtgccatctcggctcgctgcaagctccgcctcctgggttcacaccattctcctgcctcagcctcccaagtagctgggactacaggcacccgccacaactcctggctaatttttttatatttttagtagagacagagtttcaccgtgttagccaggatggtctcaatctcctgacctcatgatccgcccgcctcagcctcccaaaagtgctgggattacaggcttgagccaccgcgcctggccaataaagctttatatttttataagaacattttataaactcttgttcacacttaattttgttttttttccacttcatcttgtattcttgtggtttccttggtttcctttaggaacactgtggcatactttgttgagttcttttatcattccctaacttactaattgttcctatatggtgagggtttatgaagcagcatggtactacttctggtattcagggcctttggggagaggggatgaaaatgtagatcagaaatatgagaagtggataaggcattaatttggggcatcctgaagagctgagtgtcagcctggctttgctggattgattatgtgcattaggtggtctgtgcttctggaaaataaagatccttttttgaactacatgattagtgtccaataccgttagcttctgaatatgcagtttcttccttagaaaagaaaaatctgctcttttttttttttcctctctcagtgatttagcagaatttttctgttttctttaggtagttaaaccagagagcaatgacaaagaaacagaagctgcgtatgaatcagatatccccgaggagctctgtggacaccatctcccgcaacagtccctgaaaagctataatgacagtcctgatgtcattgtagaggctcagtttgatggcagcgactcagaagatggacatggcatcacacaaaatgtgctggttgatggtgttaagaaactctcagtttgtgtttctgagaaaggtgagtactagactattgtcttactttttttttaagtacactgattaagtattggaattccctc

SEQ ID NO: 99156 - DNA, 1068 bp, Homo sapiens
gccttgcctacctttgcacttccaaatacatgagctaatttgtcacctttgatgtgtaagtcagttggagttgaattttctgtcatttcagccaagagcaactaagcagatacaaaggcactgatagacttcatgttttatataaggcttttgagtttctgatgggcattgtcatgaacaaattttgtaattgagggagagggcttctttgtggtaaaagatgatgtgaacaacctctagttccactctgctgcttgcttgccaggtaacttggacaaatcaattttcttcttagatcccaaggttttcatggggctggaggccattatccttcagcaaacttcacgtaagtgaggattatgctattttacaactttaaaaataggggcctgagtgggtttatacacacaccaggctttatgttacttgctggggaaagaaaagtgaatacaaagtaaaatctggatactagtcttcgggtgcacttagtccttaagaggagagaccataacagatgtgctctggatcttgcctgctgtagctccttcagtgggaagtccccttactgaactggtaaatacagtctgctcttgtccccagggccttgcttagaccatgagtagactcctgtcccaaggaaaaccaacacattgactggccagtgatccactagatatttttcttcatggcttgagagctctggagctgagatgtcacatggagttagggctggaaacaaagttgttagggaacagaggctctagcaactgtagacagtggcatgtagacaagaggaacagatttgcaggcagaaggagggaccattcagagaggaagggggacaaggtaaaaggaggtatggtagaaaaagggagagaaaaaaagaggacaatgtatttcctgggccttgaagggtgagtagggcttgccaagtgaaagaggatgaagaatattcttggtatgaacagggtcacagagctggatgataggtagagtaatacctatagtgggattagtacaggatgcacagtggggagtctggaaaggaggctagaaaaaaaatgggct

SEQ ID NO: 99157 - DNA, 1059 bp, Homo sapiens
aatacctggagctgtacttccctgctggagtcccacatgtctttataagacacaggtcatggtaataaaagcactttgatttaattcatccatgtattgcataatttttcttggatatgtatgcctactaggtacttcttacaacttaaatatagattactaagtcacagatcatcactgagaggcacttattttgacctagaaaaactgctggttcctgctagttgatcaaattataacctgctgacctctcccaagtgtaattcagttctgcagataaacaacattgactatatctttggtgtttttaggtggtttacatcttggagaaaaaacattctcgagcagcaaccggcttcctcaaactcttggctgataagaacagcgaactgtttaggaaatacgccctgttttctccctcagaccaccgagtgcctagaatttatgtgcctctcaaggactgtccccaggactttgtggcacggcctaaagattatgccaacacactgttcatctgccgcattgtggactggaaggaggactgcaattttgccctggggtaggtgatctctggtaggaaaaaccacaggtcacaggcagaactcagtttaggtggtctttaggtaaactttttgtgtattttaattattatttctttattgaagcacggtttctggtgtattttggtcctgattcttcagaagtcactcttagctgccacctcaactgattgcctgtatgttccttgaattaccaggcagtcacattcttgtttttgttttttggcgtaaaacatgaacattccgagcctctacttatttagttatgtcatgtgtcctatttgtacttgtgtaccacagataattcattgcatcaaacaaccagtcctctccttgcagatgctagtgttaaaccatgcaaagtctaggcatattcaggagaccccaggctcctttgctttaaaatatgaacatgaaggtatatttaaatggcattctttttcggtattgattttgcctgtggcattaaaaactaccctattgtaagaaggaaaagggt

SEQ ID NO: 99158 - DNA, 1024 bp, Homo sapiens
tgttttctaacttctttgcaatgaacgtatattacttttgtgtttagataaaatattttaaaattttaaagattaaaaactggtagagttgtgaaataggaacatcagaattaatctagtaagcatgacttaacgtacaggcactctgaaactaatgatttaatagcacactggattgatcataatatcaattttgacttctctgtgaagaacaattggaggggtcctaaggaaagccttctggctctgtttctcaagtcagaatgtcaaataaaaaaaggtgaaattacactgtagttaccgatttaacaggagaagagcattactgtgtcttctgctttcccattgccagtgatttacggatgatcatgtttctactggtggaagggcaggagattttaaactttcccactactttacttttagagaggagacaggtacctatgttccatttgtttgctaacccagttattccgtttctgttctatccataggcagctggctaagagtcttgggcaggctggtgaaattgagcctgaaacagaaggaatactaacagagtatggcgtggatttctctgatttctcttcagaagttctagaatgtcttcctcaaggcctgccatggacaattccaccagaggagttcagcaagagaagggatttaaggtaagcacctgaaaccctttaagaacgtatatctccctttctgccttaactttcctaggggctaggcttagatgttttcatctttccacgaacattcaagttcagttcagttgggaataggtgcttctgtaccacagttggcaaattatggcccacaggctaaatctagcctactacctgtttatgtacaacccatgagctaagaatggtttttacatttttaaatggttggaaaaaattaaaacaagaataatgttttatgaaaattatatgaaattcagatttctgcgaccataaagttgcattggaacatggccatgcttattcattatctatgttgcttatggctgtttttt

SEQ ID NO: 99159 - DNA, 1010 bp, Homo sapiens
gcgaaagccagattatagtcaactgaggaggtgaaaaagtggggatcctaaacgtaaacatctcttttaaggaggtttgctttgcagaggaagtgagagggagcttgaaagaagcagggtcctgaagatatttgtgcaaattggagagatttgagcttgctggcaagtggtgggtgaggagccagtgggcgacatacacatttttggactcctttttggaaattgccttcagagcctgaggcacattttcaacaatgggaaatcttcatctttcgagggtggatttaatttttggaagcagccaagttaattcagagccaagggtggtaaatcaggtgggtgatcaagctggataacacaacttcaaaaaaaattataattataaagtagtaacactgattttcttgtgaagctcatgaattggcttagaaagtaatccttaaaaaatcacaagaaccatttgagcagttgtagcattctctgaatagtaggtgtatggatttgtaactttgaggacactcatttgtgtggaagttctattatatatgaagaaattggcctagttacattgtgtttactcctagtgctcaaatgtaaagttgccatgtagtctttttgcctgagaggtgacttagtggagttataagtttatatatgggagaatcaagagtttcaaattgtgattgtttaaacagttctgtggtcttacagatgtaattagaattcctaggataggagtgttcccacaagcataacagtactttaaatgtgtgttcagttatccctttctatagtcatatttcatcgtttctttttgaaatagagttattttgaaaatattaagtcgctactctaatcttgaatgtctgtcagacctgagacagagctgggcacatagtaggcactcaccgaacatccctctcctgtcttctctaccctagtgtttgttatataccaggggtcacactaagagaaaaatcagttcatagctagtagatcatcttccatgg

SEQ ID NO: 99160 - DNA, 1073 bp, Homo sapiens
acctcaggtgatctgcccgcctcggcctcccaaagtgctgggattacaggcgtgagccaccgtgcctggccccaaaagggtttttgagagcaggatattcacatgatctctaagtctcattctgtaggtttcttattatttacaaagggtaaaaggtagccttaacatacacagttctagctattagcaccttaaccaagtaatccaacctggcagcctaacattttgtgccttctgaaggtatgcacatcatcacctgtgaaaatttgaggccagaatgttcaccatgaatctagtcaagcctttttacccaactttccatttataggaaatacagaggagatgaattttgtcacatttgatttatttctgtctatccctttcttcctccttctgtgaggaaacaatctaataaatccagaacataagacgctttacaagacaactgacctggactcttcagaataaaaaagcaatgttatatttgaaaaacaaaagatagttgagcaagaaacaggctaaagagacataactaccaaatacattgtggaaactttgattagatcctggatcaggaggaaaactaaaagcaaaagagactttttaggaacagtcaaagacatttaaacgtggtctatgaattgggtgatatgaaagtattaatcttgactgtggtgttagtgttgtggttctatggaagaatgcccttagttttggacaatgcatgttaaagtatggagagggaaagtatcaccatctctgtgacatacttcttggtaattcagatgtcaaaaataaacacacaaaacaaccagctagacacaggaagggagggatggaaggaggaaaaaagataaagccaatatggaaaaatgttgaaatttgatgaatcttgatgaagggtatatggatgttcattttactattctttcaactttcctgaaagtttaacattcttcaaatgaaaattaaggggaagaaaatgaatttgaacatattttctgggtttaaaccatggctttcctggcccatcccttgatctctggctcccacagtcccagacccgtcctgtc

SEQ ID NO: 99161 - DNA, 1033 bp, Homo sapiens
ttgtgtaatgcttagacacaattgcttcatttgttttgtccattttcatagttgataatagcagacggatacatctactacctgttcctctgtctcagctggcctggaaccctgcaccttgcagggtctccagggagcaggcacatgtcctgccgtactcactgcatacactgtggttttatgtctagggcccaagtgtgtcagcagaggtttcataaaggaagtggtcaaagatatgataggaaagatagattggggacaaactcgggacaaattttcagaccaaatagtgttttttgtttgttggacaatggaaaggcaagcagatgttgttcagcaagagagcattcaaaaagaggaaaataatttagcattgcaaggaaaaggagagaaactagaggctggggaatgagtcagagaaatattgcaatagttgtggacctggactagatggtagcaaaatcaatagggggggttggagtgggaaggacagatgtgagaaagggataatgacagaagaatctatggaaatgaatgttggggttgagggagaggagtccaagatggtgccaaggtttcaacctggatgactgggagatggaacccataagttagaaatgggaatcaggagtacaagctggtttgggagagagtatgttggcatggagttgtctgtctgatgttatttatgttagttgctgcaaattctttgtaggggagctgaggtgtgtataaacaagctaaatagatgcagtccgtggaactatatacaaagagcccgggaggagaggaagcaatgcaccaaaatgcagtgatttcattcgaatgatgggatcataagtgattttttttcctttctctagttcccaaatttttataatgtggcaataatagttgtataatgaaaaaattttgtaatacaaaaatattatgaggtgccagaaatcacaggccgctcagtagcctactgcaccaggtgatcagataccttccatccacttagtttttcttgcattcctgaggagcagtttgg

SEQ ID NO: 99162 - DNA, 1023 bp, Homo sapiens
gctgcttcccttaacacacgcacagtgggggctggtcactgcaggctctgctgatctcctgtgccctttcctgcctccaggcctctgcctgctcctttccctctgcttacaaggtcttgcctccctgcctccttctgtcagatgaaatcgccttctaagaacaacataaacctccgcagaactttcctttcctcctagcagaatgcattgtttctgtttctcctaccagcaagtattcttcatgtcttggatatagcaataaccatcattacttctggatttaattcccttttttgcttatttcctaagagcagggtgttccttggatatctctacttcctgagtaccttggatatctctacttcctggttgctaccctgcattttaaaattgtttggtctagtcagatctagccaggcaacctattgcataccttcagtgtttcactcctttttctggttcttgccttgcccctttatttccatgtacttctgtccttgttttgtgggttgcctgtgggtttatatcctgacatataagtctcatccactttctctcctaaaataagtctgtttctttggaattgggcatacctttcccttattccattcaagtgtttcactccatctgtcatgtctcagtggtacctataagatcactgggtttatcttatgttcatgctgctgttacttcagctctgtgaattggcccacgtgaggctcacttccttcctcttatttccttgccaggtgtcttgcgtggtctgcactgctcttcccttttcatccctacaggcttccacagcaactcatgtcttcattttatcttgtcatttcctccacctccctcctgcctgtatccttgctattttcaaattcaataagtgctgattttctgataaaattaacttcctgaatgaaccctaacatggtagtaaaacaaaatttgtgatctaaaagccaaatgttttttccctttagttatattggcaaatagtcttactagttaagaaatgcctttaaa

SEQ ID NO: 99163 - DNA, 1044 bp, Homo sapiens
agcttggcaggcacaagtggcgccggcccgcaaccttggacagcagcagctgtgcgctctgattcctttgaaccgctgctctgacctttcttcctactcggttttgtttcttaaaggactgtgtccaggaacttttctgctgttttcactttactttgcctataaaggtcttctgaaaagctggatgagctgtgtttccgccctccagattctctgctttctcacttggcacaatcatttctcccagcttcatcacacaggggaaggggggctggggttccagttcatttcccatctatagggaatgtggcactgatttcattcagatctgtaagtgactgatgccagaactgcaatcttagctccttatctaaactctaattgggggattaacccatggagtaggacagtatacagtgtaacaggtcttgggtccaaataccacctcactgactttaaatgaaattctttttgttgagattttgctcacagtaataagtatttggttattcttgttaacaatagggtataatcaggtggaaatataaatttaggtagtgtccatttaaatatcaggaaaaaactttttgacaaaagatgattccgttagataggggacacctgcccacctgaattttggtctgtctttctcagaaggacacaacatttgctcagttaatgcctctcaactgtcttctctgggagataaatataatgtaattgcaaagtttaaagtaattttagaaaataagcaaattaagctttaaaagtaaaagaaaacctaaacagttgaaacctaaacctaaattttctgcctattggcccaagcattcatgttattttaggtgcgaaacagctcaagtgaaagttcgcccataaatctctacgatattttattggtactgctttataatagagatcaaagattgggattggaagcctgtcttaatgtagagtccaaagagttttaagatgtttctttctgacaccagcaggttgtcagagtgttgatgttttgttaacgtcaaactgtgtagcaaagag

SEQ ID NO: 99164 - DNA, 1030 bp, Homo sapiens
actttgggaggccgaagcgggcagattgcttgaccccaggagttcgagatcagcttgggcaacatattgaaaccctgtctctactaaaaacacaaaaattagccagatgtggtggcatgcgcctgtagtcccagctactcaggaggttcaggtgggaggatcacctaagcctgggaagtcaaggctgcagtgagccatgatcacgccacgcaatcccagcactttgggaggctgaggcaagaggattgcacagcctgggcaacataatgagaccttgtgtggatgaaaaaaaataaaaaacagacaccagagagtgagctctctcatctccccaaaatacccaagtctaaactatagtttgtgtgtcagttgttccttcaagtaaaaatggtgttccataaaatgagcaatcagttcacttcacaactcagttatgtaattgcttttcctcaagaccaccagcgtacctctacatgcagcaaaagtgaaaaagacaagcaatcaagggttgagacatcataaaattaataatttttactcctctgtccagagcattcggttgttcgatacgagtatgaggtattggagtgcaatagccacaggtgtgcttgtcggatttgcaccaaggcagccactttacccacgagggcttttgtgccaccagtgtaaatgtcagcacgtggaaaggacaaacactgccttagtatttttatgaaaatagttttaacctcctggattcctggaagggtctcagggatccctaggggtacatggaccataccttgagaaccaaatggacagttggtggaaagtttggggtagattaatatacatagcacacagaaaaaccaagcaaataaaaagacagttattaattccagtgagaataaaaagttgtatagaaaagaaaagtaacacttagtatttatgtaatcataatagtagattgataaaatgaattctgatcattgtcatgtattaggaggattaaggactagaatagttacgtgggcatggtgggggagggagt

SEQ ID NO: 99165 - DNA, 1078 bp, Homo sapiens
gacagatgcttgctacagtaacttcagatcctgtggcctccgaatactccctggcaatactccctggcaatccttatgctctgcccaggtcaactgtttttcctattctccaaaggagcaatttcaaaccttcatcactttcctcaaactccttcccccatcacactccccattctttgcagataatttgtgtcctaattttcaggaaagaacctaaaaaatcatactaggacattctaaatcccccctgcccaatccacagatcttactgttatcgctgcccatcttccttcctcttgcagccaagaaaggggttccacttttgtgttggatccaatcccttgtcatctcagagaccttgaatctgcagttctctctgtctctcttaatgtcttctactccaccatccatagtgccttcttcctgtcagcattgaaacaagtctctgtcatctttaaatatactcccttcaaacaccttcagtacactctcacatcctctcatcctttcccattccatttcatgaatcttgcctcttccctagcactgtctaatttgctaaaagagttgtattcactcatgattgccatttcctggctttctattcgtttttcaacctgtcaccccgatctctgcccccagcactccctgcaagagtcttttctgatagatccaaaggattccttgtttgggaatgttctctgttacttgacctcttagaaggatttaacgctgctgactatgccctccttgaggcatgttctctctttggcttctataatgtcagaactcagaactccatagccactccccagtttctgttgtccagctcttaaatacaggtgtttctcaggattctatccagggctctcttatcccttcaggttacaatcttgcttataaacttcagaactgtatgttcagcagcctactggccatctccactagatgcctcccaggtatgttagaatccgcaatctcagattgaactcaaactcttctcccaaacctgtttttcttccttgtcagggtgagtagcaatagcatctgccctgcagcctgagccagagaatcctga

SEQ ID NO: 99166 - DNA, 1106 bp, Homo sapiens
ccgccctccaccccacccaccctaccccttcctgtggacaaagagagggcagagctggggcctcagtgccacgtggggtgggcacatgaagatgtcagggaagcccagaatgttctggggggggtgggggacacattcattgaaaccgctctgaacctaggtcataaaactgtgtgtcaatattttaaaagtcacagaatgaatgcagagctctgccaaactcaacatgctgtgttccagggggtgataagacgagcgttagttcagtggaaaaaaaaacaagacaaaaggagttttcttttaatcttctgtgtttcatgtttatactgaggcaggctgcccttgcaggagagaattcattcatcatgcaaccaacagatgagtcccagtgacattgtcacctgtcacctgtgttggatttaagtgataaccatatacaggcagtaagaatgtatcgaggcaaatgtagcctgtcccattaggccagcagaagccatcttgggtttcttctgccaagttcatacacctctggttcaacagtgataagctgaagggaagttgcaggagccataactgccactcctagtcctttattactagggggctgtgcttccacccctgaaaataagtcttgtttggcactcaacgttttctgtggagcaaacaagcaagtcatgtctctgaaatacctcatttgttcccccaaacatttcaccagctcctccatgtgctgctcagctctgggatacatagatgggcacggctaggtgttcccctcccttccccacccaacagcctatggtctgcagaggaaaactagcctccagagaaggacagtctggattcactgttgagatgtggtttagaatcagcccacaggaccatggagccagggagggagatgtgtgaactgaacctgtacagccccacgagttgctgagtggagaaggtgggcttgggtgcggggagcagagggggcagagtggaaatccagggtggcctaagagtctgggtgcctgtcacccatgaggaggccccaaagagtcccttgggaacagaggcactgatctccttgtggccagtaagtgagcagggctgaggcaagg

SEQ ID NO: 99167 - DNA, 1047 bp, Homo sapiens
ctgagggcccaaatgtggccatctagcctctggggacttccttcctttggagctagaaaaacaggtgcagaatgtgtctggctacagcaggggcccgcccactcacctatagaaaggccctgccatggactgagcctcccagcctaggaaacctggctctggcctcccctgcaggcatatgatgtttggctccagaggccttctcctctgggcttttccatgcctgtgaactgggccccattcatttctctgtggtttcatgggaacgtccaatgcattcaggaggttgcagtgcgcgcaggaggagaggggtcagcgagaggcccgagctgtgactggtgggccacccagaggccacggcaccctctgctggagactggcagcagggtgcatggccagctgtgggtgggggtccatcagtcaagcagctgcactttctccccatccccctccccgacccaggcaaggtgctctgcctgcggctccctttctccaggcctccactttccagctcccaggcacccagccccacccggcctggcctggaacagagctgccaccaagatctcttccactttccctccccagcagcctgcaattcagtgctccgtagacccctgcctcccagggctctgcggtttccaccacactacactcaatttccagctgctaagaacacagcaggttctacgtaaaggtggccatcacctgcaccccatgggttgcccagccatggagaagaggccatggttgggtacacagcttctgagacaggcccagcagctgccttcatggcctcggcagagcccagggctctggagcttacaggcagcgtgtgcccaagtgtggaaaatttggtctgcagaagaaatgaggctgaaattggctgggagcaattcttatcaaagccacgttagcagttttcagcaagagctaattgaacaagctctgtgagtggcctcattccattagcaggagcctcccacagagcgtgacaagggccctggtggctgagggcagaagaggctgtttctgtcccacatttgc

SEQ ID NO: 99168 - DNA, 1046 bp, Homo sapiens
tgctgcagaagctgcatggagcccacagccagccctggacacagccgggaggagggcgctgacctcgaagggccgctttctgctgccctgggagctgggtgcttggggtcctaatctgtcggcgggggtgcagcgccatgcagcccatcccccagccatagctcttcccagccccccaggctcccactctcatgcctcaccccctcttcccaggctatagggagcgactagacatggcgcccgataccctgcagaaacaggcggaccactgtaacgaccgccgcatggcgtccaagcgcgtgcaggagctcagtaccagtctcttctttgctgttctggtcaaggtgagccctccagcctggtgcccctcacctccctctggctcccgaccctcctgggcacctgctcaccaggaggcctcgaggagcccagggcagtgccaggaggtgccatggctgcagcactgtccctgcaggagagtggccccctggagtcagaagccatggtgatgggcatcctgaagcaagccttcgacgtgctggtgctgcgctacggcgtgcagaagcgcatctactgcaacgtgagtgccctgggagagcccgggggcgggcagggcagcccaagccatcccgcactggaggggcacaggctgtgatgggtcacactccacccctcgctcccccagccctagcacaaagcccacctgatgggccttgctgagacgcccagctctcccacctgggatggtggctccaggcccagggtcaggcctggcccccttccccaaggacccaggaaccagagagcaggcccctccatggccagtacagctcggcagggtgtgcaggctttggggactgtgtttataggaacgtgaaggaatgaaaggccagcgaatggtccgtggccgctttggaaactgtgtcccctgaagacaaggaagagagctgtccctggctcggctcctgccctgagtgactgttgactcacagttctctctccaaggggacatgggcctgtcctaatgctgccttaggggcttggct

SEQ ID NO: 99169 - DNA, 1053 bp, Homo sapiens
cactctgtacctgccttccccaaacctcttttgtcacagctctcagaccctgttcagtcttctctcagggaagtggggggagccaggagcctggatggctgcagagtgcactggtgacatgcctttgggattccagggctggacagacaaccggctgaagtggaatgctgaagaatttggaaacatcagtgtcctgcgcctccccccggacatggtgtggctcccagagattgtgctggagaacaagttgagccaagccctccctgacctcccctctgtcaccctgcctcctttccttaagcctcctctgcctcccccaactctgccagtcgtgagtggccagagctcactatggttcttgtccctgtcccccagcaatgacggctccttccagatctcctactcctgcaacgtgcttgtctaccactacggcttcgtgtactggctgccacctgccatcttccgctcctcctgccccatctctgtcacctatttccccttcgactggcagaactgctccctcaagttcaggtgtgcccttttctccagccacccctcaccccaaagcaccctgccagaggccaaagaaggtgactgaagcaccctcagacagaggcccctgccctgtctggattagtgctgccctccccacaatggtcctcccttaccagcccttccccactctgtggccccagccactggccgagtgtcactctctgcccattgccctccccagttccctcaagtatacggccaaagagatcaccctgagcctgaaacaggatgccaaggagaaccgcacctaccccgtggagtggatcatcattgatcctgaaggcttcacaggtgctgggaacagccgccagtgggtgggcaggtccctcagacacacacagacacactggccctgtccaccccagagacacacacgtgcacacacacacacacttaggacaccaatacacagctcctcacacacgcagctagacacagaagggcagacacatatccgcccacagaggagcacacagacactcacacttcctgaatgca

SEQ ID NO: 99170 - DNA, 1512 bp, Homo sapiens
gaactcgggctcaagagatccacccaccttgcctcctaaagtgctgggattacaggcatgagccaccacccccagcctcatatgttatttctactctaacaattctgtgaaggggatcttgttgtctccttttacagatgaggaaagtgagactctgaggttaactaattcccgacacaaaggaagggctatcccaggtttgttgtgtaaccttggttcaagcacctcttgagaaaaattaaacttgccctctttttttttcttacctcttctacgattgaagaacctgggtcattttaattactttgaattattaactattgtattgagccagaatcttttaacatctgccctctagcattgcaggaaaaaaaaagaaaaacaagctttctttcatttgaaattagcagttgaaaacagcactcctgcccctagttttatttttttatgttgtttttcattcagaaattctgcggtgtttaggccattgctgcatatttggagtctttaccacattgctctctctagtaatctgcactttttaccacattgctcttaaggacatgttccagtttgccagaatccttccagatgtccagtggctggagctgagtacagtagtatataatctaatgggctcatattaaagattagctctaatctccgttactgtatggactcaacttctctgaatgaaacctttgattgtaattgcttttgtggagaaggggtagacctatcaagtccttagatctcattgccattgatcctattgataacgtaaaaccgtaagatgctttcacaaaaactgcagtcctgacttaaacatagttttcagatctacacaactgtacttgattttgtccgtattctacatcatttgctttttattctatatcgttaactttgggcccattcctaactattgtctaaaccacttatttggcactcattgctttgattctatagacccattcattaaacggagatttttttttatgccactgtctgatggtgagggtataaagatgaattgaaccaaggtcctgcccacaaggtattggtctagttcagagggtgaggaaatacgtgggcagaagcttagcaagctaactaaagtgcctctcagtctggacagtctcagagttgctaactgcctgagtttagggagcactgatttttcagtctgagttgtatcttgactcaaatccagcttgaagctgggaagagtagcttgtaagatttgccttaaatgtaggcttagagggcagagtggttggttagttccactctcaggtaataaaagcaccagatataggtccattagggttcccatttactgtcttagaaaggagccctaagtggtccagggatcacaggagcattgtttcttctctgacaattatttttgtttcctggtagtgatcagcagcaaaccactaaaaagaaaggaaggtatatacttttcttgggtctagcaaaaacaagatgctgggatgactgtacccctct

SEQ ID NO: 99171 - DNA, 1117 bp, Homo sapiens
aaaataaatggctttcttattgtctttgcaaactcaccttccatttatctttttgtctggatccggtgattttaggtgtacctgaaagccttggggtagtttcactgctcatgaaagggtaatccctaaagttcgtttgactctgtgcttatgaagcaagaacacatttattctttctttcagtcatttatttttccttttggtttaccatttattcagcatcttctagtgccgcatgttaaggcaacatcttgccctgggtgctggagataccgagatgaaataagacactgctctaagggaactctctctctagtagggaaagcagacatgggaggaatggtgtgacagaccgaaggggtggtgtttgcaaatggcaccgatacggcaacatagattgctagaggaggaggatcctggctggcaggagtcagattctagaggatcttacattttgctgtactttatcttagagggtaggcatcaaaaagcgagggacagttgaaagtttaaagcatgcaagttaaatgtcagatttgcacttaaaaagataatgctagtgaaaggatggatagagagtgagagatttgtgtcaggaagaccaggaatttattatatgattgacgtgtcaggagaagagggcctaaactaaagtagtgacagtgagtgtagaagaggtggtaaggagaagtggcaaagcagatagtacgtttttaaccttcatttgaaatgccatagcattagagactcttctcattttttactccatttttggcagggaaaacaatcccttaaactgtataccttaaacattccctttaactggttctttgtgtggctttttagaaaactgaaagacagtgctttgtggagttcacaagttagctgatgggtgtttcgtttttgtttaatcctaatttgcctgtctgtgttattttgcccttcttacatctcagggcctgaatttgagtgactttgggttggttacatagtagttcgtatgacctggtggctttgttaggtaagcaagaattgacttcgtcacagaattgtattgtgttgcctttccattcagtttgaaagatgatgacagtggggaccatgatcagaatgaaga

SEQ ID NO: 99172 - DNA, 2149 bp, Homo sapiens
aaggtctgtttagccattttaataaatggcttatgccaaggatcccagccttgtttttctttttttccccatttcttctctccctagtcctaccatcagtttttctatagagttgaataattggaaagtgatatgacttcttagtgtttaagagattcttggctttttactgccttcatacaaaaaaaggctgtgaaaccatattttaacttcagtgctttctgtctttttacaggatgatgcaaataaaaatggtggcaagtggattattcggctgcggaagggcttggcctcccgttgctgggagaatctcattttggccatgctgggggaacagttcatggttggggaggagatctgtggggctgtggtgtctgtccgctttcaggtaagccacccatgagccaggctggtttcttgtgttgcctttgctctcctcgctgcccctgatttgctttgatgattccttctgttcctctggtaggaagacattatttcaatatggaataagactgccagtgaccaagcaaccacagcccgaatccgggacacacttcggcgagtgcttaacctacctcccaacaccattatggaatacaaaactcacaccgacagcatcaagtacgtgttggggggttatgggaggacgtgtccctaagcttagtataagtagatctgtagttgggcccagaggaatatggccggacaggagacttacttgtggagaagggacagaccaggccttccctctagggcttctggctacttgctgcagttctttgtcagcgaggctccctgccacctatactaccaggtgctttgtagcagagagagcccatctgcagaaacccagttgtactacctgggcttgcttaatttctacaggctgtcttgtctttcatatgctaaccactatcttaaaatgaaagacaagtgcttttctttttcttgctgttttttaagataatttcaccctgcccaccctcaccccacttctgcatgtctttttaacttgttagcttcagtctattttctttgtcctgggatactgactacttatcaggaatgactccatttccttgtgtatagagctgactcttagaagaagggggatagtgtgtgtgtgagagagcagaatcaaagggaagcatgaaggccacagggaaaataagcttggcaatctccctaggactcagggaaatagagctctctgtccacagtgagaatcactgttaggcttgctcctcagtgattgagtgtcagaagtaagctcaggctattgtgaaaaagtgtggggagtggctgtcagattgtctcaaagctggagggagagctagccagctaagagttaggactcttaggtttagttctctcatatggccccataccaatatgtgcctttgacaagtgtctttgcaactttgcttcagtttctccatctgtaaagtgggagacagtactttatctaacaaggctattgtgaggctgatttaatctttaactgagggtcttcagatggagaatgcttttacggggccaagtagtagtattgctatcatcatcatcatcattagtaagaatatcatcatgttgttattattgaaggctagtagtgagcccagcaattatgttcagcagacagaccatttgggaatctctttcccatgcattcatagataatgtggagtggagttggcttaaaccagctaagtgccagtttttaagtgggaacactgctatgggcgttggtccatgatcaaacggctggcatgactcatcatagtcacgaacagttattagccagccatggctgtggttgcttgccttagcagtcctgtgttagcattgctttactctgggcacatttttcttattctctattctgggatagaagtagtttctgacttctagccacgttcagtccaggctggagagatctacacctgtttctaggattctcgttttcaaggtttctgaatatcccctactcccacttacccccaaaataagctttttacctggataggagagggaaagaggtatttttcatcaattctccccttctctgctcttctccctttctaataccataaggcagttcttcgtgacttttacagaaacatatgtacacgtccttacagagtttagg

SEQ ID NO: 99173 - DNA, 1096 bp, Homo sapiens
cacactatcccccttcttctaagagtcagctctatacacaaggaaatggagtcattcctgataagtagtcagtatcccaggacaaagaaaatagactgaagctaacaagttaaaaagacatgcagaagtggggtgagggtgggcagggtgaaattatcttaaaaaacagcaagaaaaagaaaagcacttgtctttcattttaagatagtggttagcatatgaaagacaagacagcctgtagaaattaagcaagcccaggtagtacaactgggtttctgcagatgggctctctctgctacaaagcacctggtagtataggtggcagggagcctcgctgacaaagaactgcagcaagtagccagaagccctagagggaaggcctggtctgtcccttctccacaagtaagtctcctgtccggccatattcctctgggcccaactacagatctacttatactaagcttagggacacgtcctcccataaccccccaacacgtacttgatgctgtcggtgtgagttttgtattccataatggtgttgggaggtaggttaagcactcgccgaagtgtgtcccggattcgggctgtggttgcttggtcactggcagtcttattccatattgaaataatgtcttcctaccagaggaacagaaggaatcatcaaagcaaatcaggggcagcgaggagagcaaaggcaacacaagaaaccagcctggctcatgggtggcttacctgaaagcggacagacaccacagccccacagatctcctccccaaccatgaactgttcccccagcatggccaaaatgagattctcccagcaacgggaggccaagcccttccgcagccgaataatccacttgccaccatttttatttgcatcatcctgtaaaaagacagaaagcactgaagttaaaatatggtttcacagcctttttttgtatgaaggcagtaaaaagccaagaatctcttaaacactaagaagtcatatcactttccaattattcaactctatagaaaaactgatggtaggactagggagagaagaaatggggaaaaaaagaaaaacaaggctgggatccttggcataagccatt

SEQ ID NO: 99174 - DNA, 1017 bp, Homo sapiens
cctgtgggctttttgccttagtctgctagaaagactggcctgctgctctctgctttatccagaggtctgcctctgggacttcagccctgtagctgtagagaccagaagaccaaccctctttgagacccagatgctactttcccttgcgtccccctctctttcctctcccaatgagccaaccttttgcacttccactagaatgccaggcaggctgggcccccaaaggctcctttttcaaaacctctggaagccgcggttgaatgtgccatgaccctctccctctctggatggcaccatcattgaagctggcgtcatcggagtctcttgttctgttggcgtgctacctggaagatccttctgtcctggacaagaggaattggaagagcattttatgttttaagaacaggctgacacgcagcagctacaacaacagctgagatcacttaataaatggtgctaaactagcttgtctcatgctcttgctctttatggtgcatcaaagatgtggcctttcggactgactgtcaccatattaagggatggcacagacttttccatggagggccatccggggaatgcagcctcatttccataagcccattgtgtagtgtcatgtggtattttgttccaggactgctgaggcctgacataataaggtgacatctagcttagaaaataagaccccattttctggtacttaaatttgagttcccatctagtcacaccgatgaccagaacagagtgatttctgatatagaattcagcttgaaagtctgttcaggttggaaagggggatccttggcctttgcttcgctgacttccattcgcctttacttcaaagaaatctcttgcttggaggtaaatccctgcttctgtctgtgtggctgtgtgtatatagcttccttgctttgtgctaatggggttttctcgctggtgccaaagctgcccaagccacagctcttttccagccttctcccttctgctttccctttagagccaggtcatcttcctctttga

SEQ ID NO: 99175 - DNA, 2980 bp, Homo sapiens
tgcatctagcctggaatggaaaaggaaaacaggccaaattcccatagtgggctacagcactgggaaagactggcccggcttctctgcaggagtggagggtgggtgattctctttattcctttatctcagagaagagacaggtcaaattgtggaggctttcccacatctagatatcattgtatttcaacactgaacttttataggcaaggaccaacccattcccttctcctggcatggctaaatcatagtccagtagcaccaggttaccccagcttaattgctggcctggctttgcatctgtgatatgtaccaccgaactggtaggcaaagcgaagagagcccagattagcaggaggctgagcccctccctaagtatagagagcagtgagcgcaaggctatgaaccttgcagcctttgggtagaggtagggggaagtgtagaattgcacaggatttgctttctggtacgtgagatgggccaagagtggtcttaaaagagctctttgttcctctgtcttttgaatctgttcagaattccttgttgcctatattaacctctaattaattttttctgtttttagaaactccagtcatgacacttcttacatttaacttgttctttctttacctttaaaagaaggaagttttaatattacccagtatgcctggaatgccagatggaaaatagctagactattcacacctagttttaggtggtagatttgcctcttggccgagctgtgggcctatgagaataagagtgattataccaaagattatggcccactattttatttccactgattccatgtgaagaaatttctttttttgttttgttttgttttgtttttctgagatggagtctcactctgtcacccaggctggagtgcagtggcgcgatctctgctcactgcaacctctgcctcctgggttcaagcgattctcttgcctcagcctcccgagtagctgggattacaggtgcccgccaccatgcttggctaattttttgtatttttagtagagacggggtttcaccatgtttgccaggctggtctcgaactcctgaactcaggtgttccgcctgcctcagcctcccgaagtgattacaggcgtgagccatggtgcccggctgtgaggaaatttcttaacccaggttcttcatgttgaggtttaacatatagtgaagagactaatgaagaaactgggaggggaatgtaatactggaatggagtaggagggagctgtgaagtccatatttcttcaggttcttgacagagagaactgctcggtgtaggctagtgtaaggatggcccttcctggaaataaaaggataaatgacatgaagcttcaacacagccatgtaatttcttgttgacacctaagtggtttaaaaaggaatttaaatctcagcattacagtgaggggtttccctgggtcattgccaaagcattggattttgctttgcccttgtcttcatttggagtaaagagtcaaattgccttctgatgtcactcagggattcacaaagcacatcacatcaccatctttccagaaagagctctgaaacaggtgtcttgctgtggacactgagtttgggaattgacaaagactggcacacttgtttggcattcttacatttttccttaatttagttagcacatacactaggagctttggtaataattctctgaagaagccatgaactgcaggtctacctcctctaagaggtaaatggttaactcataaatgtagtgtattgtcaccctgggtactgtgtcaccaaattaaaccaagaatggagtaacaataatgaggaacttcagacttagaagcaccatattttatatataattcccaaggaactcctcattttggggctgaaaagtggctagggcttaggtaggaaatcagctcccctgagaaaacttgagtttgagcctccagaagcatagggggtctgattttctcctgtgactagtccagcagtcaccaagagtcttttctctgtaagcgaaaggccacgtaccacttctgtcacatttcttatcccttcccaaccctaatttcatagttaagctagtcagcatgaaaattgtaatgggcattgttccctggaaattttgaactgccgtgactttaaattttcagatagtagttacataagcacttaagaaacaggtggaacctgacacattgaaggtctgagtgtagaagggttagaaggtcggaaatatgaaaacagagaaagtgtatactttcctccttgcatctttagacatcataatgctgttggaaactggcctttaccctcagtgaggcctgatgaagaaaaattgtttctaccacctgtgcacacataggcaaggcagaaagtacagggagtgccactgtaaattggaagtgtttttggtgacagttgagcatcagctctgaccttactggcctcccctggagccttgttgaaggaacactggtgcaaatccttgagggaacaggggcagacttctcaagtgaagcaagcagaagtgcccgctggccctgaaagggtaggctgctctgctcctcggaaaggaaagtccagtgggacctcgctgctctgctcccaggtacctgtggctccactcggcttggagggcatctgaagggggatgtggggttattgtgtctgctctctgtgttcaaaagcttttgatctgaatgtgctattgtgttttttgtctctggtttgccagggcctgggaggagtttcatggcctggtgaacagcagcggccgctgatcggacgctccccctctgtctctcacactcagggtagggccttgtctatcttctctgtaaccctgtgacatacctctcatccataggacccctcttcccatttacccccaaacttgcctctaccaacattgagcctcagagaaaaatataagtcccaaaccactggattctcatcctccctgggtcccatgtctcctggtgaa

SEQ ID NO: 99176 - DNA, 1031 bp, Homo sapiens
ctgtcactgtcaggagcaggccacccccatttgctgttctgttttcctcttaaatcaaactggaaaaactcagctggattctcctggcttttcctttactcttctcctcccccttttcactttgcaagtggactttagaatatgatttcttaggttttctgactataaagtggtctatattaacaaaaatattaagtatctgaatgaggctgggcacggtggctcacgcctgtaatcccagcactttgggagtctgaggtgggcggatcatgaggtcaagagatcgagaccatcctggccaacatggtgaaaccctgtctctactaaaaatacaaaaattagctgggcgtggtggtgcacgcctgtagttccagctacttgggaggctgaggcaggagaatcgcttgaacccaggaggcggaggatgcagtgagctgagattgtgccactgcactacaacctggtgacactccatctcaaaaaaaaaaaaaaatctgaatgagaaagtgtttttagagctctccagtttatctgctacagagaaagaatttatttctggcccacctagtacaatagagaaattcttccaaaagataagatgacctgcttatggtaatgattaccctgaaaatcctttttccgtcactaaacagctgaaagagttggggccagacacttgcctgccatctcctttactccaagatagataattgcccaagtcagcaaattctctgctcctaccttcccatatccctgcctttctagtttcttttaataagaagagcagaatccctcctgatagacttgtggtgtccaatgattaggtgggcatagacgtgcctgtaaaagggaagaaatggaacagagccatctgttcctgtgaaatcactttctttagtattaagtgtaggtacaaaaaaagtgtcttttgtaatgcatctctgtaacacagcatattttccctaagagaactcagaaatacacacacacacacacacacacacacacacacacacacacacaccagttat

SEQ ID NO: 99177 - DNA, 3294 bp, Homo sapiens
ccatttttttctttcagggacaattcaagctttcgaaatacaaaaatcacattgtgagagtacacaagctggcaataatccttttctgtatgtgtgtgtttgtccgaaatggatgggaggcctccagccagtccttccattgctcactgaagggacgtccctgagccgtgcgctctccttttgcactcattcctggaggacggattccgctagacaccctccagcatcgctgactttataaagcggaaaaacggaaaacgtgactttgtaatagacaaacattgttttttaatggggttccatgggggggcgttcagcctttctgtttgctgtgtgctgtccagatgcctcttgggcgtcctgttgttctcttcccgtgttgtacgaagggtaccgtggccacgtgtacatgccagagctgttgatgagagttaccagtattatgaatgtctgtgcatccaggaaaagtgttctgttggagagtcccaaaatagctgtaaatgctctcttctagctctgccattaaattattgggacattttgtttctttctctcccctcctccaagcccaccactttctgaagctgtgttactgatgtgatgactgtccaggattttgtatcatcccctgccttatgccctccggtctcctctcctgtgggactctctccttcttaggcacagctgcacttagaattgtaatccagtggctctcactggtttcactgaggcagcttagagggaatgccttagtaaactgaactggagcagaatctagtttgattaggagctagattataatctaggttccaagtacagaatttggagctaaggactgtgactgaaatcattttcccatatgagcagaccctgtgtgtcaggcctgtttcccatatgagcagagcctgtgtgcaagtctgtttctggcatgtccctcattgaggaagggaagcaaaagctggttattgccaggcctattaacacttaatatgcaaattctatcatcctgaaactggggcatctgaggaaaaggtgaccttgctggatggctttatttgcatggctctgcctgtctgcagtggttgagtcctcatcacctggtatgtgtatgagcaaatgtgtgctgattgtgatgcccaggcagaaacctcttgaagactgctgcaggcatgctttaaaaatgaccagtcactcatcagagaagctgggtgatctgactccagaaggactgaagtcagagaagtcacaagagcacctaggattcaaataaatagcgtcagagtcctatagcaacctccaagtagcaccgtcttacttggctcttgtgagcaaagactgcagtaccttaaattaaggcctctctttaaaacatatgtggaagactaggggatccttggccacctggtctcagagaaatcatatgagagtaacaggcatttccttattgtatttgtactacactcttcctacttttccattcctgaacaccctctaattaccactgttttggggatgctttttttctgaaagaacggggagtacaggggccaaaagggaggtgcttctattacagggcaagttagatcagataagaagatctagcagtgatttaaactccaggaatatgaagagtgcattctggtgtccagacagttgtgaagggctcggcaaatataagagcaccattggctacatggagagcaaaggctgtctttgaagaccccagggaggtcttcacttttgcctaaattcagatttgccgtgaaaattccaaagagagcagatatttggatttgccctcctttgggcatctacctgactgttgtgtgtgtgggaaagtcagtgtgtatgtgtagagtgtgcttaggagtgagtgagtggtcaggcctcctggctaggtgtgttgtccatagttttgttgttgttgttgttgttgttcagagttttgaatcttacgttttctagagctgctcatgttttcccttcctttttgtcgttgtagtatttgacagttgtcttttccatcaaaaacatactggccctaggctggttagagcaaggggttatgcctgttaggcagcatcttacgcccagtgttctcccagatattctgcctaacaggtttaagtaggagattaaatagtcagtttatctaaaccctctatttttccaaactagcttgagaggtcttttcatctatttttactccatgggcctctgatatgctgagatgtggcacggttatgattatggtatcaccgttacagaggcaaagggataaaggtctaccagggccaacgtaaccagaatgtgaggagagtgaagagtcggtctccgctttgcacagtaccagaatgtgaggttgccactggagagtggagagtcggtctccactttgcacagttggagctgttctcctctaactcctttgctgggttttctgtttgaaattggcccctactcctctccagccctttactgggttttctgtttgaaattggcccctactcctctccagtgtctgctttttgaatccttctgttcgtgtgtgtgtgtgtgtgtgtgtgtgttccctatgatactggcagtggcaataattttccacccagagagaagcttgtggtccacaatgctcgaagaatgaatttccaagtatttgccagtggaaacggagcagaggctatgacaagagtgatttagtgttgcactttcagagcaattatctactgcagtaataaattgaaaatatcagcaagaaccaggtcgtggacttgtcaatacaagggaaccgggggtactgttactcattctaccctacagtgtataagtcccaatcttaactgcattccaaaacaaaatatgtggaatagtccaggcaatgtcaatctcaatgacacaaatttattgtgaaaatattctctaattgatattaatcattgccacaactcagtttacatttttattatcaaaatatagttggtaacgctccttaacttgggataaggaatattggaatagaagaaagtttaaagaatttgattttactgtaagaaatcactcagcctaagcttggaatgttttagttatattaagtatcttagcctaaagagggacacatggggcatgccgacggttggtgcccacatgaaacactgagggagaaagaggctttgctgagcctcagttattgttgacaaaggatttaaaacaatacagtcttgagacttagtttctgtagatagaaatctcctctctctgtctatcagtcatggtccaaataggagacagaaacca

SEQ ID NO: 99178 - DNA, 1017 bp, Homo sapiens
caaggttagacaggaaattttaattaccctggacttatctggaggcctctttcaaagggaggcaatgagggcagccacttaaaggcaggaccccaatgcaacatcttaaaatgcagccgcaaggtttttgcagcatactaaaagcttgtgttttaattccccaaagagagggtgggaagaggaacatttggctatgggaaagttgtctttttcttaagaatctgaaacggtgatgtcatggatgtcctgccagtgccagagtcccgcgttaccaagacaccagtgaaacccaaaaaggtgaggctgtcgtggaattcttcatttctcgtcccctctcctctcccagtttctttttctcctccttagtcttgtctctaaaggagagagaagcgggtgtagatttggaaggctgggaattttccaaagaggtaaagtgagccctcttagggaggcttactggggaggtggaggtgaggctgcctgcatactggcatcctgatcttttgagtgaattgactctaaaaatgggaaagatgggtggaaataaaaggaagaagttaagtgctttctttttccttggagaaaggcaagaggtactgacttgtcctggctatagcttcagtcaacagtgatcaccttagatgtgaaattttctcacctgcactggagtttgtacatttgacaattttgaattggggggtagggtaagaggacctagggcttgtctgaattctggaggatagctttaggtcagccttctgttttgggtcttagtttctggcagaaagaccccatgccttggaactgtgtcttagacgggtttaagtgctggctgcttttacttgccagcacgcatgattaacccatgtaggaggagctggaaggagcttccacagttgctggtgggtttatctttgtagggagttccctcttcctcctcattcctcgctccacacctccctctccctgggatgtctcctccaccatccttgttacagagccatcgaattttatgag

SEQ ID NO: 99179 - DNA, 1060 bp, Homo sapiens
tttagctatactggggtaaaagtgctctaggctagggagcagcaagagcaaagacccggagacaaaagcttaggagcgattcaggagtagactgggaaaagcatggaggctagcctaggctgagaggctagggtgagtgggagactggtgggagatgtgtgtacttactgtttggtactaagatgagatggattatttgctatcctgaattcttttttcttatctcttgtgattcttggaaagggaaatcagattctggaaatttgggccagcagccagcctccccaacccccttaactcccatccccatccgctaatttggaaaaatttaggatgctcagtatttcaggaaattataatgaattatctttctcaaaagtaaacgttttaaaatgagattgatgataaactgcttgaaagtacttttcaaaagcaattgctttacaagaaggaggctctttggagatttcaggatatttgaaaatgtagggaaattagaaattttcctttcacatttagacacatgattaaggaacataccaggaagaaaggtggaaacaatgtattaactcaaattatccttaatctggttagtaaagaatttttcttaatactgtgctgtccagcccggagactcttcctctaattcatgtgtatatccttcacattttacacgtgtagaactttttgtgctgagttttttattcctccacttttacctttcagactagttgtctagtctgatacttaatagacatatttttttgcaaaaaacattttctgatttccttccagtttatctccatattctttttactgagctttcataaatgtcctctttcattttagttcagctgaggaattttaatattttggttttgaaatgcttttgctggtgagatgcatatgtgaaaaacactttggagtaggtttgcctcaaaatcatgagaagatggaaattacaaggtcagtgtgtgaatgcaactccttggctaaaagggaggcatagtgatggtagtgatgaggtagtgttttaactaattgcctttcttcctcttgt

SEQ ID NO: 99180 - DNA, 1252 bp, Homo sapiens
aaaccccatggtggtcttcatttgacagcttcataagaatcacttaggacttttgttaaaaaatatagttttcagtcccactgtagaactactgagactttctagatgttagggaacctagtttataaatacaccaggtgatctactcttttaaccaggtttggaagccattttctgcaaagtatatttatgatgaaagattgtacttttaaagtttcctaagaggttgctgggtgatttatattaatatttttattatttacagcgttaaaaggatctgaacaaagtctgctcaaatctcctgctgtgaaccagcagaatttttgaacaggtaagtgtggaagggaagcacaaagcctgagggcttttgcaaataggtaatttctgcttttaggttttagttatttttgccctattatttctcctgaggttttgggtagtgagaagaaacttcttccctggtgcctgtcagatcctttatgaacagtaagagtaacataccctttctgcattgaccctggtgtgaatttgtgtcttaaactgtcataataattttttgttggcaagaaacaaggaggaatgctttggaggcaggagtactgtaaagaaccaaagagcagttgacttcatgagggacatgaaccagaaactgggaagctttcaggagccatagtacttgtagatagcacttttttaccagctggccagtgtcctctcttgtctctttttgtcctgctttaattgtatttgtgcagtctggccttttctgctttaacaaacacaaactcatggtagcaaatggccacttaattcttggagccacatatgaacttaggctctagtgccagtagccaattgatgctagcacagtgttcacatttcatattcttgggagggggaaatttggctggttgaacttggttcggttctttgtcattgatcacattagttatggacatagggttggagtctagaagtgcaagcacagttagctgaaaggtcccactcctaatggtgggggcaggtctcagagaaggtagaatggtgactattctaggtggactcccagagaagcttctggacatttttccttttctagcattctaggaaaatgtcctgtgtatagctctgcagtttcgatttatctgttctaaagagttaacgtacatgcctatctatcttttggtgaacgaggccagtaggtctcaccaagcattcttgttgaaatttattagtgctgttttttgtttgt

SEQ ID NO: 99181 - DNA, 1044 bp, Homo sapiens
gttcctacctctctcactagcttcatcttaaactgtgcctccttaccccagattaacatagaaaggtggggagtcagaatataagggttgatttattcatttcactttgcctgctatattattgttttaagtaggaatttcaaaatctcatttttgtgactctagttgagaggagcataaataaaacactctctaactgtactttctggcctggaattccacatttaatctcaactaatagtatggagatatttttctcgttaacaggtttcttcacatataaaaatctattgtaaaaatacggaaaagaatggcagcggaaacgcagacactgaactttgggcctgaatggtgagttttcaaaatctcatcttctttgatattggatgactaatacagtagtaaagtatttgacaggtgctaggtggtttataaatgtgcatgtttttgaaacttttgctttatgtgcctcgctgaaaacaatgtgttagttcaggaataaattatatttggtaaatgagtgtattctatacttaattaaaattttttttctttgtctggttatatatgtaatgatggcgggagtcccacccgccctagaaaattattttctttttatttgagtcgttgtctaggtgcacatacaattttatgtaagtataattataacatttttatgtctgtatgttttctgctacattgttttatcattgctgttcatagattgatttgagaaatagttttcattgaagtattatttgaaagatgggctaggcaggtagttcagtattatactggctgttaacagtagcctatctaggattcagttagcattggacataataacgattaattgacctttgagtctcttacagatgtgtttggaccccgaatatggaattctcatggaattttgagatccatcacattgtagtgtggcttccccccctcccctccttcctttttccccaaagttggtgattgaagatcctctcttcagtggcatcaataataataattactttttctattcaaacctcgggc

SEQ ID NO: 99182 - DNA, 3112 bp, Homo sapiens
aaatcactatttgaagttctaagaaccgatggaactcctgtattttgagagtttatttagaacatgttaacctaagtaatgctgtacttgttttagttattcctttatatttttaaaatgattttcttagtatcaaattaatatgtttctaaaaaaattagaaataactagtaagccagaaataatttcaacatccatggtacacactgtaaataccttggtgtatctttccaggtggttttatgtatgcttatttgtgtatatatacacttattttttacaaaaatgggatcatactgtaccttcagttttgtagcctgcttaaagaaataaccaaatcagaaacatctttttttaatcaataaatattttctgttgtattaaatggttgcattgtatggatgtaccatcatttattcaactagtcttctagatgtgacatatagaagctgttcttgatttttcattataaaaatatttttaatgaacattcttatagttacatctttatttctaccttaattccttttatcaggtggatttaaattcatataagttactttcttagccattttttgtgcaactcatccgcctttatctagaatttgtaactgcttctcttttatatttacataccctcatgtctgtttctttataaaaacatggtttaaattgtcagctaatttaaggaagttgtttttttcagcatcctgctgtttataggtaacagaaagggaacaccaggaatttagacacaacaacagagaaaagaaaaactgatgatattttagaatcaatacacatttagcttgatgcctaatattatgggttggcaaactatggcctgtgggactgtaaagtttttgtaagtaaagtttcattgaaagacagagacgtccatttgcttccatattttctgactgctttcatgctacagtggcagggttgacaggccatttggttcacagagcctaaacattaattctctggccctttggagagacagtttgctggcccctgccctacaccatgagttctcaaggtcatctcagtgtagtattgagcatctttcaatagtatcttacacatcctcctttttattgatactctgaagttttgtttgatggtatttcacttgattggctcagtgttttgtataaaatttgaattgaggtagccttaaacagagggcaatcaccatttccatccttaaacagtagcctcacctaattgtacatctgtacaattgcagacattagagcttaggagcattcccttagtcatctgaaatgctgatgcactgaggaatgcaggtgtaagtaggcatagtgccctatttgtatcatctgtcaaaattccttctggcaaagggagtatatgaggcccttaagtaacccaagtaatcctgagctggaaagttgcagtaggagtagagagtactacctaatttttcttcacgtatgacgttctttgtgaaacttgaggtaaagagctgtgcccagggtacttgagaatcaggatttagattgttaacatcgaaccagtgtgcaattaactctaaatgagacagaagcactaagtgatacggtgtttattaaggtcatcatttttgtgaataatgtaaaacatgttcaataagggatacttaaaaatgaagcaatttatttgtatctggggacaattgtgaagatgggagaaaattgaaaattttggtaggaacagaccatgagtggctgtaagctttaactttttttttttttttttttttttgagatggagtcagcctcgctctgtcgcccaggctggagtgcagtggcatgatctcagctcactgcaacctctgcctccagggttcaagtgattcttctccctcaacctcctgagtagctgagattacaggcacccaccaccacgcccagctgatttttataattttagtagagacggggtttcaccatgttggccaggctggtctcgaactcctgacctcaggtgatccgtctaccttgtcctcccaaagtgctgggagtgcaagcatgagccactgcgcccggccaaggcttgaactttttaaggtctgtggaatcattaggtcttagattatttttctacttagaataaaaaagtatattgcattatcatcagagcagtttaaaagggtatgatacattcaatgccaagtatatcctgtctacatataaagcaatagtgtctttctttaagcctttcctcaaatgctgccaccttagacctttcctgacaatctatataaccctccaccctttactccctatctctcttccttgcttaatttttcttcatgttgtgtatcaaaatgtaacatgacaaatattttacatatttattttattgtctatatcctgtctttcaacccccactagactgtgagctccattgagggcaggtactttgatatagatttttgtacagtttgtttactgctgtatctccagtgcctggcacataggtactgaataaatatttattaaatggatgaatgaattgttggaaagtaaagttgtttttaatgttttgctattgtaaatgatatgtatatatacccttgaacaattttgtttttatcactgatcattttatttggattaatttcttggaagtggaattattaaatcaaaagttttatttttaaggctttggatgatatatggacagtttgaccactagaaggattttatgaattgaattgtcatctcctgtgtgtttgctcttgacaaaacactaagcaccgtcttgataatttttttggtgctaaactccttagatttaggtcttttagagtttttttgttgttagtttcattaacaaaataaacacacttattctagaaaatctggaggaaacagtacaagaggaaaaagaaaagggttaggtatgggctgggcgtggtggctcatgcctgtaatcccagcactttgggaggccgaggtgggcagatcacctgaggtcaggagtttgagaccagcctggccaacatgatgaaaccccacctctactaaaaatacaaagttagccgggcgtggtggattgtgcctgtaattctagctactcaagaggctgagacaggagaatc

SEQ ID NO: 99183 - DNA, 1216 bp, Homo sapiens
aaaaatctattcagtcgagtgtggtggcatgcacctgtagtcccagctactgagagtctgaggctggaggattgctcgggcctaggcatttgagaccaacctgggacaacatagtgagaacccgtctttagaaacaaaaaacaaaaagaagactacccagataagtctagataaggactttattatagggagaataattatagacattacctggctttctgggaaggagccaagaaagctcctttgggagtttcctctgtctcatctccttggtcttaaggaagttttcccaggtctttccttgcaaagaagagggaagtacttgttttcttccccaaagtattttatttatacatttgttaaaatagttatggccttgtggtgtatctgtatatatatttgcgccttgcccaagaagagctaattccattaagaaatgcactgtatttctctcttttggtaagcccattgttgagcttagtgtactggacattggcattaatatttagttaactaatttagttaataaatgaatgttgaatgaagccattagggtcttatgggagacgggtaagagaatgcaaacctgagattgatagcttcctatcgataattatgggattatgtgaaaaaggagagaagttctggaggatgagatgtgttaatatttccagttttcagaaagggtaaaatatttctatgtaaactgaaggagtagtaaattagatgtttttgaggggtgtattttggaagcaaatatttgttcagaaaacattttatcaaatgcttgctgtgttttatgtcttgggttaggtgctaaggcaataaggataaaaatacatggtacctactctttaatggggaagctgacactaaataatttcactttgtcataatgctgtaaaggaattataatgcaagcacgggatattcagctgcctatctgatttttccacttagatgtcttataagcatctcatactctatacttttccaaaactgatctcgttagttttgcctttatatttatttcatcttaatagtatatgtgcctgtttgctcaagctagcagtctcagagttatctttgataattccttttacttctctgttcctatatcgggtctgtcacaacatgtcaattttatctctacagtatctctggaatctgttcatttctctgaatctctattgctatcaccttagtgaaagttgcc

SEQ ID NO: 99184 - DNA, 1986 bp, Homo sapiens
ggttagggttttgggcatattgaacctgatgggctttacatggttgtgtatgaaagcctgactataggagaggtcacagctggacttgagaatcacaagcttacatagaagtgccttttgactcccacaccttcacacattgtttattgactatccaaattgctttcataagctgaagtttggattttggacaacacttaccaagcgaagattttgggagtatcatggggctttggggggcctgctgctgccacttatttactacccatggtagaattggcagtgttgaggttattgatgaacagtgcaggagctagtggagtggcaggagaaaccaggcacactgcgttttgaagtgactgagaagcgaggaagtagagatgtttctagatgaagaggaaagatgaacagtgcatagctagaagggaaatggctgtatcaaaagttttaaacaaatgaggagatatgtttagagacagacgaaagcacatagggattaaatttctagaagagagggttgtatggaggagataaagatcatatgtggatttttttaacttttaggttcgggggtacatgtgaaggttatgtaggtaaacttgtgtcaatgggggtttgttgtacagattatttcatcacccaagtgttacaccgagtacccagtggtttttcgtgctcctctccctcctcctgccttccacccccaagtagaccccagtgtctatcattcccttctttgtgttcatgagttctcaggtggatttttagtgaagaatattacccaaatatgttttagcttttctaagtatctgcaggtgaagagggacttggaattgaatttgtcgattattgaatcatagtacagccattatcctaactcaggcaactgtcttttagtttgagttactgccagtttgcctcagtttcttttcatagcacctgaaggaaatctctgattgtgttattgtgttatttttgtattttttattttttggagacagagtctcactctcagccaaggtggaatgcagtgttgcgatcatggctcactgcagcctctacctcctgaggctcaagcgatcttcccacctcagccttccaaatagctgggactacaggcgtgcaccaccatgctctgctaattttttttatttttggagagacaggatctcactgtgttgcctggactggtctcaaactcctggtctcaagtgatccacctgcctcaacctcccaaagtgctgggattacaagcatgggctactgcacctggcctgtgttactcttaataaatctggtgactataagaaatgtttagtcttgggcattggaaaaccattggtgatccattggaagggacagggtggtgaatacatttgaaatcttattgtgagcagcaattgaagaaattaggaatgttaggccatgagaaggagtctttggggagacatggtgattatttgccaataccagaatgattttcatttgaaagagtgcttagatgtgtactccagtggtagaaactgttgggaaacatgttggtttggtgttaaggaagatattttaaaacaagttctaataaaatatatgtatattttaaactggctattttaaataggattttgagacctaattgttggaaagattgtgtttttttttctttctttctttctttctttttttttttgagacagggtcttgctttgtcacctaggctggagtgcagtggctgttcactgcagccttgacctcccaggctcgagcagtcctcccacctcagcctcctgagtagctgggaccagaggcatgagccaccatacctggctaatttttgtattttttgtcaagatggggtttcatcgtgttgcccaggctggtcttgaactcttgtactgaagtgatccacactccttagcttcccaagtgttgggattacaagtgtgagctaacctgcaaccggtcaattgtggtctttttagtaataaa

SEQ ID NO: 99185 - DNA, 1997 bp, Homo sapiens
catcctcataggtctgctttcttctatttcttggtatgttgatgcttattagttgactagattttgctgtagtatctgtagcttttgagtattatttggaaacgtttgtagatccttaaggacattgggaaccatcctttaaaacttactcaagtagagaggaagagtgattcttggggaggggagaaaatcatctttgcaaataaacagattttcagaagtaattgccaacctgaattcttaccggtgcattttaccactaagggaaaaatgtagatcttcagttcaaaatgcattcaaaactcttctgtcaccaatgtgtgtgtgtgtgtgtctgtgtgtgtgtgagagagagagtgatgtgagaaagtaaaacttgtgggctggaaagtagcgaatttagtgttgttcctgtttatagtgtattttgttctgtgcaaagaaaataaaagagtttctgatttcaaggaacttatgataactgtagaaaaatggaaaaataagccttgttggaaagcttgaatgttactttatgggcatccatacgggaagaagagaatccagggagccaaaaatacatctttttgactcttaaggaaaaggtaaagcaagaagtaataaaaatcttttcaaatactctatgaaatattaaaatcctgggcattggaaagagaatttttcaagagggttttaaactatgaaattttgaacgacaaaaatgttggggccagacgcatgactcacacctgtaatcccagcgctttgggaggccgaggtgggcggatcacctgaggtcaggagttcgagactagcctggccaacatggtgaaaccctatctctactaaaaataaaaaaattagccgagcatggtgacacacggttgtaatcccagctacttgggaggctgaggcaggagaatcgcttgaactcgggagacagagattgcagtgagctgagattgcatcactgcactccagcctgggcaaagagtgagactccattaaaaaaaaaaaagaaacaaaatgttggcatatgtcctttacttgaataccttctgtacacttggtacaaaaatgcagaagtgtgatacacagaggaaaatgcaccttggacatggctgtagccaaaggtcttcctggcagaggggtaaaaactgagccctaggaattagggtaaaaaagaatcctgcaattcaactaatattttaatcctttccatgccagctgctccctttcccagaggccgcaagtgttagcaatttcttatgtatttttccaagtaaatatggaaatatattttccgccttttaatacaagtgatacggttctgtacttccaacatcaagtatttttattgaaagacttccctgaagatttggaaaaattttttcccatcgtttttgtttgcatttctttgcctgtagcagtaaacagttgtttttcagatgtttattcatcatttatatttctgttaatttttttcttgcctttgccaatttttcttttgggatattcatcttttccttgttgatttatgctatttatatgagctctgtgtgtgtgtgtgtgtgtgtgtgtgtgtatgtttgtgtgtgtgtgtattttttgtttacttatttagattttctattttgagctaggttctcactctgtcatccaggctggagtatagtgagggtctcactctgtcacccaggctgtagtacagcggcatgatcatagctcactacaaccttgaacttctgggctcaagggattctcctgtctcagcctcctgcatagctgggagtacaggtgcatgccactgcatttggctagtttcgttttttgtagagacaggatctcgctctgttatctaggctggtgttgaactcctggcctcaagcgattctcctacctcagcctctcaaagtgctgggcttacaggcatgatccaccatgcctggtctggctcctcatattttaaagtcattgaccatagctgtgcccagtaagtt

SEQ ID NO: 99186 - DNA, 1696 bp, Homo sapiens
tacttggagttgctaattcacattgatgtgcagaatgtcctactctcgcatcagaccttttggtaactccctttcatttccacttttcaccagttaaaggcttacaggaccctttcaaaccagatctcttttgtaaaattttctgtatttattctgttatgtattttccctatctacttgtgtatatatagagtgtttagtttgtttgcttatttcctcaccaaacctagcatagtgtaagacattggttgtcaattttgttgatctgaaatgttaatttgcaattatcaggtaaaatcaagttttggatcatttcgtatgttgtgcagttatggttttccattgctagtagtaattagatgcctttttatagatgcagtaggaatgtggggagaagcaacatgtagttttatctgtttcatccatttttttctttctttttttcctttttctcttttttttttttttttttttggcagagaaacttttccatgtctgtaaatagtgctgctgtcctgcgattgacaggacgaggaggaggaggaacagtggtgggggctcctagaggtcgaagttcttcaagagggcgaggtgagctttcatatgaaaaaagtaataatggaggaggaggaggaggatagagaacttacttttaaaatattttaatgcctgatttaataaaaactgttctttgacattaactgcatactaaatgtcctgaatatttatattcagaaccattttttagaggtatctcctctataatccctgatttggagcagaagagtataattctagctgtacagatttgaacatgagggagtctagacagtcccaattcactccaacagatccatgttcctcatccctggagagccttacactctgggagccaacgactcctgaagtgtcttaactatggaagcagcactgaagtacctgcagtcctctgtgacagtttctgtgtgaggggcgtgtgccaagagcttctccagccagagaggggctttaacaaaaactgcctcatcaggactaggacatttaggggtagaaaaaaagataattctgccacattcatttatttaacctatagttttacatatttttgtcttggaaaaatagttcttattttgatattacttgtttctttgatatctgccccctattttgggtttgctgattttctcctatatgacgacattcttaaatatttgtaatatgaatatttgcttaatcatgtagctcttacgttgactaaatcataacagtggtctaaatacaccttgtgattttctgtaagagatgctttagaaatggaagaattggatgtctgcaatgagtgagaccattgtctctgcatattgtaccaccaagattggcatgatcatgagtatagagtatttaaattctttataaatagagtaatttatctacagtctctctagaaaatgcattcaattgtgcattcctgggaagagatttcttttagtagtccactcagaatgtgggaatccaggtgtgaagtgtctgattaaaagtctccacttgttttgctaggtactattacatagttgtgtttttccctctggctttatttgtccatctttagagaatatttttttttttaacctgaggagatgttagactaatctgtaaaacttaaaggaaatacctgtgcaacaaaattttgggtggt

SEQ ID NO: 99187 - DNA, 1374 bp, Homo sapiens
ctaactctttttctagtgtagatagcatctcacagatgagaagaaatagggcaaatgctaaaatctttgcttttgtatcagagaacaaaggccaaaactatgaatgttcttaatttactaatttattcatttggcctttttgctgtatagtccttttttttttttcttgttttgtgatgagaacaaaaaaaaaaataactcagataaattgcagttaaggtagccactgaagaggaacataataaaggaacaggattccattgtttatgatgaattaatcataatttgtatttaaatttgtatttaaatacataatttatatttaaagaatttatactgttaagatgagcttcctagctgattaaaggtactaccttacaaactaccagtaggtattaacatctgaggagaaaataatgccaattcatggtaccatgaattggtactatgaaaattattacaagttccaagtcctacaagtgctaaaaaagttctccagagcatgattataactgatagtgttaatcatgtctttttttttttgtttttttttttgtttttttttgagacagagtctcagaggctggagactctgtcacccaggctggagtgcaatggtgtggtctcggctcactgcaacctatgcctcccgggttcaagtgaatctcctgcctcagtctcccgagtagttgggactacaggtgcgtgccaccacacctggctaatttttgtatttttagttgagatggggtttcactatgttggccaggctgatcttgaactcctgacctcgtgatccacccgcctcagcctcccaaaatgctggaattacaggcatgagccactgtaccgggcagtggtaaatatttcttataaacaaatgttaaatatgtaaataccattcacagactgacttgcagattgttttaaaaactaagtaattttaacagtcagctttgtatcactgtttctgttaaaaacttaaagatatcaataattaaaatttctcatttatgaatgtggcattgggaatacgtagttatatttatattaatgaaaaccgttaaggccaggtgtggtagctcatgcctataatcccagtgctttgggaggccaaggcaggacagcctgggagacatggtgaaaccatgtctctacaaaaaagtacaaaaattagacctgcatgatggtatgtgcctgtagtcccagctacttgggaggccatcatgtgatgggaggatagcttgagcccaagaagtcgaggctgcagtgagccgtgatcacaccattgcactctctagcccaggtgacagagtgagaccctgtcaaaaaaaaaattaaaggtgtgtagcatgaggaaattgggaacagact

SEQ ID NO: 99188 - DNA, 1011 bp, Homo sapiens
tactaaagtgtcctcagtgagtcaggtgataggcccattgtcttttatgttgtcacaggcaagcctaagcattgtgttcacttctgggaccaccccttgaaagggtccacacatttgagtaggagggctggggcatttgaagccttgcgatgggaactgtgtgaaggaaatggagctgtttagataggagacaagattgtggacagggcagagtggggaggagggcttatagggtcactctctatcaatacctgcctactaatcatgatcatgtgaggtgaggacttagacttgatctgtatgtttctaaagggcagaaaagggctaactgttggaaggttcaagggggcaggtattggacacaatcttaaaagatctaattattagaattgtctgaaaatggcttgggttgccttgggaaagtagtgagttgatagaacaatagcctggttttaactgttcacacatattcacactttggtggtttggaatagtcaagtttagtcgttgttatttgtggttttcatattttaactatattaatccaatgagggtaattttcttagccaccctctattaaaggtaaaggttcttttatttacatcccattggtatatctttgaaaaggcaggttccataaaactaaactaacatgaagtatctcagaatattaaggatactaacttctagttagtatctactattatataactgctagtatactaaaatatcatggtaatttccacatacatacatattctaatatgtcatagtcactttgattgaatgctttttgaaaagatgctcacttcaggttaactgctaaagattctgagcttttactttttggaagtaatccacttttgttgacgataatgtaggtctttaaaaaacattgttcataattatatcttacactctccaagagtagcaatactaaactagtttgttcaggcacactgatacattgatcagtatgaggtcaatatgagtatattgtgagatatccta

SEQ ID NO: 99189 - DNA, 1121 bp, Homo sapiens
ataatatgaaactcatctgacttaaatggaaccttagatctcaggttttactcattcacttatgtcaccttgggcagcttcacttaacaagcgagagggtgaactgtgtaagtgatgtagtgcctttaggaaaaaacataccatgtaagtcttcaatactactttattttcaaaggttaggtgaatcttgttaatttattatagaaataagaattcttgctgtctttatgtgttacaatagtcttgggttgggaaaatctgttggtctgatttctacttaagaatgaatgtctaagattttcaaacagcaaaagttcacaataattaagtttctgtgttcttgatattcttctgctattatcagtcttagaccactccagagttcttctttattttcttttccttttggtcaaatagtagaaaaatgtgacttgctgctgagccctgctcttcacacctgcttgcctttactcagctagtatttatttcaagagatgattcctgcctaggtcatcaccagtggggaaggttaatctttcatttttcccacagaaacctgaataagggaaatttcagaaaagaacagccacaaatctgtttgaaacctgatagggtgacttttttggtttttgttttgttttaaggacagtttctcttttttttattgaaatgaaaatcatgcaaatgatcatcttaaactggacataagggaaagggctcattttagcatagataaaataaaaaacagaggaaacataatttttatagactattagatttagaaagaaataatagagttcatctagtccaacctcctactggtgaataaacactgattttgtgtttatagaaaaaactatttgaagttggaaacaggaatttgagtttgaaaatgctttgttgcctaattatcttttgctttatctactgtagatttttttccctactcactcaagttatatctaagtaaagctttatatctataaagacttaaatatatttttgtatttatgaattagagccatcatgatgttttatatgatcaaatgaatcatacataggaggggaatgtttttacttaggttgctagaagtcatttagatgaatcaccgtttgattat

SEQ ID NO: 99190 - DNA, 1327 bp, Homo sapiens
tttagaggtttgtagttctaatgtatgctttataattagcctattcagagtttgatttattgatttgtatttttagagacagggtcttgctctgtctcctaggctggagtgcagtggcacaatcatagctcactgcaacctcagcaaatttttagaattttaatttttgttggtactgggctcaatatattgcctaggctggtctcagactcctgttctcaagccatcttcccacttcagccttccaaagcgctgggattacaggggtgagccaccatacctggtcttatttagagttttatgattaggctttatttgtttttgtcactttgcaaccatgttcgtggattctttctgtcctggatgatggattgctatctctttgcatattctaggctctgattagattggggggtagaaagagaattgtttcttggcaaaataagaaattccaggaagacatttctggatagcattagctttaaaagtaagtaaactagaagaaaaaggttgaatagttcaatgaactaaaataatcattaaggggttaaataagaattttaaaaagataacattagtataattagttttctgctgcaaacagttttcatcagtggttatccttttctcaaggtggtgagtagaaatctaatgtgtgccttccttgtaatcatccttgcgtatgacaaaggtgtcttaagactttagtgtagcagttactaggaacagaacaggaaatgcagctttgcttcccttgagtgagcctctcttgtttgctacaattcaggactatgagtttatatttgactgtcctctttgcttcttcctttagaggtagatacccttgagagtgctgcatacccacttcctgccttttaatggggcttgagaagggcactacagacttgtggagctaggttgttgcttgggtttcctagttcctatatctcgggactttgaggctttggagactgcctttctgtgttgttggaattggatattggccacctgggtatatacaactttcttttgctctgaggtaacttaacatttattggtgattagagacttttttttgtattttcttcagatttgagctaatggaacactgggatgattgttcagtttatttaggttagatggcgatttcagtttcatatgatatagactttaaaaaatcttagtgcattattttaatgttttataacttattaccctaacaagttgtcataatcatttagtgtattcttttttcttggcatagctacttaatgacccttattttgttagattatttttaaatgttttaggagacctgatctctacg

SEQ ID NO: 99191 - DNA, 1085 bp, Homo sapiens
gttacatagctgtgtcattttgggcaaaccactcaatcccattggcctggcatccttagattaaaacaaagaaagtgaaaaaagagggaattatgataataagatttcttaaagctctacagacttatgtaaacaaacatatttccacttcctacaaaggatacaagtttcctatatgatttcttttatttctgtatagtttgatgtctgctcgtatggtttaaaaaattatactattgttacctgatatttaagtctcatcagctgatcccaatagaaagtgaggtggaaggttgggaaggtttgcttctattgctgtgtgtgggctgtaaaatatttgcccatttataaattatttggaggaaaaatagtacctattaaaaaatgataggcagcttcactgatcatcagaattcattctactcattgggttgtagcacttaaaagtatgtattttctgttgccatgataaaaaatagtatagttcatactgaggagttaagataaaggctataactaacaaacattaaatgaagatggcattactatgtatttgttcatgtctggtgtaaatactttaagactatattgaaagtcttataatgatttctcctgccctccacaattagggcaaacactattgagttctaaccctgttatataagctcagagattctattttaatttctcagttgcagaagtatctattaatttccgcaataattccatgcttaaaaatttacgattaggatactcatcactttcttcttagattacagaagtaaaaacaaagtggcttattcttttggcatttgtttttttatgctcattttgggtttttgaaattccttccaaaagaaaaagactttttttttcctcaagccactgaattttttttcctaaggcctttatcctctactgatatattgtaatagaaaattagtatacatttaataaaacagttaagaaaatttccagtaatacattcaatatggctgttattgcatttttaagatttaagggaaaagaatatagaaaccttactatcctacactatagataatgtctttgttttaaaaatctgt

SEQ ID NO: 99192 - DNA, 1029 bp, Homo sapiens
gaaggggtgcattttttccctctaatcaggaccggtctttagtaagtttgcataatcttacttaagagtttttttgaaagttcaaagggataaaattccctgcaagatttttcagccgtctttccttatatagcatgttgaagtgtgagatatttcctttactaatctttttttttttccaccatgtctttggggaagatttatttggataaggacttataggcataaattaatgcattgattttcttagttttcttctcatgtctcatcagaatggctaccattagttccagaactagtaatatagataattacgtgaaatcttttatttttttggttaggaaacaaactttttttttttaaaggctgtatacaaagaccttgaataggaataaaattaattgttctgtacctgatactttaaaaaatgcacacctgtgggaaagaaccgaagaattttcttaaggcttattttaatgatgtttagaagatgttttcctgatcagtgtgatgaagtatagtgttaataaaacatagtgtacagtgtacagaaaatgtaacacaacattgaaatagtgtttagctggaaaatgtgatccagcttgttggaaccctgaaacgtgctgtggtatggctttgtgcagtgccttagtgaacagtacttttctcctcctccgttagctgctgattttaaaactttgaccaaatgtcacatgtaagaggatctgagaaacaaagactgtgattgttcaaagtaaaatcttggaaggcctgctgggaaaattattaatgtagaccaatataatgctacttagaaagtgaaatccgcctttgtagaatcctctccgtcccccccccgccccacaatttaaaaaatatattaattccttctttgttttattagtaccaaatacttcaacacaagttcagacacagcattagaaacactgaccttcagaactagggaaggtaaagtataaagaaggatttgtggtgtgatgctcattccctgcatgtactggtaggaat

SEQ ID NO: 99193 - DNA, 1509 bp, Homo sapiens
gatgcctagtctctttccatttccacatgtccaagccaactacgaattgccttcccacagatttcaggcagcctctgggtatgtaccagcagacagctgagcatgagggctgtagggttgtggtacatattcagatggcctgaggacctttttcagagattctgatacactgcagtttctccagtctctgctgttttttcaggactcttgttaaccagctgagcaggttatttattcctcagggagaaagtcgtaactctctgggtacagaagttaaactgctctgtcctagccaccctgagttttgtttataagtaattgtaggggagaggggtggtaaatatcaacacttgagtgggatgccctttcaccattttctttggtgttagatttttttttggtgttgatcagataatatatatctgaacagagtaatacaaagtcactccttaaaaaatttgcacataaacaagcttcaaagtctgtcccataattccacttttgcttgtggagcttgtggagattgggcacttgtaagctccaagtctcacagctgtagattttgttggctgagtgcctctttgctccatctgaagttttccataaacactatttttggccgtgggtcaaacatgcacacaggtgcccttttactgctctttctccttaggaagtccactcagttagaccaggcaaaaactaacactgcattttaatttaatttaatttttagatgaatcctatttggacttaataaactaagattgaaacaaccaagtatttattgccactggggaaattgtatatgtagtacgtatgtattttagcacctttacataatttgcttttaacgtaaggacataaaatatatcgttttcctcatagtcatgtttgctatattgaatggaaaaaaatacatttaaaatttgtgtttctttgccttttgagggtcacagacacctttaaaattctgacgaaagctgtagacccttttccctgaaagaagaagaaagcatgccagcacaaagtgcatgtccagtgcaaggattcacagccctgagctcattcattgactgtagattaagaatatttggttcaggcatgagtttgtaaataattcaataaggtttactttaaaatcatcttgtttgtaaatctgttaagattttaaaagtaagtcaactgaaatacagtatttggttagtcaactttgtcatggtgctgacgttacagaaggaggaagcctttgattttgaatgctgagaagggccatgtaactgtctctcactcattttagtctccgttgctatgaattgttggaatttttagacgtgaagggaacttagatgtcatcttctaaactgcccatgaatgactttaatatttattatttatttatgtttattttattattattatttttggagacggagtcttgctgtgttgcccaggctggagtgcagtggcacaatctcggctcactgcaacctccacctcccgggttcaagt

SEQ ID NO: 99194 - DNA, 1717 bp, Homo sapiens
caacatgcctgacctgttatttattttaaattatatcaggaatacacacacacacacacacacacacacacacacacaacttataaagataatggtctccttggcactcccacccacccacccatccaaatttacacaagtaaatctgtaatcaatttggttagaagggatttattttaatatttttggggattgcttagatgcagtataatttttagttatattagtagtaattggaaatgtgtatttttgtgactgaagtcaccttctaaataatttctagaataaaatttttatattgaagaagttggtcttaaccatttttttttcaggagcatgcattttgaaatcattctgtgggaagatgaaaacaaatttagttctatgtctcccctttttagagatgttgacactttccttaaatgtaccatgcatgatttgtctaccacccttttagcttgttatacttaaatcccagatctctgtcttcccatttcagtttctctagaatttctggctgcttccaatgggtcaaatttatgagtgaaccattaagaatcacttagtgtagaaataaaccatgggttaggagtttgaacactgcctaggttctgtttctgatttgattatgactcagctgtgtggccttgggaaaccaccttactggtatccctatccttgcagaagcaagagagttaatgatggttgacttaatctcttgtggttattatgaagatcagataagatacattaacacattttgccaactgaataaggttatttatttacatgtgtgtccatggacctggggatcaggtgctatgtctcagccttatctttgtttttaatcctgtgtctctaattgtgtttgtcagtaaaggagtgagtcatttaatggttgctagatgtttgagtaaaacaaacaagcaaacaaatggtaaattagtactatttctttttaaaaaatttttttttacattttaaaaattatagataaatacagagatgaggtctcaccatgttgcccagtctggtttcaaactcctaaactcaagtgatcctctctcctcagcctcccaaagtgctaggattacaggcgtgagccaccatgcctggccagtagtactatttctttgggaaaatatttagtagtagtcaacaaagttgagcatactgtgacctggcagttttgatgctaagtatatacccaacagaaatgcaaacatatacttaccaaaactcatgtccaagaatattcgtagaagcacaattcttatgatagcaaaaaggtagaaaacaacctaaatgtttctaagcagtagcataagagtaataccgtgtggtttgtttatacagtgagatcctgtacagccatgtaaaagaccaaaatattccctgtaacaatgagaatgaatctcctgtgcttgcttcggcagcacatacactaaaattggaacgatacagagattagcatggcccctgtgcaaggagaatgaatcttcgtaatgttcagcaaaagaagccagatataaatgaatattccattttataaaaaagtttaaaagcaggcaaagctaatatttggggctagaaattaggatagtgtttatcttgggaagggctgattgggaggacgcatgaagatttttgaggctccttaaaatctttttttaaaaatctaggtggtagttaaattatatgtatttgctttatgaaa

SEQ ID NO: 99195 - DNA, 1027 bp, Homo sapiens
ggtggcgtttgtgtgtgtggatgagggagctatgtatacatgtgtaagtgtacccatggacagtgtttggaaagactttataagaaacttggtgatggttccttctggggagtacgactctgagggtcttgtgtaggaagatggacttttcattgtacgctttttcaaaaaaaattttacataatatttttgtttaaaaaaattgcccagtctctgaacatggctttaagaaatgtgtctaataatatatacatatacccactgttattttagtgatttttttctgaatattgaaatggacccatttgcaggaaagcttgatttgagctgtgaagtttgttttcaaagcctatactggcagaggctcatgtttacttaccatattattttctttatagggagaccaaattttgaggaaggtggaccaacatcagtagggagaaagcatgaatttatacgctcagaaagtgaaaattggcgcatctttagagaggaacaaaatggagaagatgaagatggaggttggcgactagctggatcaaggagggatggagagaggtggcgacctcacagtcctggtaagaattctgttgagtaaaggcacacagggactgaaataagggaaagtttgatggaaatagggattaaatgaaaaagataaactggcttaaaaaatgtgggggtggattcatattatttatgctgtcacagttttattactagaaaaaattgcaacataaaaatttcctacatctattcagttgattgaaatcacttttctatttttctggggcaaatagtgtagtttaatgggaagcacctgcgctcaactgcagaaatgagggtttcattcagttttgtctacctctaaatctctgaatcttttttagcattctttaagatttataaatgtgtaaaaattacacacttgaaatatgtgcttccctccccaacaatgagtgtttttcctaacaagaaagggtttattctttcattttttcccttttgaaaatgtgatttaacctta

SEQ ID NO: 99196 - DNA, 1784 bp, Homo sapiens
agaaagaaaatgctttaagattgggcaaaaggaaggtgtaaacttcagtatggaaggatgtctagtgcattaagtctggatgaggagttggcggctaatcagtattttaatcaagtacctaggacttactgaaagtgcgtacttggaatacagtgtcctttaaatgtactgcattttagatttatcttttaaagctttagagtatgttgcctggctcagtacttaagtactgttgtcatctcgtaatggtacatatactctgaactctgaacttcatttagttgcctaatgttctctttactaggtcagtccatttgagtttgcggtcacttgtagttttctcctttattttctattcctgattttcttattcaaatactgtcataaaacttttctaaggtttgtgtcctccttctcatctcagatggccctcgttctgcaggctggcgggaacacatggaacgacgtcggaggtttgagtttgattttcgagatagagatgatgaacggggttaccgaagggttcgctctggcagtgggagcatagatgatgacagggatagcttgcccgaatggtgcttagaggatgctgaagaagaaatgggtacatttgactcatctggagcattcctttctctaaaagtaagaaacgtgttttaaatgtcatgaccagcattaaccttataccaaagccaaatctgctgttgatctttggttttattctctttctacagaaagtacagaaagagcctattccagaagagcaggagatggacttccggcctgtggacgaaggggaggagtgctctgactctgagggtagccataatgaagaggccaaagaacccgataagacaaataagaaagaaggagagaaaacagatagagtaggagttggtaaggcctcttcttgccctttgccttttttttcctccatcaaaccaaaactttcgtaagttcaactaagattacttcgtgttccagaagctagtgaggaaactccccagacctcatcatcatctgctagaccaggtactccttcagaccatcagtctcaggaagcatcacagtttgagaggaaagatgaaccaaaaactgagcaaacggaaaaagctgaagaggagactcggatggaaaatagtctaccagccaaagtgcccagcagaggggatggtatgtatttgtgggaatagacaagctaaaataggattctgctgaggccagtgatcactgataagttaggcttctgcttatgcctcctagaactgcttttagtgggtgaattatcggaatagattattttaccagtaaacccagtcaaacagtgcttctcacgtatgtgtccatctcagaattaccaaaacagagttcgaatctgcaagggtggagctctggaatctcatgtcctaaggtgttatgacatagccaccctgtcattactggtgaactgggtgtcatagcctttgcattagtttgattcccgtattagacagttaccttcctttcatgtgttgactaattatgtgcccagcttaaattaccagatgacacaccaaaatgccatttttctaaaagaggacaagtagagaacatatgtgaatctgtggcagaataagcttaaaacatatctctttcagttgttagtgtattggtttaagttgctcatacactttattaggcaatattaatgctcatttccatgtttcttcttgtacgtatttaaaaatgtcattgtaatgcctgacgttgaagggttacttgattcatttaccataaaaattgat

SEQ ID NO: 99197 - DNA, 2449 bp, Homo sapiens
actggttctgaggtgttgacgagaagaagttaagtggagatggcgagagagcagttgtgaatgagggactgtagctagatgggagtagtttagggttagagagagaatgaaaattgaaaagattgcatatacttagtaggggtaagaagaaaagaactttgagtaattcccatttttaaagggtagaagaagaggaaccagagaaaaatcctcagaggtaaaagtagagacaggagagtagagtgcagggaaactaaggaatggggatgttttagcttagaattgagttgataatgtcagatgctactaagagattggatgaggaagactaggaaaagtcattgtatttggcaactttgtgtcactgcttatctttgagagaggagctttactggaaaggtgagagtagaagtccccttatagcaggtgtgagtaaagtggagacagcatgtatagactatccttttaaaaagtatggcaaagaatgagtcagtgagaggagcaggaatttggagaagctatctgtaattgaacaaacaagatttcaaaggggaaactgcgattatacctaattacttccatcccccttttccttcttaagaacctgcacactgagaggttagaaataggaacaaagacagaacctcttttataatttgtattcctattgagaagaacatcctgcactgtacaggtagactccaagtgcttctaattatcctacaacatgtaatatattgaattatattaatcatgacttgaaacaggtacttactgagcataatcattgatattttcagtaaaggttttgatgagagatgacatatctttcagaagatttagggtgcattgttaacttttacaattggagacatgttatgaagaaaggattagactgattgtttctaagaggtcaacctgtaactgggtagatgctctggtgacacaggtaagccctggagaagcaccttttagataccttttaactcttaccttttgtcattctgtgtaggtaattttgtcactctaggaaggaatattacgtttctccatagaagtagcttcactgttcatgacagggctcacgttttctgtttggcccatttagcaggctgtgcgacttgataatgtagttagccttcacagaagtctctgtatttcaaaggattttcatctgattttttccccctagaaatggttgctgatgtccagcagcccctgtcgcagattccttcagatacagcctctcctcttctcatacttccacctcctgttcccaatcctagtcctactctccggccagttgaaacaccagttgtaggtgctcctggtatgggcagtgtttccacagaacctgatgatgaagaaggtctcaaacatttggagcaggtaaaaatcctgttaattctttttgtctcctcttaaactgccgtaagaattagcaggcattgcatgaatattcaaacataaaacttttgtcactagattttaagtactggaaaaactggatatttagtgtttatttgtacaagtcattgtctttcaaatcatttcatgcttataagtttctgctatgtagtagtcattatgtcaggttattttttgctcttaggttgcccttagctatttacttttcttttttctttttggacattaatggaatgccaaaaatggtgaatacaagcagctgtggatggtcactgtatcttttgtattttttgcttcaagtataacagggaaaatagttaaactttcagagcattaacatcttattcatgtctctaaatttccccaagattgtgtgtaccattgttatatgtaaagtaagtgatagcttgcttttctacgaaagaatttctcttccctttggggtgggatggttagtggcaggaaatgctgaagaaaggaaaaagcgagatagtgtcttagtaaaacttgtaaaacgtttcatttataattgtattaattgagccttttgttctattaacattctttttacaggtttagtttataccatttagagttgaccaacagcttattagtttaaaaagtactcttagccaggcaaggaggtgcatgtcctgtagtcctagctgcttggggaggctgaggtaggaggatcgcttgaacccaggagttcaagaacagtctggataacgtgatgagatctcatctctattaaaaacaaacaaagtactcttactagtgttgatttgaaccctgggctttgatccagagcagtgtttgttttaatcttagttgatttgattagtaattttcagaccttgaacaagacttggcatctctgagctttagcatccccctctgtaaaatggggatagtacctgtttcatggcattgttgggagaagttacctgctatgttctttgcatagtgactttcatagatcaagtagtccaaaaaaaaggggcaggcactgttattatgt

SEQ ID NO: 99198 - DNA, 1020 bp, Homo sapiens
attcagaacatttccatctccacagagattcttcaggttgctcttttatagccacctgagcttcccttctaccccaactcctttgttaacctctagcaatgactaatctgttctccagctctgcattttgtcattgcaagaatggaatggaatcacacttttggagattggttctattcactcagcataattctctggagattaatccaggttgttgcatatatcagtagcttgtgtctttttattcctgagtagtattgtgtgatatgaatgttatcaaagtttgtttaaccattcacccattgaaggacatctgggttgttaaagttttggggctataatgaataaagctgctataaacatttatggacatgtttttgagggaacataagtgttcattcctctgggctaaatgcccaggagtgcatttgctgagttgtatggtagttctatgcttagttttaaaagaaactgccaaactgtttcccagagtggctataccatttcatatgcccaccagcaatgtatgagcaatccagtttctccacatccttatcagcatttgatgtttttgctatttttctgttttaaccattctgagaggtgtgtagtgatacctcactggggttttaaatttacattacatttccctaatggctaatgatgttgaacatctttgcatgttcttactggccatctatttgtcctcttcattcaagtttttcttcatgtttcatgtcttttttgttcatgtcctaattggattgtttgcttattttacgttttttttttaattcattttaaatattgttaaaatacacttaaaatttaccatcttagccatttttaaatatatggttcagtggtattaaatactttttcatcttcccaaattggaactgtatacattaaacaatagttcctcatttcctccagtccctggcaattaccattgccagggactggaggaaatctgtttctatgaattttctatctgtttctatgaattttactattccg

SEQ ID NO: 99199 - DNA, 1511 bp, Homo sapiens
tacatattagtcacggaaacacttgattctctttgaaaacacaacccaaatatatcatctaatgaaggaattgtagttctttgaaattaatggaaatggtaagggaaagtctgaatggaagactgaatacttagctataatgatcttttcaaaactcgaataacctgtgcccatcctcttcacaccccagctcctccccaacagggaaacggaatccttcagtagcattccagcagatgtagaatgaagaccaacatcttatcctggcctacctacgaggtcctgcaatgcctggcaccttacctttctaagctcatttcagagcttttacctttatctgctaggcttcaacacagttgacctctttgactttctttgcttcctctagttagaataaacattcccctctcttccacttcatttgcctcttgccttctcattcataaagtttctaaatttgaggtttgccttaaaataaatgttaccagtgcttcacaatatttttagggcttaaaaaaattagttactggtattttaattaaaaaatggaaccatggccgggcacattggctcacttctgtaatcctggtgtgggagggatttgggaggccagagttagaggattgcttgagcccaggagtttaaaatcaccctggacaacgaagtgagacctgtctctacaaatagtaatgaaataataatgataaaaaactagccgggtatggtggcaatcagtggcagagatgggatgatcacttgagcctaggaagttgaggctgcagtgagctgtgattgcaccgctgcactgcagcttgggcaacagagtgagaccctgtctcaaaaaaaaataataaaaggaaccgtaatgctagtagtgatctttctagggctctgacactggggtactgttggcagggaaacccttcttcctcttgggctgctcttggaccctctcagtagtgttccttttggaggtctttcacctgtacctcattttttcttctccaggttggactgtctggtgacgggctgtagttaaaagttaccataaacctttttttttctttttaaagagatggagtctcgccatgttgcccaggtcagtctcaaactcctgggctcaggtggtcctcccaccttggcctttcaaagtgctggattttaggcatgagccactgcacccagccaataaacctttagtgtggacactgcatttctacagtaaagtcaccattgacttattcatcaattgtatattgagggcctgtgccaggcctcgtagtaggttcttaggagatgaagatgagcaagacctagcctctgtagtcaagggagtgtgtaggtgaggaaagtggctttttttccattttgtttcttttaaatgttgatcttaacccagtatttgatttcacaatccactaatgtgttgagacctatagtttgtggagagcagtggtctagaatggaagattcctaggtgagaggaattatttctcacaccatcctagttg

SEQ ID NO: 99200 - DNA, 1925 bp, Homo sapiens
agtcacccagctagtggcgtcttgccaccataccttctaattttagtgttgtcatttatttatttatttatttatttttgagacagagcctcactctgtcatccaggctggagtgcagtggcatgatctcggctcactgcaacctctgccttcctggttccattgattctcgtgcttcagcctcctgagtagctgggactacaggcgtgtgccaccacgcccagcctatttttgtatttttagtagagatggggttttactgtgttggcgaggctggcctcgaactcccagcctcaagtgatctgcctgcctcgcctcccaaagtgctgggattacaggcatgaaccaccactcctggcttatcttacttttaaataccagaagtttagaagatgacacataactttaattttgtaagctctttagtttctaagtgcctcctgagtggctcagctttgaatgccacagaggaaaaaaaatatatatgtatataagcgagagggtgggaaagaagttaaagttaattattttaggagtggtgtggaatgatggcaaagtcagtcaggttttgttatgtcctttttgtagaagaaataagatttgctgttcttgtggtgcagaggttggcaaagtctgacctttgggctaaatctggcctgctctctatttttatatttataagcaaagtgttactgaaacagacacacctgttggtttgtaggatgtatattgctgcttttgccttatgatggcagaattgagtagttgcaacagagagtatatgagctgcatagatgaaactatttactctctggcccattacaaaagtttaaccctgatctagtgaagaaaaattacctaaatttttccaagttgaagacgatcaatgtatgaatttttatagaagtgttacattttttacaaagggtacgtcatatggttaaagctactaatttgaatctgtttcatttttcatttgatttctgataaaaggttatctttggagtttaccaatttttgacattcgtgattttaaaaatattttctctgaatagaccactttgcactgaattgtgaatttttttgctatcctctttcactcggaaacacgccatctatgagttcagttctttctagaatgaagcatagaattttctatgtgtctattatcataatgaagaattataaaatatatttgatagctatttctaataatgtctcctggggggctttgaattgaactttgtctttcagcatctcagccatgtgaactaagtgtggattgacaggttatacttttttttttactttttgaagacaacaatatgcacaggttttggcccaacagcagaaagcagcactgtcttcccagcagcagcagcagttggcacttcttcttcaacagtttcagaccttgaagatgaggttggtggtcattccattatgtgtcatatggggtgcatgtgttgtgaaagaaagagaagaaaggagaaattctggtatagtgtgtgatttctggcactggaacactcccaacacatacctgcatgttgtatgtaaaaaagtatattttaaaaaaatatttcaggtggagataagcgtttatttggtcttttactcatagatataaattttgattaatcaaaagaccaaagaataatgggaactcttgagaaacagtgtcatcttgtggaacctgcgacagaaaaactgtagcctaggattttaatttcacttttactcatagtatctcaaagtattagccacaccacaaaaggttgtaattttctagaactcagaagccattaaggtaggtctaaggaaaaggaaattatgctagaagtctagaagaaatttctgctgtttcagattatcgttcagagtaatatttctcctgaacaagtatcagtcactgctcttaaaaa

SEQ ID NO: 99201 - DNA, 1001 bp, Homo sapiens
ttgagccttaacccatcccatgaggtaggcagtttaggtggtaggagctccattttatggatgggcaaactgggactctgagaggctgtaggacttgattaatgtaacacacaggaaactcagaactaaaatgcagaccttttttcattataatatgctgtctctgtgacttctattgagatgatctgggttttttaagatacggatatacagtatctttaagatatacatatcttttaagatatagatatacagtgggtatatccatcatttagaagtcaatatgtattaccatagaggattccagaagtgtgatcattgtgcccttctctttgttccaccccaaactgctttggtagtgttaagttttagtaaaagagtgaaggcgttttctagccaaataacctggagaacctgctaatctagaaattcctcttcatctttttttttttttcctgcaaatgacaagaacaagttaattttttatttcccttttgcagaatatctgatcagaacatcattccctcagtaactaggtctgtgtccgtgccagatactggctctatctgggagcttcagccaacagcttcacagcctacaggtaaaaacttagattaacctttagtaccactctgaggattcagagtctaataataattttacaattcagttcttaaaaaatatattaggtttctgaatccattttgtatttgatattaacaaaaggtccattttttactagatccaagcaatattgaaggtgttactgaaaatatacttttaaggatttgtttgaatttatttagtggatttttttttgagtcagcatctcttttatgttgttctgatcagtgtggaaaaatcatttaaattattttcgatctctttagccagatcgggaaaaaaagcatacataaaaacatagtaatggtgacctattcttttgagttaggaattaatacaagctaggcatggtggtgtgtgcctgtagtgctagctat

SEQ ID NO: 99202 - DNA, 2335 bp, Homo sapiens
tctctagttggtgtgcagtgagaggctgtaaggttgctggaaatctatgtgctttggagtgtaatacactgggatttaaatcctggcatgaccacatgcttgccatgtgcccttgggagtgttagaaactacttctgacccttagtttgttcatctgtaaaaatgggggtatgaatagaaacattatagggctttgtaaggatgaagttaattccctgataaatgcctggtacttcccttcattctagatgtgttgaaggatattcacagaaactagagtccattggcagttcagtcttctcagaggcaaaacagatgtgtttggtggagctcatttaggcacagggaagcagcttttttcatgattcctacggatatgtcaccatgtgtgtaagctctgtcattcctcgttgtttcttttgttgtcttacagtttgggaaggtggtagtgtatgggatcttcctctggacaccacgacaccaggccctgccctggaacagcttcagcagctagagaaggccaaagctgcaaaggtctgaaactcattcttctgcaacagtgcattgtcatctggctgcaggacataaacattgctgtttattcatctctctagctagctatgctttttactttcagtttactgctgcttagctggtataagtacattcatattgtatctttactgtgctctcttctcccaaaaaaaaaaaactcaaaacagaatttaaattactatgtttggtttggttagttggcacattgttgattatagacacatatatattttaggtaacattattcatggtatgaacatttgttataagtaacaagaatgtgagaaaatatccactacattgtttatgagactcctgatatgtggcatgagttctcccattgaatctttgtagtggtatttgtttatatttcttagtatcctcagacgtagcagccaaaaagcccgacattaacattagattgtgtgttccattcacattttttggaagagctaaatcttgaattttggttttagtacttgccagaaaagaatgtctacatcaatacctagtgtcattgtaatgatttctaggttctcaggcgtacaagagagtgttgttgctgttttatacttaatgcattcttatcccctgaggtcgtgacagtctccttagagttcccagaatgtggaaaggttcatacaacattgctgttaaaacgttatagccacactgttaaatgttcaatcagaaagttatttgtagggatgagtaaagaagtaccatccaagagcattctgatgttactctcatgggtggtataatggtaacgtggagtgtggaggcaagtacaggtgggaggaaagtgcattcaattgagacagtcataaaattcttctaattactgtgatatgtcacagcttagagctcttacagggtgttgatgttgtagcgtatgtcagaatttccttccttttaaaggttgaatagtattaatattccattgtatgtatataacatattttgtttatctattgatctgttggatcacctggttgcagtgcagtacggtacaagcagctgattgaatgaacgaatactactggtcagtgctttcggagtgttcctgtgcttggtttcaagtttctaagagtactcttgtgtaatcacagctagagcaagagagaagagaggcagaaatgagggcaaaacgggaagaggaagagcgaaagaggcaggaagaactccgaagacaacaggaggaaattcttcggcgacagcaggaagaagaaaggaaaaggcgagaggaagaagaacttgcccgaaggaaacaggtatgtatctgggaactctgaccataggattagtgcttgatgagggctttcaggctgctttctttcatcatttcacagatactcctgaagtccacaggattggggttagaaccttagaagactcactcacctttggaaagaatctctgtttttcaccaacacccactgtagggatattcttcagtcctagtaaaccactagaattgatattctttgcatatttcctagagttttataaaccagttagatttcagaagttctgtccttgcatctaaaaacaatgagaaagtaactttgatgtgcagcattaaatgtcaaattttaaaagttacatgggctttaaaaaaattgtgctaacatatacataacataaaatttaccattttaagtgtactttcagtggtgttaagtatattcattcatattgctgtgcaaccctcacaaacatgtctgtagaacttctccaactttgcaaactgaaactgcatatccattaaacaaggagc

SEQ ID NO: 99203 - DNA, 1745 bp, Homo sapiens
gaggtatatattatttgtacttgtgttttatagccctccttttgacatgaattatgtcatctttccatgtcaaatgtgtatctaaaaatctacatcatcatatttgctagctgtattaaatttcattttataagtaaattataataagttgaccaattccctattgttggacatgagggttgtttccagttcttcattgttagataagtgttcgaatgaaagtccttgtagttaagtctttgcttaaggatttataaccagcgaggtatatacttttaatattttttggtctttttttttctttttctttttttgttgttggggggaattcaccattcatgtgcttggctcatttttccattggggttttcctagcttcacttgaaaggatccactcttttaatagccccacagtctagcctttaccacttgttgcctactttttggccccaagaggtgctctttgaaaaacaaaaaagatccatgctgagatgaaatgagaactacggttaattcttagagtcacactatactgcagcatatagaggctctaaggattattgcagtaaaaaagtatgtttagttctgtgttgcgcagttttctataaatgatctcaacaatgggacttctttctgtgtaatacttaatagtattggtgggacttttgatcttcagaacacgttctgggacacatggctttactcattacttctgactgggagaacttatcttaccccaaatttttggtggctatgttgatttgccctctctatgccttaagttcccagttaattaaaaaaatagggattaaagataccagtggagaaacaaagctatacttctaatgtagctctttctacggttaatcagtaaatgatgtagctaatatagaaaccagggtagacttcacagtttattgtaatttaactgctaatattttaaattcaattttcttttcattgtaatgcgtccaattccccaatttacatgtatactttttactccagatcatgattacttttatgtttactgtttaacagagtcttagcagcagatagcctattactttccaaatatgacataataaattgaatgatagacctgagtccctcccccaccccccaccctccatcttttttccttaggaagaggctctgcgtcgccagcgggagcaagaaattgcattaaggcgacagcgagaagaggaagaaagacagcagcaagaagaagctcttagaagactggaagagaggagaagagaagaggaagaaaggcggaagcaggaagaattgttacgcaaacaggtgaccagatggttttgtcttctaattgttcctttgaagctgggaattagtgatttagaaaatattaggacattaaggtagcctatctaaaattttttcaggttgctaaaaattaaccaaaagaaacctaactggctcttattacttctgtctaaatttcttcaaatgaaaacctgttttctagaggaaaaataaaatttgtcttatctttctggtttttgctcagctgtatagtggaaatgttgtaaaatacatggtcttttttaaagcaagtttcaaactaaagcggaatagtacaacaaattctcataaatcacccagcaataatttctttttttttttttttttgagatgagtctcactctgtcgcccaggctggagtgcagtggtgtgatcttggctcactgcaagccccgcctcctgggttcatgccattctcc

SEQ ID NO: 99204 - DNA, 1022 bp, Homo sapiens
attttttttcagaaacctaaattctgttagacatagatagcttccaagttacattgtgtgttgattcattctttggtttattcatttaacagttaacatgtttagttaatgtactacatgccagttactgtgcttgttttctggtggagtataagactttttaggaaattgtttctgtcctcaagaagcacagcctatgtgtgtgatgaatatacaagaagtaagcgccatcattaggatactttcagctccaaaataaaaatacccatttaaggtggctttaataataaatgaaattgttgcctcacactctaaggaggtctgcccatcagcctgttgtacacttgcttcagtgattcagtgaatgccattaagtatttacggcctttgcatactcctcctctgccatttcctggtgtgttgacttttgagttcagatgtttcacgtcatggttaagagttttggatatcacagtgtgtgcaacctgtatccagacaggaaatggcccttctctcatgctttcttccttttatctgggaagaatttcttccttagaggtctcccagtagacatctctttgaccccagttggatcacatggctacccctagttaacactggaagcttaaaagcaaaatctgacattttaaacctctgatgtggcaggaggctttgtctgccaggaataagcctgacaaaggtagtggttattggataggtagaaacaggagctgccataggtggactagaagcaaatagataaggacagggtatagttgaccttaatcaaaaggcaaaggtgaagtatacctcctaaaggctaggcaagtctccgagtggctgacttctatctgacctacgttttaaagaatgaagtagaggaatatgatatgggtaagacaaagcattgcagacacagcagactccaaagatgaagggaatttcttagtgaaatgagttccgcagggcacaatggaatggttttgagggaaggaagcagaaggaaaatgagcccaggtgag

SEQ ID NO: 99205 - DNA, 1789 bp, Homo sapiens
agttttgcctctcaacacctccctcccccagtctttgttaacttccctctgcacccctcccccaccccagggcaggtgcattttgagagaaatgccctattgtctgtcatattggctaaaaaatgttaagagttgattatgttcagtagtgttgaagacattcatttgaagagttgtttggcagtatcagtgatggtttaaactgtttataccttttatcctatcaatatccactgttatagatttctgctgtaggtccattcttttggggactgtttggcattttatttgttttgatctatgttcatgtattatttttattaaatacattttttaagtctggttaggtttcttttttattgtgttcgcttgtttgatgcctcagtattaaaagtgtgtctttttctggccaggaagagcaaggggttctctgagaataatcaggctttgagaatattgaaatattcaggacctagatatttatactctattttagtcaataatcttaagggatgggaaaaataaaattattgattaaaagcagcttaatgctcatgactagaagctacagcctggttaacagtggctccctttcataaaggctgatcaagaactatgccagcatctctcatgagatgagaaatctcatggtgctaccctcagaaatcgtgtccttaacactttcactggacagcagcatatcatgtcctttgttgctttcgtcaattaaaaaatccttaagccaatttagtgattcttttgtttactcctctttatggttgtatattgctgtttatgtcagtaccagatgtaacaaatttgttgtcaccaagaggtagatgaaatgtaagtgtgtatgtgtattataagttgttttaaaataaacttaggtttggagcagtgacaaaaacttaagcaaaagaagctgagaggatagtaagtaaaagcaatgaagaaggaaatttgaattgaatgtggtaaatggagttgagagaaatgcatttgttctgggtatacataatgcattattgcttctttgtttcctgtccacatttcctcatgaactttctggccttcccttttttgttagcttccttcttcttcaacgtggggccagcagtccaatacaacagcatgtcagtcccaggccacgctgtcgttggctgaaatccaaaaactagaggaagaacgagaacggcagcttcgagaagaggtaaaattttaaagtaaaagggatctagtcaagcgatgttccagaatatctagcatgcattatgggttagtggttactgaggacaattactgtcagaattgttgtgtgtctgaattggacgttcattattaaacttcagcccataatttggttaccctagcaaatgtgaaggatctcataggtataacatgaagattgagtaacataactgttcagttttcttaaacattttactgtagttcttgagaagacctcataaataaaactacacgggttgttcaaaattgtgggtgagttgtgtgcagataatcttttataagtctgatgtctagaaagcagaatatgtttttctctaaagacactgggttccctgactagtctagaaaaatgtgacagaaataaagtacctctgcttttaagtgtatatcctgtagttcatcattagggtaggaaggatacaaaagagtataaaagggaaggggaataacacagcttttgacagagaggagaaaatgaataattttcatagtttggttcagtatgccattcggtgctcattcattcattcattcattc

SEQ ID NO: 99206 - DNA, 1224 bp, Homo sapiens
cacatatttcttacgtagaaaaacccaagatgattttatttcattatcatccctggaggcatcctttctgggggcctctaacctgttccaatcaggacactctcagcttgctttatagctgctgttttgtttttcttgagttcctgttatttacatgtttctcccaggactgattttgattttctcatgttttttctcctgttttccatctctgtgcttttatcttttttgataagatcttgctgtgtctcctgggctggaatgtagctaggactacaggtgtgtgccaccatgcctggctaatttaaaaaaaaatttttttttttttgagacgggtgtcactgcattacctgggctgccctcaaactcctgagctcaagcgatcttcccaccttggcctcccaaagtgttgggattataggcatgggccaccacgccctaccctttttatcttttctatggggcattttctcagttttacctgcagtccttctattgggcttctcctgttagagacagggtcttgctctgtcacccaggctggagtgcagtggtgtgatggtaactcactgtaaccttgaactcctgagctcaagtgattctcctgcctaggcttcccaaaatgttgggtattacaggcatgagctaccacacctggccctgttgagcttttaatatatgctatatcaaacatctgtgagtccttattttgttctttaagtattttttatagccttttattgtttcattaaatgcaccatcttacctctctaaggatattacttactgatagcttcttaaaaagccaactcctattttgccgttctcttatttctatttctgctgaattatttttgttttggtctttggcttttatgttagaagtttatgtcaaatgtttggtaattctgggctgtttgttcctatttacaaataaggcactcagaagctgattggaggttctggtatgtacagcaccttgatgggctttcctataatagattctggctgggttgttctgttggggacctccacccccacccccactccaatttgttggtacctacttataggtgtgttctcttgtcaagctggttggcttccccacaggataatgtgccagtctgatttggcttcttcagacagggaatgttcggttttctgctgtggtgagggagagtgaattgcctaactgcacagagtgcgggaggcaatctggagtct

SEQ ID NO: 99207 - DNA, 2539 bp, Homo sapiens
tcatgcctgtaatcccagcactttgggaagccgaggtgggcagatcgcttgaggccaggagttcgagaccagcccggccaatatggtgaaatcccatctctactaaaaatacaaaaaattaaccgggcattgtggcttgaacctgggaggcggaggttccagtgggctgagagtgtgccactgcactccagcctgggcggaagagtgagacacagtctcaacaacaataaaaaaagaagtaattttgcatttcatgtttttattctcctttttaatactgttagcgatttacatttttatttgcaacagcagaatttaatcccatcaagttaattttatgtagctactgtgtatttacattccatttagtatactggatatttataactattatctaaaaacaggaatcctcagctagcttctgtttttatgcaacagcaaaggcgccagcagagggagttgatgaaagctcttcagcagcagcagcaacagcaacagcagaaactctcaggttgggggaatgtcagcaaaccttcaggtaccacgaaatctcttctggagatccagcaggaagaggccaggcaaatgcaaaagcagcagcagcagcagcagcaacaccagcaaccaaacagagctcgtaacaatacggtgtgtgcattttcctaagctgtcgttgtatggactagtattatcttttctgactgtcttcttatctttttaacatgattcacgataatcatttttctctttttctttaacagcattccaacctgcacaccagcattgggaattctgtttggggctctataaatactggtcctcctaaccagtgggcatctgacctagtcagtagtatttggagtaatgctgacactaaaaactccaacatgggattctgggatgatgcagtgaaagaggtgggacctaggaattcaacaaataaaaataaaaacaacgccagtctcaggtagggctcaaaatgaccacacctatgcaccttggttggttgggaggtggggatggaggaagtgggatgttgggtgggcaggaaaaggtagttattgagtttttgcttaccgttttcatctgtgttcaagcacatgcagtcataattatggtgattgctttcttccccatagaaacacattcgtattatttcttggggctcctgctgagcacttattctatcgcctagcacatggtaaccacttaataaatattaggaatagtataatgtttttgttgtgttgttgaacatttctccaaggtattctctagataccttagcatttttcctatatttgtatttttaagtaatttatgctattaatatgagtattataaaatacctctgtaatgaccttaaacctatttatttttataagttagttacattttcatcttcatctttctttcttcaatatacagtgttgttgaacgagcatgggttttagtgttaaatacatgaactcaaatcccagcactaccacttattagctgtgtgaccttgggcaagagggaacctctttgggcctcagttccctcatcggtaaaatgaagataataataacaactttatgcatgtaattgtaaagattaaatgaatacatgataagtagtaagtgcctggcacatagtaactacttaataaatggtagtgttgtcagattgtttcttcttgatttagggcctaacatattatgaatagaacaataaatttctgttagtttattgagcatctttgccaggcactgtgctgtaggccttttcatagaacatctttattacttatgataacccaaaaaagttgttagtaccgttttacagatgaggagactgaggcttagtaaaattaaacaacttacctaaggacacgtaggaagaatttcatcattttttctaagtagaacccctgtatccacaaattaggatatattaactgaggctagattttaagggtatatccaatccaaatatttgaatttttttcttttttggagccaagcattggattatttactgggcatccatccagtattgccaagacattatttatggtgttgtactataatcatatagtaacagtttctgggaatataatatcaccctattgttttgctttagtaaatctgtaggtgtgtctaaccggcagaataagaaagtagaagaagaagaaaagttgctgaagctctttcagggagtaaataaagcccaagatggatttacgcagtggtgtgaacagatgcttcatgcccttaatacggcaaataacttggatggtaagaattggggagggaaacccggcatgtggaatgacagagcaggacccacagagaggctggcaaatttgaacagtgggccaaaagtcaaaagatgaaatctaaggaggtcaactgctgcacctgccataggaacttgactctttaatagtattacttgtgagaaaagtccagtaatactaaactcaaatagattattggtggttgtcaaaaagtaaatgccatcttagactgccttaatgatacacaggacagaggag

SEQ ID NO: 99208 - DNA, 1026 bp, Homo sapiens
agtgaaaaggctttggcacagtttagagaaaaacttgctcatggttagctgtttacaaacagaactgtctcccatccctgaatatttgaagagagactggtcaacatgtcaggattcccctaactaataggctgaattgaattaatccacctctgataccctgtctaaagccaagaaactgtgaaaaatagcagtaaaggaattaaagagttcctttgcagcagtgtaacaatatctaatggtttaaaagcctacagagaaaacaattttaaataacagtaatggctgccatgcattaagcacctaccatgtgtgctaggcactctcttggagttaacatgcagcatcccagttatttgattagcagtgatttttaaagatacctttacaagataggtgatattatccccattttataaattaggaaacagaggctcagaatggttaaataactcatcaaggtcacacagccagcaaatttcagagtcaggttttaaacccatgtttgtctaactctgatactcatgcttttctcctataccacacactgcttacattttccatttgatttctctctaaaaaatctcagtggattgaaagttccaggaagatatagctgttttctttagtgtatgttgtagtgcctgacacatatcataggagttaataaatactgattgaatttgagggttcttaaggaaagaatgaatccccaaattacttcagccttagtcaagtaactgtttcagtcagtataacattcagtgaaattaaacatgtggtatggatgttgtgattatagtgtttttttcatttctatagggtagataaaagaatatttaaacacaattgctgcatacttaccaagtgtctgtcattaatgtttgattaggtataaagatacattaaaaatggaaactgatttttgtaagttctctttcattatttcattgttacccttatcttctcccctcccgttttgcagttcccacatttgtttctttcctgaaagaagtagaatctcct

SEQ ID NO: 99209 - DNA, 1092 bp, Homo sapiens
ttgaactcacaactaatagcactactattcgtgcccaaatgaagcttatccagcacacgtattttcttcctaaggcacctcacagccttcctgtgcttaggaacaacaaccagttcttcagcactatagttgagggccactttacacagcgaaatctggtggctcatgtccgtaatcccagcactttgggaggccgagacaggtggatcatgaggtcaggagttcaaaaccagcttggccaacatggtgaaataccgtctctacgaaaaatacaaagattagccaggcatggtggtgtgctcctatagtcccagctactcgggaggctgaggcaggaaattgcttgaacctgggaggcagaggttgcagtgagccaagatcacaccactgcactccagcctgggtgacagagtgagactgcctcaaaaaacaaacaaacaaaaagtgaaatcattaacaaaaagcacaaaaatttggaaaacatggcactaaatagaccacaaaaagggcacttgttggcagtattgagaactgtaacaagaaggcattgtttccttgttctaccttaactgggaatatatgcctttagcatctcatgttttttgctctgagtatgtgtatttctagaatgaccataaaagcactacaagtattcattttggggttacaaatacattttaacaagtaggtgaattcacaaatatggaatctgtgagaatcaattctacaagttttctgaaagacaagatggcaaggctcatggaagggcttaaagatattcatatcctttactcctgtaattgttattctagagataatcagtattcattatgggtcacttacgatgaggatgtggaagatacagagaagtacaaggcatttaacatccaactgggtaatgggctaacaggcataaattgaaggaaaagtgaaagatgtaaacactgaaacactaggaaaaacaaattttttttttgggaggaagtgtcactctgttgcccaagctggagtgcagtagcgcgatctcagctcactgcaacctccaactcccgggttcaagcaattctccttcctcagactcccgagtagctg

SEQ ID NO: 99210 - DNA, 1038 bp, Homo sapiens
cagtaagcacgtgcacccatgggcgcacgcatacacacatgctcacaccaggcttgtccttccacagagctttttccacttctcccccactactaccacctgtgccttcaactggctcattggctaataagagccacaagtaggcgtgaagggctagtaggcaatttcatagtgtaaccagttggtagaaagtatacagacagtatttttgggccagatcgtttctgggattgctgataggaataaggtacacgactttaactttgtttggtaatatgccacccctgtcctctctgtcctggggcccagggaacaaagagactttctgctcttggttaggtgagaggtgcagtggtctgctcatgattatttgcagtattcatttcctagcatttgatacagactctgtatgtaccagagaagttctgccgtcacagcagggtggaaacccagagttaaccaggacaggctttgtggaggcactgagccctgagtgggatgtcttggtctaaatagaggaaaatggtggctcagtggccgctcttgattttattattagaacatgtgatgaaaagctttttgtttttctgcttttaagctcattcttgataaggtgaggacaaaccaaacattttcctagggtgagccaagtctgaatctgctgtgtaatctcagtcatgctgcttatttcacaggactctgtgtgggggatgaaccacagtacactccattcagtatttcagaccaatcaaagcaacaaccaacaatccaattttgaggctgtgcagagtggcaagaagaagaaaaagcagaagatggtccgagcagatcccagtttattaggtgagcacggtcctagtctcagctgagtgttggaggagtgcaggtgataccagttatcctgtgtgagtttccattgagcattgtttttcaagaagggaaatatttctttttatcaataactaatgttttaactggttcaaaataagtagccagtatttactgggcgtctcagtgcaggacctgtgcctcatgtaa

SEQ ID NO: 99211 - DNA, 1040 bp, Homo sapiens
attagctacacattccccatgcataaaatgggaaaatgggaagtcttcgttgaaaaagcagtcactgatggaaagagaattttgcttctaaaacaaaccagcagagggggccacagcctcattttaattatcaatattctccagtatctcctatcttcagtaggcttcctccacctcccgggttcaagtgatttcccctgcctcagcctcccgagtgctgggactacaggtgcgtgccaccacgccagctactttttgtattttagtagagatggggtttcaccatgttggcccggatggtcttgatctcctgacctcgtgatctgcccgccttggcctgccaaagtgctgggattataagggtgagccaccgtgcccggctggcttcctctttttttagagctcttcaggtggtcattgtgaatcagcaacctgcactcagatgtgataaacacacaatacagtttctccccagactttccttgtaagaacaacctcacaaatcttaaagaactcatgtgagtgagactatgctctgaacctcacagaatgtcatctttagagccaggcatagtggattgaatccgtgtttgtgttgccttgggtttcacagtacccagaactttcccttacatcaaatggctgaatttgataaagaatggcattcagccaaaggatgaatgcataccttgctggttttttaaatgacagttaaatgagaatatgtctgtttgctaaaagcctagactgataattaacatattaatcaactttttttggccacagacttttcccttcctgtctttgcatgagtaaaattaatttagcttttaaattacacttccacttcttttgcatatagttcattattgccttttatcacattttatctgttcttaagatacacgtgaagtcaatgaaaaatctgcctcagaataaagtagtattttatttcatagactggcctttaggttcttgtacttgcctaattaactgttactttaaaaacataaacattagggtcaggcacggtgactcat

SEQ ID NO: 99212 - DNA, 1098 bp, Homo sapiens
tttcttctattttgttttttcttcttctttttccccccatcagggcaaatggtctaactggtgcaatcatgaagagagttaatggttaacagacattggccaataacaaaacaccccatggactgtgactcgagtatccaacaggcagtcagagctctcccggtctgaaagttgcattgccactgctaactttgggattgcatcagagaggccctgagtggggttgagatgaggttggtttggtttgatgttacacactcctcacctgttctttctgagtgtcctttctctgaaaggatttatgtttttcttcgttagatagtgacttctgagcaagctgatctcccctggcatgctccaacctgattggacaaaggaagctctatggcctgggagagagactattcttaatttttctttcttacaaaaactgatttttcccataaatatttttacttcagaggactaggaccattttgttttgggcccttctgctgaaaatttgtctcgtttaagaggcagctagaatctttaccatatgtatgaatttgtataatttcatttttggatagggataaacttttgcttctgataaaagcctggaatttcatctggtcctcagagcattgcgtgtgtgtcttgctgtagcccggaaaaggttttgtgtaaagattctgggatggcaagttgtttgccttttctgaaaagagaacatacagaacctgtccatctttaagaccttcatccatggaatctactatacaggaggatgcagtgggctggaggggatgggcgaaaatgggagcaggaagcctggcctggcttctggtcatggcctcctaaaaccttaaacttcaagtagaaatgtactcaagccctatttataaacaaatacttttcctgcctccaccaaacccctacagaacatcacctggaattgccactcacactgggttggagtcattgggcagctgtgcctgtgcgagaggtgctgtggtctgggcagcccctggaaaagcacctttgctgcctgtcattgttgcctgaagaaggctggagttgctctgagagcagtttgggtttggagtattatatttg

SEQ ID NO: 99213 - DNA, 1054 bp, Homo sapiens
tctacatttccacacctggcagcatgtctaacatagaatagatgctttgtaaatgtttcttctgtgaataagtgcatgagaccatgtacttggcatcaggtagacaggatacatgtcttcctctgccatttactagctgtgcgacctcagacaagttagttcatctctctgggccctgtatgtactgaacaacttaacggagcatcttcgttggccagacactgttctgagccccagtgttgcagtactgaacacagtcctcttgatctccattctcacggagcctccattcagcagggaagacaaacaatgaacacatattggaaggagatgactttagctcgtggtgattgaaatggaacagaacaaggcaacttgatagaggtgacctggtggctattttagacagggtggtcagggaagacctctttgtggggctgagacctgaatgatgaggagttgcccctcccaggggaaattgagtctctggagattcctcagaagggaagctcaaggcagatatgagttgaggatgagagtggctcagatcttggtggggcgggtgaggtggggggctgcatcatataggacctcggagggcagggaaggggtcgggatcattttctcctctacgtggagaagaactgtactggggtttcaagcagcagggctgggtctattttggaagtaggacgggaacaccatgcagcaggtgtaggagggaggaaaggtaacatgcaaggacagtcctcgagttttgtttaagcaacggagtgggtgaggtgagaagcaccgggggagaggcagatttacagggaagaagaaatgaagatctattttttggccatgtgaattctgagaagattgtagagatccctgtgtcctcatctgccagaaggggataataatagaacttgtggggctgcggggaggctggaatggggtgaggtgcagagagaacccagagcattgcctctcgatggttcaggttcagtgatgctgccctgatcctctttccctcctctcccaggttcctggtgaggccaatcccatc

SEQ ID NO: 99214 - DNA, 1071 bp, Homo sapiens
cagtgtgatccatgctatcacctctcagtgccgggcacaaagccttgcacagatgaggtcttgttgacaattgggtagtgtctgtagcacaggataaactaaactgtgagtacatggactctggaaccaaactgcctaaattcacgtcccagctctgccacttagcagctgtgtgacctgggacatgtcatgacctctctagccctcagtttcctcatctgtaaaatggggatgataaaaattatgtgaataatatgctcaaggctctttaggctagagcccagcatgtagtggccactttgagagtcagctgttattagtagattctgagaaccatcaaatcaactcatccataaaatggaagctcttcacacaacaaatgcatatagagaagctgcagtggggcaagacaaggggatccagggccagcagggcagatgaggcccctgcccacatggaatttatattctggtgcattgagtagccgatagagactcaaatacatctgtcaatacagatgaatgatcagatggatgatccagctatgaaaagcgctacaaagaaaacaaaacagggcaaaggggtagaggttaactggcaagaggggatagtgtagaaagggcagacatggaagtttcctctgagtaagaggcacattggcggagaccccgaggctgagaagcaaccagtcgggcaggggtctgagggaagagcatcccagctagcagagcagcatgtgcaaacgctgggagatgggcactggggcccaggttagggaggccaggcagggtgtcaggaggcaggggggtaggcaatgcccagtgcggggccacatggggctggagaacagcagcagacaggaccagagggctgacgaaagcatgagagtttcctgagcagcctctcgttctggctgatggcgaatggacatctttcttcatctgggtggccaatgggttcccccgagaaacctgatcaatgcgtagacccttgcctcagataaatcccaaccttcacacaacagtttgcatcccatgtcaggttttaagaccactatgaagccccccaagt

SEQ ID NO: 99215 - DNA, 1057 bp, Homo sapiens
ctgctttagaggaatgtcagagggtccttcctgcacctgccattgctcaaattccttcagctgaaaatattcaacatgcttaggatgccatattttgcaatagtgcatcctgaaccccactgatagcacagtggggtgcaagtagcccagtcttgagtcccaggtcagccacttgtgacttgggtctggtgccttttctctggtcctcagtttactcttctgtccagcagggatagtagcagcatcttgcagggctctcatgagtcttatgtgggtgaacatcaaagcaactggtgcccaacctccagggagtgctcaatatcattgactgtcaccaccaccaccaccattattattacccttccagggtagccgtgagggaggctgatctcagggaatggctgggggtgacatcatagctgtcatagtcctgcagaggggagctcatagcatcatggtggcccctgtgtatagtggcaagttgggcaggagaaatggggagtcactgatgatttgaacagaaaggctgtgtggaaagtgagcttagagtgatggtttcctcttatctgttgatatgatttggctgtgtccccacccaaatctcatcttgaactgtagctcccataatccccacttgtcatgggaaggaccgggtggggaggtaattaaatcactgggatgagtttttcccatgctgttctcatggtagtgaataaatctcatgagatctgatggttttataaagggtagttcccctgcacaagctctcttgcctgccaccatgtaagacgtgactttgctcctcctttgcttctgctatgattgtgaggcctccccagccatgtggaactgtgagtccattaaaactctttcctttataaattacccagtcttgggtatgtctttattagcagcgtgagaacagactaatacatctgttaaggagagaggggtggccccaacttggataagaggagatggaaacgttaagatgagtgaagactgtcagagcacctgattactaaaaaacttaagattgaaagaaacacctcccagg

SEQ ID NO: 99216 - DNA, 2639 bp, Homo sapiens
aatgacattgtttctccagcaatcctgaaaactagagatgatggaacaaggttccagagtccggaggagaattatttcaaatttagagttctgtcagttaagtgtgagggtcgaattctcagacacgcaaggcctctaaaaatgtatcaccgattcttcctttcttggaaagccactagagatgctgctctaccaaaatgagggtgtaaaccaagaagaggaagacctggggtccaagaaatgggatttaatacgagagagagaaacgtattcctggattatgaagtaaggccccaaggtaaaggctgtgcctcggcccttgaagtcaccagtccagagaagacccagaagctctgggaaaggctccctcaggacaaaggaactgatgaaagtagttggtcacatggaaaagagagttataaactggggaagaattagaaacaataaaaaaaaaaagtatggcaattactaactccaggaataacacaaagttgtctagaaaaagagaaacattcagggctggtctgtcaatagcattttgataatcagaataacaaacactgagtacttatctggccaaaattatgatataattgttagaaggatgatgtggggactgaaattatgcattggcagggagtcaagttgggggagcaggttgtgtgtgtgaaagaaatttcaacctcatcttccatagtggacagtcaaaaatgtaataggacataatgaaaactgaaacatcggaaagtattaatctaagcattttttttttttaagaaacagagtagaattccaaaagaatccattaagagagttgaaattggttgcctgtagggagctggacattgaagagaggttgggttgtggaggactattgtttgcaaaaaccttatagaacaacttgactcttttaattgttgatgacagtaaaatgtaaaattaaatttagatataaattaaaaacaaagcaaaagaaggaaaggaggaagagtaaggaagaaaggagggagggagaagaggaggaagaagaggagaaggaagaagagagaggggaaggagggaggcagggagaaagatgaaaagacgatcacgctgtctctgctctggacaggccaactcttgcttgttccagacatcaccctccccaagcatgagcctctcttgggaagagcagctggaagcagagggagctgggagaccagacacaaactcggggctcagcttggggacgggagttgatagtcaggtgcctggaacataatggagaccgtccatattggttgaatgagtggatgaatgaattaatgaatttcttttctcttaagtcctgcagctcattaagtcacagaaatttctgaataagttggtgatcttggtggaaacagagaaggagaagatcctgcggaaggaatatgtttttgctgactccaaagtaagtgacagcaaacttctaaaatgggctgtgaggtagggaggggacacaagcgttttgaggctcgctgtgtgccagggagtgtatcattagctcactcagttcccagaacaacccatttcacacctgggaaaggtgaacttagagaagttgaggatcatgttccaggttggcctggatttgagccatcactgtctcaggagtagggaggcttcccactttgcccagctgcctcccagcctcgaggccacatcctttatgacccacatctaactcagccccacacctgggggaaaggctttcagcttctctgggctggacttgggaaatctttgggacactcctggattgattgattgattgattgactgactgacttgagacagcgtctcgctttaccatctaggctagtgcagtggcgtgatcacagctcacggcagcctccacctcctgggctcaagggatccccccacccacctcagctgaggtgagacaagtagctgagaccacagacacacaccaccagctaattttttatattttgtagagacagagtctcgccgtgtttcccaggctggtctcgaactcctgggctcaggcaatcttcccgcctctgtcacccaaagtgctggtattataggtgtgagccacccctggatttaaatctgagtctcgactggagctccatcccagagactttcatttctacactttgccccgctctgcagaagtgagatgcccctgccaggatgggttcctggggtaagaggtgctgtgggccactggggaaacccaggctgggcctctgtgcccccacagtgggttctttgtgacctgacccctcatctcagaaatttgaaccagggccaaaacctatcatcgtgaacctcattcattgttctctgccatgcagctcgtgtgaggcagtaaaaatggattgcaccagcctgaacagcctagtcagaccccatgtctacaaaacaaaaaaattaggccaggcacagtgggtgccttatgcccataatcccagcactttgggaggctgaggcgggacggttgcccgagaccaagagttcgagactagcctgtgcaagatggtgagacctcatctctacgaaaaaaaaaatagctgggtgtggtggcatgagcctgtagtttcagctacttgggaggctgaagtgggaggatcgcttgaacccaggagttt

SEQ ID NO: 99217 - DNA, 1317 bp, Homo sapiens
gcaagcaccaccacgcttggctaattttgtatttttagtagagacaggagtttcaccatgttggtcaggctggtctcgaactcctgacctcaggtgatccacccacctcggcctcccaaagtgctgggattacaggcatgagccaccacacctggccctctgatacattattaatgaatctcctaaggctggacagtaaggttgcttctgatttttttctgtgctgaggcctgtgctgcagagccgtgacagggttggacttctgcgcagctcctgatcactttgttaaagtcgcacctttgcaggggagtgtctaggccagaagccactcgcttatgactttggacacatgtttccaggttgctgtcctggaagttcacactgatttacgctcctctcagttttcttgaagctgaccaagtcctttgcaaagtgtaatgtgcagggaggcagaggcctttctaagtctgtctgcccttccatccctagaagagagaaggcttctgccagctcctgcagcagatgaagaacaagcactcagagcagccggagcccgacatgatcaccatcttcatcggcacctggaacatgggtgggtccgcgcgccccctccctgcagtcaccccctctgcttctgctttcctgactcaggcatcctcaaggtggggtggagtgacgacatccatgtccccttccttcctgccccagggccctgcccctaagccccagcccacccgcacaacctccttcctgaggaattccacccttttcctgagatgatgggtaagaaaaacgagctttgggactatcgtaccccaagagcagctggcgtgggttactctgtatgtctaaattggaaagttttagggaaagagtctgaatatctaggtgaaggggctcatgggaaccctgccagccctaggcagctcaccaaggggccccaggcctgagagaaagaagtccaccctgagtagggttgccagatttatcaggagagagacagagagagacagagagataggtacgtagacaaaggatgcccagttaaattttaacttcatagaaacaattttttttagtatatgtttagctacaaacaaataaatactaaatatatatgctcatagacattatgctgaatatatagtatatatacatatgctaaataagtgtaattattatattaaatatgaattatactaagtaatattagtttaagcatacagctaataatatactaaatatatgctaaatatattttgtattaaacatatatattgtgtatttactaaacacatgcactctactaaatataaa

SEQ ID NO: 99218 - DNA, 1536 bp, Homo sapiens
ttttagtgtaagtgttcaggtagaaataaattagatagaagacatccagataaacttattctaaaaactaccagtttatctgaaattggaatttcactgggtgtcgtgtgtcccctacccttgtcctgagaggagtctgggaggaagagggtgagcagtggctggcaggggcctcctggaagtgaagtgacagcttgtcactcgtgtcccagggccacagcagccgtggagtagagcccgggccagtgccccagggggtcacttgtccccttcggtccctttcagtgtttctaataagagacaatagtctgcctgatctcctccctctggacatggtcagggatgtccatgacacaagggcaggggtgcccttcccacagaagagtatggaaggagccagctgaggccatgccgcaggagggccggggacccaccagcccgggggttcgggcacccactttgagcctcttgggggagcagaatttagccacagtccatttactccaatgcttggcttctttgcacttgtaaggcaagaagctcatctctttgaggaacaaagtttgctcatccttcaagggcattgtagggagaaccgttcaaaatttcttgattgagcttcttcaactcagttttgaaatgggaatgcggaggagtttccacactctcccgtttctctggctcacacccaggcatccctccgctctgggctgggatctgtcttgcaagggagactttgttgtctcccaacaatgggttagaacccgccatctaaaacttgtcagttcccttggctgtcttgagaataggatgtgagttccttgagggacaggactgtgtctcaattatcgtagcctcaaagtgcaggacagtgtctgacatcagggaatcttctggtgtttctataccttgaaacttgacattacgtttaaaaagaggcttaactgagctctagccctaaccgacatcctgggtgaggttggcgcccaggcctccattgcaggcatttctttgggctgcctggatggtcttgtgtaatgacgtgacctccctcacactcccgccctctgttttgaattctcctaatgctttgactcgatgtgcctttgactcacttggtgttgggttttgctgttgaaggtaacgccccccctcccaagaagatcacgtcctggtttctctccaaggggcagggaaagacgcgggacgactctgcggactacatcccccatgacatttacgtgatcggcacccaagaggaccccctgagtgagaaggagtggctggagatcctcaaacactccctgcaagaaatcaccagtgtgacttttaaaacagtgagcagctggctgcacgctgggtgggcttccgggatagaatctttgctcggctgggctgtctcagaggcaagggtgggctcagcctatcagctctcagttttcaaggatgtctggaggcccccactgagagatgcgtctgtattcagaaataaatgggatctgtggggtattgctgaaaaccactgagtcctctatc

SEQ ID NO: 99219 - DNA, 2240 bp, Homo sapiens
ctgctgagcagatgctgctgctcctggtcccctgccctctgtacacccaatgtggcctcaaatgccctttgcatcctggctgtgccatatttgcacactaaggagttctgctgcagcagggctggagggctaagtctcacttccccccacctgctatgctcctcgccccacacctatggcaggagtgacttcctgccacagtggagggggaaccagtgaccccgtgctagatggccgctttttccttgcattaggcgaaaccaaaactatatgaacattctccggttcctggccctgggcgacaagaagctgagtccctttaacatcactcaccgcttcacgcacctcttctggtttggggatcttaactaccgtgtggatctgcctacctgggtaagggctgcccgcctggggctggggctggggctgtatgagatggaggctcccttgagtcagcttggggcaggtggtcgtggagacatgtgaatcaagtgggctgaggcggctgctccccttgggggctcaacgctgtttccattactgagcctcagccgctcctcacggttcccctgtgctcacacccggttcccataactgtcacagccaccctgccaccatcactctgcagcccgggtcatccagctgcccgcccccagccccgaagcttgtcaggcctggatcagcagggcttctcaccagaggcccgggcatgttcttgttccaggaggcagaaaccatcatccagaaaatcaagcagcagcagtacgcagacctcctgtcccacgaccagctgctcacagagaggagggagcagaaggtcttcctacacttcggtaagagcagcaaccccggctgggagcggtggctcacacctgtaatcccagcactttaggaggccgaggcgggcggatcacgagatcaggagatggagaccatcctggctaacacagtgaaaccccgtctctacttaaaaaaatacaaaaaattagccgggtgtggtggcgggtgcctgtagtcccagctacttgggaggctgaggcaggaggatggtgtgaaccagggaggcagagcttgcagtgagccaagatcgcgccactgcactccagcctggccaacaaagacagactccgtctcaaaaaaaaaaaaaaaaaaagcagcagcctctcctcttggagcctttccagccatcctttcgtcccctttcccctgatttcctaccagaagaatagggaaaattggccagatgcaaaacctggggaatcagaattaaaacgaaagtctctctgtttcagaggaggaagaaatcacgtttgccccaacctaccgttttgagagactgactcgggacaaatacgcctacaccaagcagaaagcgacaggggtgagtcctcttcatagacaccttccctgccctccatctcctccccgctggtgtctgttcccaaaaggtgaacagaaagtgtcttcatccattaggcaaaaaaaaaaggaaagaaaaaaattagaaagcacatgttgatttgtgttacagagtaaatgggaagccacacttgtgcactgctttgagctgggaaaataacccttgtgatttaccttctgtccagatactctaagatgctgagaggactttaaagtattatttccttaactgggttctgaagatcatttttttaaagtcccgtgatcaaatatatttactaaactgctgagtgaattaacattaagcaggtttcttcgctgcaggacttatcagagcttttatgggcccaagagcactgtggttctccatgaggaaatctgtatgccaaactcagttattcatggaacaccaattaatgtcttatgaggccacttgttttccaaggaacagtgttttggggaaagatgcaataaaatatgtattcatttgttcaaagatatttcctgatggcctattatgggttaggcactctcctaggtgatgggagagcaaagatgtcttttccagggacttcacagtaggaaaaacagatatgcaactagctgtagccagagccagaatgtgacaatgccagggcagggaaggatcagggaagccagcccctggcaggattcaagggtcaaatggctgggacggtgaggtacccaggcccactagaagcctagggcaatggagcgcaagttcaaagtgtcatctgaaagagttctgggccccatctgggctcaggagaaagtgaagaactggacgtgggagaggaagg

SEQ ID NO: 99220 - DNA, 1051 bp, Homo sapiens
gatggatgggtgaatgagtaaagatgggtagatggggagatgaaaaggtggacagatggatgaatagaactgggggtggaagctgaagtgtgttattaaagtaagtgactgcagaaagtgagcagagactgagctgaaaatacaggtgggggttcatctgagtcagaaagaaagtaagagaaggtgaagatacaagggatactgaagtagtcaggaggatatgtgagggaatacagcaaggtgagttatcttagtctaaagaagaaggcgtggcagtggagtctggacttgagccatgtgaaaaaagtttaaagccacctacagggaaattctataaaaagccaacagccgatgaatttgaggattacagaggccaccagttaatctgttcttttactgattaaaaaaataataataagaggcattttttaaagcctatgactttgatttgcagatgaagtacaacttgccttcctggtgtgaccgagtcctctggaagtcttatcccctggtgcacgtggtgtgtcagtcttatggtgagttcaaacactggggaaagcagaacaggatcagagaatggcaccaagctgggaggtgtgactgccctaaaatctaagggcttcagtctgttgatgtgtcaaagggaggaattcactgtaaccctaatcaggcgacctggaaatgttgatgcttccctgcctgtcttgtgctgccacctaatccatatcccctgctttaggagacatttgaattatagagcactttttttctttttctttttgagacggagtctcactctgtcacccaggctggagtacaatggcatgatctcatctcaccacaacttctacctcctgggttcaagcgattctcgtgccacagcctccccaagcagctgggattacaggctcctgccaccatgcctggctaatttttgtatttttagtagagacggggtttcaccatgttggccaggctggttgcaaactcctgacctcaggtggtcagcccacctcggcctcccaaagtgctgagattacaggcatgagcc

SEQ ID NO: 99221 - DNA, 1948 bp, Homo sapiens
ttcttctgtccatggaggaggcagtgtccacactgtcttccactgaaccctttaagcattgctgtggaaggacaacaggtgcaaaacttcgcacttctggagggctccataactaaagtttctttctgctttagggttgccatccttggcctgaccggaagggcttctccttccctgcttaaaaatgccttccctcccctgcaggcagtaccagcgacatcatgacgagtgaccacagccctgtctttgccacatttgaggcaggagtcacttcccagtttgtctccaagaacggtaagcaaaggatggtgtctgtttctctgttttcctcaatgacaaggagtgttgggagcttgtcttcaggtggcagtcagtggtctgcattagaggaaggctcattttcccaggcaagtccacaatatcagtcagtttcttcatgtcccagccacagcacaattgcagtccagagaatttacttgctctgcttggcaagtatgtcagccttttgagcctcaattttagtctgaaaacgtgggtaaatcagtgtttaccaaggtgtggcctgaagacactgaagataattctccgggtgggatgggaggagggggcgggggacatgaataaacatttattagtaatgcctttgttttaacatgttttacatttctgtcttctgtttaaggcaagcaccattacttttccatttaatattgtgatataccttattcagctacacttaattttaaaaagtgagtctatttagagaaaatatgaagtaaagagtagcacaggtgcgtggtaggcagagatggtaaaaatcgttaagatgggatgcaaatgactgagttttgggaaacaccacagtaaataatatttagatttgcaggtaatttttcaaataatccagctcagccctggttgccaggccaccctcatcccagctgggccaggtgttctctgtaatgtgcccatccagcccttggcctaggtgaccagggagccatgttgtctctgcccagtctctgcttccgcggtcagcccagtggtcactgggctcctttaggaagaccaagcgtaggggacccaaatacagggaaagaccatcttgctctgtgtccttcatgccctgggggacacacgtgaggccgaagcactgtcttcctggggtgctcttatctatcctattgtatctaacatccatggccccagaaatgtgacctccctcctccacccaagccttgacccaccatcgtgtctccttcctaagtctggccactgtgcctttctagaatcttcctagtccttaggcaggacctcttccccgacttccacccatctctcctttctctgagctcctgcagccttgaaggggttgcccttgccatctcctcctctattccggggtagggcatcctccatgtcaggctgggcttccctccacgggggatcagtacacagcagatgctggaaaacactgatcacggggattgagcattgacagggcatctacctaagccaagcctggactgggcactgtgggatttagaaagagaaaggaaagaaggaaggatgtgagggatggaggaaggaaaggtttgttcatggtctccgaacaagtctctgttctgtggctcaaaatttctatgaaaggacagaacacttgtttaaaagcagcttaaggatgcttgcaaaagcatcgtctaaattaatacagttgcaggcaagttaactctgtacaaatgagcttatggagtccagaggaaggagtggggataactgtgcctaagggagagagagctgctagccctcattatctgaactcagaaacagcattgatctgggtattgagcaaccgagccattgtacaaagtctttttgctggaactagctgggagcctgaaatagtgggggtattgcctgaggtcacacagctttagtgacagagatg

SEQ ID NO: 99222 - DNA, 1717 bp, Homo sapiens
gcagccctaggggcaggggtggccatgaatgtactgaccccccagtcccttgtaggtggcaagcagggtccaatccctggccctcagggtggactgtgacccactctaggttccctgcaagctggggctctgactcaaccagagagtgttgggcccaggtccagacctcaaagagccggtgtgagggcctgagcagcagctgcctgttgtcgccctggcccctcttgctcgttggagatcacagcgtctttctcggggggactgcagcgtccgaaagcaagcaggagatggacaggctcccctgagccagcagcctttagcacaaactgtgtttaggaaacaccctttccgggtgacatttctaggcagattgtctaaagctgtttcatggctagggaagagctgcgtgtgtccagccgtcttcgctgagatggtctgcacagtgatcgggggaggaaaagggggcatcacctcctcaaaagggcattttgtgagggcctggctgggatgcttccagaaatcaggaagaagcgtgtgctgccagttctgcccctctggtccctgcctccttctccaactgaggtgggcccaggcctggtgctagagcggcctttgtcactgagtccccaagctccagttcacccagcagggtcaaagcggttcgaaaaatgatgaggatttttgtgcgggtgtttttaataaactatcaagacagttccatacatttctatggaaacagcatattaggaagcttaaattagaatttcaaaaggctgctatcttgagtggcgtgggacgagctgtcaagtttcctaatctttttgcctgtgatgtgatgatttctttgttgcctggtttgttgcaaagaggaactgaaaaggagggggaatctctttgattttcctaaaaataattagaccatgttggcaaatgaccaatccctgcacaaaaacagaatccccggcaggcctgactcctaaatgatgctgaggccccgagataaaaaaaaaaaaaaaaaaaaaaaggagagagcacatcttcctaggtctgggtggggtgaccccagggagtcttttctgtctggttcttgctctgttttctgaaaaccagcctttttgtcctccaacaggttttgtcaagagtcaggaaggagaaaatgaagaaggaagtgagggggagctggtggtgaagtttggtgagactcttccaaaggtaattctagagcaaggcattccccagagggagatttgcatttactaggccagtagtaccagccagtggcagagctatggccaggcctgaccagaggaagcaggaatctcatagaccaaatgcagaaagagacccactctaggagcaagctctcgctcaaggtggttcgtaacacactttacagcagtgggtatgtggccttattattcctaaatggtttcagttcccctaaaggatcacagaagggatctagaggtcagctcgtctaaccacatgattttgcaaagaaggaaactcaggtgcagggccaagcgctgtttgctcatggcctcatggctgcagtaacacacctaggacgcaaccccaagaccccgatcccctctttgacgcttgttttcctattcagtgctggttcatagaatcgagtacaaagaggcatagagaggggtccattggctactgatcatacacttgtgaacacacgaagtactcgacatgtctgtgg

SEQ ID NO: 99223 - DNA, 3244 bp, Homo sapiens
tggcagagcacatgggagctgtggagtgtccctgacagcctatacgctcagaactcagttctcaggaggccggtgcctgacacagtggcagcgtgcagtgtgtctgttggggccaccttgcctgggtctgggccatcccctccatagctttaagctgattgcccccaattccaggctccaaccttgatctctgtgacctcacactcatttttctaaatatgcacatggctgtctctatgctgacgctgcacacacaaatgtgtgagctgatgtgttccagaggaacccctgctggagtctgccctgaaaatcccctccttcctgccacccaggctacccccccaccatctctctgccctgccagccttgccagcttctcattccatcctctgcacctgctcaccagccttcggaccgtccaggaacaggccaaacccctctcacctggaggcctttgcatgtactcttgccactgccgagaacagtctccccttctttctctcttatctgcttatcttcttatctcagatgaaagaccacctcctcagatggggcctcctggggtcacccaatgcccagttggtcccaacacttcactagtccccatctctgccccttgttattctcagacttcagcactacatcaataccgtgtctctgtgtcactgagcttgtttttctctcccatcaaaagtgagttccataagaacagagaccatggctgcctcactcacagccatattccctcctcccggcctggggccaggtgcttacgaggccctcagtaatcacggtgttgcatggatagatgaatgaatgaatggatcactgcccaagaggtgaaggagttgaggagagctcgagagagccctagggttatcagaggacactttccttgggctggtgctgaccccgagaagggaagggacccctgagatgtgactccatgtcctccctgcagggcccctccgtgcagtggctccagcatcactgaaatcatcaaccccaactacatgggagtggggccctttgggccaccaatgcccctgcacgtgaagcagaccttgtcccctgaccagcagcccacagcctggagctacgaccagccgcccaaggactccccgctggggccctgcaggggagaaagtcctccgacacctcccggccagccgcccatatcacccaagaagtttttaccctcaacagcaaaccggggtctccctcccaggacacaggagtcaaggtgagcatcctcttcattaagacggctccctccctccttatgaaagcgccctgggctttgggctttcaccctagaatggaagcctcataagggccacaatttgtgtccacttggctcatgacttatccctggggcctgaacacagcaggcccctgacatgtatgtggagtcttccatgtcctaacctgttagtgcaactcgattgctttttaaagggtaaaaatttgtaaagatattgccaagaaaaggaacctcctataaaaactatatacatatcaaaaaacatgttttgggccgggcatggtggctcacgcctgtaatcccagcactttgggaggccaaagcgggtggatcacctgagatcgggagttcgagaccagcctgaccaacatggaaaaaccccatctctactaaaaatacaaaattagccaggggtggtggtgcatgcctgtaatcccagctactcaggaggctgaggcaggagaattgcttgaacccaggaggtggaggttgcggtgcgccgagattgcgccactgcactccagcctgggcaacaagactgaaactccgtctcaaaaaacaacaaatttcggccgggcacggtggctcacgcctgtaatcccagcactttgggaggctgaggtgggtggatcacttgaggttaagagttcgagtccagcctggccaacgtggtgaaaccccgtctctactgaaaatacaaaaattagccaggcatggtggctcacacctgtaatcctagctgaggcaggagaatcgcttgagcccaggaggcagaggttgcagtgagccaagattgcaccactgcactccagcctgggcaacagaacgagactccataaaaatgccaggtgtggtggtgcatgcctgtaatcccagctactcaagaggctgaggcaggagaatcgcttgaacccaggaggcagaggttgcagtgagccaagattgcaccactgcaccccagcctgggcgacagaacgagactccataaaaatgccaggtgtggtggtgcacgcctgtaatcccagctactcaagaggctgaggcaggagaatcgcttgaacctaggaggcagaggttgcagtgagccaagattgcaccagtgcactccagcctgggtgacagagtgagactccgtctcaaaaaaaaaaatggccaggtgcggtggttcacgcctgtaatcccaacactttgggaggccgaggcagacagatctcgaggtcaggagatcaagaccatcctggctaacatagtaaaaccccatctctactaaaaatacaaaaaattagctagatgtgctggcacgcacctgtagtcccagctactcgggaggctgaggcaggagaatcacttgaacccgggacgcagaggttgcagtgagctgagatcacaccactgcactccagcctgggcgacaaagcgagactccatctcaaaagaaaagaaaaaaaatgtttctagagctagttaacctttgggcatctcccgctccctagagggccctgtggaacagggtgggagtttccatgtagagcctgctcgcaccctccagttcccctcttttttctcgaccatgaggttccccattctataagcagcttcctagtctctcctgtaggggacacttagttagaaactggaactagggatgtaaaaggcagggcagccagcctgcagagagaggaggcccggccctgaaactctggggaagccccggacggtggagaaaactgatctgagtctagaactggttcaggcagaagaatggaagccagataggagaccgggctacgcagccgaggaacagggtcagcacttcccaaaggcacagacgctctctggtgctgctggaacagagcagagccaaccatgggtacctcgtggatacacaagtggggagctctacatgtttctagtagccacaggatgacagacagacgtgaaagtgcaggcccaattaccaacgatttaagatgggcaaga

SEQ ID NO: 99224 - DNA, 1133 bp, Homo sapiens
taaaattaaccatttcaaaatgaacagtttgctaggctgggcacagtggcttatgcccataatcccagcactttgggaggccaaagtgagaggactgcttgaagcgaagagttcaagaccagcctgggcaatatagtgagactccccatctctacagaataaaacaaaactaaaaaattagccaggcctggaggcattgctactcccagcaatgtccagctactcctagctactcccagctactcccaagtagtctcagctacttgggaggctgaggggaaggactgcttgagcccaagaggttgaggcagcagtgagccatgaccgcaccactgcactccagcctgggtgacagagcgagactctgtctctaaaacaaaacaagacaaaacaatttggtgccattcagtaaatttgcaatgttacatgtctctatctagttcagaaacatttgtatcaccccaaagaaagacccagagccattaagcagccatgctcccatgtcttctcccctggacatgtgtcttccctgctctgtccctggctctaggcccagtgacctggggaagaacgcaggggacacgctgcctcaggaggacctgccgctgacgaagcccgagatgtttgagaaccccctgtatgggtccctgagttccttccctaagcctgctcccaggaaggaccaggaatcccccaaaatgccgcggaaggaacccccgccctgcccggaacccggcatcttgtcgcccagcatcgtgctcaccaaagcccaggaggctgatcgcggcgaggggcccggcaagcaggtgcccgcgccccggctgcgctccttcacgtgctcatcctctgccgagggcagggcggccggcggggacaagagccaagggaagcccaagaccccggtcagctcccaggccccggtgccggccaagaggcccatcaagccttccagatcggaaatcaaccagcagaccccgcccaccccgacgccgcggccgccgctgccagtcaagagcccggcggtgctgcacctccagcactccaagggccgcgactaccgcgacaacaccgagctcccgcatcacggcaagcaccggccggaggaggggccaccagggcctctaggcaggact

SEQ ID NO: 99225 - DNA, 1005 bp, Homo sapiens
ttgtggtgagccgagattgcgccactgcactccagcctggtgacaaagcaagactccgtctcaaaaaaaaaaaaaaaaaaaaattaaaaaacaacaacaacggagtttcactctttgttgcccaggctagagtccagtggtgtgatctcggctcactgcaacctgcgcctcctgggttcaagcgattctcctgtctcagcctcccgagtggctgggattacaggcacctgccaccatgcctggctaatttttgtatttttagtagagatgggatttcaccatgttggccaggctggtctcgaactcctgacctcaggtgatctgcctgcctgggcctcccaaagttctgggattacaggcatgagccactgcacccagcctcattgttattattaagtcgcattcatacttgaaaatttcccaatattttggagaattcagcacactttccctctccttcatgtaaaataaaaaattttttgagcaaaactaacagtgattaagaacagactccaggccgggcgtggtggctcatgactgtaatcccagcattttgggaggccgaggtggatggatcacctgaggtcaggagttcaagaccagcctaaccaatatggtgaaaccctgtctctattaaaaatacaaaaattagctgggcattgtggtgtgcacctgtaatcccaactactcgggaggctgagacaggagaattgcttgaacccaggaggcggaggttgcagtgaaccgagatcgcaacactgcactccagcctgggcgacagagtgagactccatctcaaaaaagagaacagtcaggctatgttggatttgaatcccagccctcccacctcctggctctgtgccttgagcctcagtttacccatctgtaaaaaggggctgttaatagtacctacctcatagacttagaaggagaattgcattgtaggctattatgtattattaccatgtattatcatctatatagaaattatatatttatatttat

SEQ ID NO: 99226 - DNA, 3235 bp, Homo sapiens
tgcagggacctgggccacttagttcaacatggcctggtgagaatgagccctgacagcccttctgttcttgtcccacagtgaagccctcagtgagctgccactgagtcgggagcccagaggaacggcgtgaagccactggaccctctcccgggacctcctgctggctcctcctgcccagcttcctatgcaaggctttgtgttttcaggaaagggcctagcttctgtgtggcccacagagttcactgcctgtgagacttagcaccaagtgctgaggctggaagaaaaacgcacaccagacgggcaacaaacagtctgggtccccagctcgctcttggtacttgggaccccagtgcctcgttgagggcgccattctgaagaaaggaactgcagcgccgatttgagggtggagatatagataataataatattaataataataatggccacatggatcgaacactcatgatgtgccaagtgctgtgctaagtgctttacgaacattcgtcatatcaggatgacctcgagagctgaggctctagccacctaaaaccacgtgcccaaacccaccagtttaaaacggtgtgtgttcggaggggtgaaagcattaagaagcccagtgccctcctggagtgagacaagggctcggccttaaggagctgaagagtctgggtagcttgtttagggtacaagaagcctgttctgtccagcttcagtgacacaagctgctttagctaaagtcccgcgggttccggcatggctaggctgagagcagggatctacctggcttctcagttctttggttggaaggagcaggaaatcagctcctattctccagtggagagatctggcctcagcttgggctagagatgccaaggcctgtgccaggttccctgtgccctcctcgaggtgggcagccatcaccagccacagttaagccaagccccccaacatgtattccatcgtgctggtagaagagtctttgctgttgctcccgaaagccgtgctctccagcctggctgccagggagggtgggcctcttggttccaggctcttgaaatagtgcagccttttcttcctatctctgtggctttcagctctgcttccttggttattaggagaatagatgggtgatgtctttccttatgttgctttttcaacatagcagaattaatgtagggagctaaatccagtggtgtgtgtgaatgcagaagggaatgcaccccacattcccatgatggaagtctgcgtaaccaataaattgtgcctttctcactcagctgtgtgtgtggcgtttttcctgacattcggagccatagatatccttctagatggcagggcctgcacagggcacaactgaggcagttaagggttcatggtggtgatggatggtgttgccctgaccagatgggacaccatagagccagtttgaagctggtcctggactaggaacaggagtaaaccgcaccccttccttccttccacccacacatcttcctggcactccaagcaccctgcggccacccagaggccacgagcatcccctccaaacctgctgtcctgcagcccacaagttcctcccagcttttataagttttcaccacttaagctgcagtgacaaaaaaaacacgtcaacactccccaggtcatgggttcccaggtcagggagtagacccccgcccagaggcacagtgcgggccacttccacggcgcctctgccccaccttgggctgcctggcctctgcttctgctcacagacaccaggcctgggctccaggcagggcctggagccgtgtctttggcagcctccaagcaaaccattcactcccaagcctcagtggcacctggagcccagcaggggcaggactgagtgcctgctgggaccatggctccctacccccactcaggtgtccccgccctgcaggctcactgcctggtgtccgtgtagaacctgacctaagtcccaggccccagcctctgattcaacagaccaagggccacggtggagagagagctggagacacccagacattctttagtctcccagcccccatcaccagagctgaggacccaggcatggatgcccatggtccctggggaacccactggctgctggggtgggctggcctgctacacaagtgccatcatctgctcacccacagggagaatgtcaagcccaaggccccatgcccacttaggatggatgtctaggcactccccagcatttctgtgggttcccaggagatacgggtaggagagcaactgtttggggcatacatcatgctccccgtcacctgctctgggttccagtcactcaagcaaatgcagtgcccccaccacagtcaaacccagggctgctgtgaggacctggctttgattgcacgtggtcggacagctgaggcccacctggtgctcagaacaggaaacgctgtggaatgcaagaattttcatccttgccttttccatctctctaccctgcacccaccccgagaggtcccggaccactttctccctaggctttttgctgccgtgatcatctgggttccaccttgaccaggtctctctcctgtctctcctttcctgacaattctaggcattccaaacacccaggttcccccttctggcagagggggaacccagacatccccacctccttatcacctacataattcacctccaagtaattcacctacaccaggctccctaatcaagaaggcaggtcaattagccagctctcatcaaagtgctccattcctaggatgaatttcaccgccccctgagattgcagatgctgctacagtcactgttccttttcagaggtaatttttttccttctctgcttgatgctatgaaggctggttgagagcagcagagtttgtgccgacaggaaggtgttaccctcatgatggacagtctctagcagcgctcttcccagtgcctccaccgcagccccccccccacccccccgcagcctggagggcagcgcctgcagccagtgccacctgcagggacagagtcagccacgggctcctcctccttcctgcatttccattctttttccacaccattttccccacccggataggagagaaattagtgagtcattcagaaaagctctctcccacagctaccttccctggttccagcctaccaggttctcatctttgcatgtccttaaaatagctcctttctcttggcaaacaaatttccatggagacccagctatgggaaggcccag

SEQ ID NO: 99227 - DNA, 1188 bp, Homo sapiens
acaaggtgaagtcccacgataagccgtctgcaagtggagaaacaaggaagccagtccaagtcccaaaacttgaaaagtagggaagccaacagtgcagccttcagtctgtggctgaaggcccaagagcccctggcaaaccactggtgtatgtccaagagtccaaaggctaaagaatgtggagtctgatgttggagggcaggaagcatccagcatgggagaaagatgaagactggaagactcagcaagtccccttctcccatctcctctgcctgctttattctagctgtactggcagttgattaaattggtgcccacccacagtgagtgtgggtctacctcttcagtccactgactcaaatgctaatctcctttggcagcaccctcacagacacatccaggaacaatactttgcatccttcaatctaatcaagttgacacagctgaaatgagccactaccactcaggatctataagatacaagcctgaggcaagcaaggagcaatgacagtaaacagcacagactgcagacagggctgcaagtactgacttcacatcaacgagaacccagtggaagctgagagagtgcccatttttagcacaaaatttttaaacctagatgaaaacttagagaagtaaataattcctgccaaagtctcacctataagttatctgaagttagttatctattaactttgtgactggacaaattatttaacatcttagagaagacagaatttgcgatttgtgttgatccagattaattgcccttaataagtcaataatgttcagaagaatgcaatagaattctgaaaatccataatctttcttaatgtccaaacaccattcaaaattgtttcataacaagaatccacaaaacgtgacccatctcaagagaaaaaacaaacagccatgatcaaccccattccagatgctggaattagcaaagatgttgaagcagctactataactatactcaggggcataaaagaaaatactctttttttttttttgagacggagtctcgctctgtcacccaggctggagtgcagtggcgcaatcttggctcactgcaagctccgcctctcgggttcacgccattctcctgtctcagctttcccaatagctgggactacaggcgcccaccatcacgcccggctaattttttgtatttttagtagagacggagtt

SEQ ID NO: 99228 - DNA, 1052 bp, Homo sapiens
aggttgggcatggtggctcacacctgtaatcccaacactttgggaggccaaggtgagaggatcacttgagctcaggaatttgagaccaaccagcctgggcaacatgacacaacctgtctctacaacaatacaaaaaattagttgagtgtggtggcgtgtgcctgtaatcctagctactgggatggggctgaggtgggagcatcgctcgagcctaggaggtcaaggctgcagtgagctgtgatagcaccactgtgttccagcagcctggtcaacagagcaagaccctgactctctctctatatatataaaaatatgtttacaaatttgcagtttgcctaaccagcaattccacttgcaggaatttatgccaagaaatatttggacacatgtccacatacaaaaatctttgttgcagaattgtttttaggttggtgtaaaagtaattgcggtttataataatgatgagaagttggagaaaaaaatctacatttccaacaataagagattggttaaattactgtacatttattgctggaaattgttgatagtaacagcagtatatgtcataatttatgtaaaatgagtatgtccctagctcatcatagacaaatatttgttgaacacatgaagaataatttctaaagaaagaatatgaagctctgctagtcctgccctcctcctaactcaccagctttatctagcacacaaccacagccacgctgaagcctcttacttccttctgcttaccgtgctccctctcgttgcagggcctttggatttactgtgttgggcacatcttcccttctgacttctccaaattaatttctgtgtgttcgttctcatttcagtagtcacttcctcgcaacagtaggatgagagaccttcacaacctgttacagatcttatctccctgttacgcgtgtacctctcctttatagcattgatcccagttataggttcacatgtatttgtatcattacttgataaaggtctgtctcccccagtagactgtaaactccatgagacaagagctgtgtctgtttttgcacatc

SEQ ID NO: 99229 - DNA, 1065 bp, Homo sapiens
ttgggggtctcaaccagctttaatgagcaagagctgcctcctagttcctggagaaaaactttaagcaccagttattgtagtgagccacagtcagttattatttataaggaagctattgggagtttagttatgtgttgtttggcaactcgacttgctagtgggagtttggaactagaaaaaagtgatgaaaagcaggcaaggcaggttgaacggtgggcttcatcaggttaccccttgttcagtctttccatttccacaaacattatccataataagcctgccctcctgacttctttgtttccattcacagtatcgttgttttccactagtcatctatggttccttcttccctctagatcttcccatctccatattcctttattcctcatattccccatattcaccaagcccattggttctccaccccctagcctcttgcatcctttggtttgcatttattttgccacctcctttgtttatttatcttcttattcccagactgtggtgagagcctcattcactcaaaagactcctgtgaccgtagtgtgggctgggcattagggctgtagagatgagtaagccagagtccctgctctgaggaggaatagagtctagtgggggagaccaactcaaagggacatttgctagagaatgtaagggtgttcacagaagctgggcactttgttggtttcctttcccctccttcctgtctctccaaagttcctgcctgtctcatcctaattaaccgtaaaacactgcacactgtgcttaaatagtgatctgcatcagttatcagactttctcttaagtattttcatcactttgcctacagtttaaaatcaaactcttcagcctcgaaattgtttattctaagcacggttcctggactagtgacatcttctgggaaactgttagaaacgaagattcttgggccccacctcagacctactctattagaaactctgggggtggggcctggtaatctgtgttttcagaaatgctttagctgattgtagtgacctctgaagtttgagcactaccacctttactgctactcagacttcc

SEQ ID NO: 99230 - DNA, 1086 bp, Homo sapiens
taatactcagtttccatttgacagtactcagttttcacttgaatggccacaaacgaactctttaggtctcctccaaaacctgctcctcccacagtcttgcccatttcagtgggtgacacctaccttctaccagttgctcaggccaaaagccttgattcatccttgactcctatctgtcttcatgccccatagccaattcaaagtcaagtcctgttagcgctgtctttggaatggatctagaatcagaccgtatctcacctcactgctcccaccctggtctgagccgcactgtcccatgtttgcacttcacagtagcctgctggctggtcttcctgtttcggcccttaccccactgcaatctgctctccttttaaaacctaagtcattcagctgctcagagccctccagcagcttcccttcacgcctagtaaacctcacagccctcggaggtgcccacaaggctctgcatcatttccccacctcgtccttgaccgcacctcctctgtccccctgtgcctgggcttcagtcacccttcctccaaatacaccacctgctgtacacctctccaggctctgctgctgctgctccttctgcccagagggcccttccctcaagggtccacatggcttattcctcacttccttacagtctctagtcatgtgtcacgtaggagaaaccctcctcaattacgttaaaataggaccccctccctctgttccccttcttgtgcttgagttttctgcaagcacatgtgactgctgacctcacacgtgctctcagttgactgtcagctgtgtggaagcagagccctgcactcactgctgcgtcatcggcactcaggtccttgctgagccagtgggccctgttggtgcctgttactgggacttcattcaggaactttccaccctttattcctgatgtgcctgatggtcacagttgctttgcttttttccatgtgtttcatgtctcctcctttccactcatagtgcctgtaaccgcagctgctggagacacccgaatggtttattggctttgtgaacatgtttctggagttatggtttcattgcctaattggaaaggtttgg

SEQ ID NO: 99231 - DNA, 1056 bp, Homo sapiens
gcccatcaccagaagggcaatcctgtgagagcgctgccagttaccatgctccaaaatcagcatgagaggcaagagtggagaggctttaaagaacaaaaaagcctgctacctggtgcgctgaaggcctcactgatggtttcataaagcttttcagtacaaaccctgaaatttcagagacattcgtgagaaagaatcaagtcctaggctgtgttcgcctggatggtggtcttacggcaaagctccagttgggaaaatacagttcaccatcagtacagctgaattgattatcttttcagcagaaatgagtctccaaaaaggtagctgaagttgaggagtagacagctgtcctcagcaagcccctggcagtcacctggaacacttctcattccagccaagctgtccttcaacagggagtggcagggatagttcccctttgtgtccccataggcgcctcggctccttgctgtcacccagctcatttattctttcttaaaaataaatcgccacccactgtgtagtttccaaatgaggtcctaaaatttttatttatgaaagtattcttctttatctcccagttagctcaactggtgattgacctgaataaccaaatgcagcggaaggacagggagatgcagatgaatgaagcaaagtgagtagagaccccgcctccttggagcctggtcattgggtcccatgtcctttgttctgctgacctcttgtgagcagggccagtggcagtgagtggccacagtgcacttagcgagagtttgattttcagtgcatacacactctgggatccttttctaccagctctgagaaggaaaaagcaaggacagtgcccacaggcttctagcatcctcctagggatgtcaccttggctcttgcaagtggcccagagacactagcagctctcctgtggccgctgtgtgtgggagctggtatgttcctgtggtggaggtggtagggccaggatagctgagcgcatggcccttgggaaaagggaaatgagtttgtgagcaaaactgttgctgaccagggagaagcctggcagacaag

SEQ ID NO: 99232 - DNA, 1113 bp, Homo sapiens
ccctgtctctactactaaaaacacaaaaattagctggatgtagtggcaggtggctgtaatcccggctactcaggaggctgagacaggagaatcgcttgaacacaggaagcggagattgcagtgagccgagatgatgtcactgccctccagcctgggtgacagagagagactctgtttgagctattaaagacctttcctttcagctatagtgatgaatccctgataacaggtggtgttttcctctccctgtgaccctaagtcaagtttttatctccaccttgcagaactgggacctgaagttatagaaagtagatttcagacagtcaacaagtgctttaatcatagagtagtggtactcacacaccttataccgagattctggtttttcctcaaagagagttagttcacagttgtctctaccagctaagacaatttggataaattgtatttttggtaatttgccctgtaaaacttatttttcatcttccaggtataaaatcaagagtgtaatgcactttttaagctatacccacatcccttcccaagattctgctatactgcctagaggactttccttcattttgagaattaccaccgtggtaaaaacttacgagaaatttcagcagaattcttgattgcagctcagtagcattgctagagttctacattaggggtcctccacctagcaggcatagccatagttagaagtgaaatttatcaaagaagagagagtaaggtcagggttaggagttagggagtttctgaatttaggacttgaatgagagacaaaaatgattctgagaaggggagttagtggatgagactttgaccatgttaaaaatttgtcacagccaagacttctatgtcaagctttagtaaattaaagttactaatgttatgtaaactttgacatttcaagaatctcactatacctcagtttcctcatttataaatggcaataatgatatttacctcaaaaggttgttataaggcttaaatgagttaaagtctgtaaagtaattaacaatgtcaggtaaggggaagtcctaagtaaatcttcactgttagtaatcaggctgtgggtgtgttaatgcaggttgagcatcccatatc

SEQ ID NO: 99233 - DNA, 1036 bp, Homo sapiens
tttgtttggttttttttgagacagggtcttgctctgttgcccaggctggagtgcagtggtgtgatcatagcttctaatgtttttatttctgtaaaatcatcttacagattttagaaagaaaaatgttaaaggaagaaaatgaaaacatacagttcttccaccactcagaactaacatccatatatcattttaattgtattttgctggcttctaatttctcacaaatcatgtactgatacggcctttgaccctatttctgattacttacttgagatagattattgaaaataaaatttgatgggtcaaagcttttggaacatcaccaaataaccttccaaaaagtttgtgttcatcagctgtgaatgtgaattctaacttcctgcactcagtacccgttactgcctcactgtttcctgttgacactttgaacgatcagttttctgcctcttaattgtgcctgccatgtaatgcggtggggtttttgttgttgttgttttgtttgttttttccctccttgctccctttggtttgtaacttaaagtggaaacttaagcgaaaactaagatctcttggaacaaaaggaatcaaactagttctggagcttttcctaatctgcctacaagttaaggtggggtatcttctctgagatttgaagctttcatagtggtagaaaagagtttccttcgctctaggatgtttcttttctattgaaatgtgttttggaatatagttttagagttttgatccactattttttaaaatgttggttgcttccctgtaagtggaggggtttaaattcaactaggagtcattcaccaactaacgtcttaatttacaaagaaacaaaggttcccatatcatgcctttgctttagatatgtagggtacgtgtgtgtctgcactctcagatgtggaagattaatctcagttgtattttcccaagccacaaagtaaataaatagttgacctggaaatgagatttggtttcttcagaataacagcttataaaagtgtcatttgcataaccgggttgactg

SEQ ID NO: 99234 - DNA, 1013 bp, Homo sapiens
gctgtaaaagcctgttattttattttgtattttattttattttgagatggagtttcactcttgtggcccaggctggagtgcaatggtgcaatctcagctcactgcaacctccgcctcccaggtttaagcgactctcctgcctcagcctcccaagtagctgggattacaggcatgcgccaccacgcccagctaattttgtatttttagtagagatggggtttctccatgttggtcaggctggtctcgaactcctgacttcaggtgatctgcccgccttggcctcccaaagtgctgaaattacaggcatgagccaccgagcccggcctaaggcctctccttaatctctatgcttccctaaggagtttctgggtcagaggacatacatctttgaaaggttttgataacttagcaaatgctagtgttttcttgtggtcccgggcctaagcacagttgcaagtacttaaaaccataaaattctattttcaacaggacattgtcaaaggctcagctcatatttgcagttcctgtctttgcagttctcctctcttccttgtatgggcacaggtgactctcgcaaacctagatccctgggaaagccaatcaagaaaataaagcacagccttgtcctttttctttcgacctgccttttattcccttctacatcctggccaagaatgtggtgcaataattacacatagtcctggaataaatagctaaggaaaataaatttactttgaccaggtttaacttgcttagtaacaggttcttaagtatatatttacctaatccagataattatttattgaaaaggaaaaatctttctgtcaagttcttatgaatccaaacagtaggtgatgaaatcttgggttattacatttaattatcttctccatgaaggttgcatctcagtaggaggtcattaagaccaaaataattacttgccctcctccaagtaggaaagacgtggcccagaaaaatgaggaagggggattccagaggtactttgcatccgc

SEQ ID NO: 99235 - DNA, 1134 bp, Homo sapiens
cctacactgttgttttatattccatagctgctgcccctaactaccctaggtacccctcagcccttgtgtcatgggaactgtgcttggtgagtactgcagcccttcaacagtgatgctgactgttgatggaatgccctactttggcactggttatgtggttatagactcaacagatcatattttattgcttcaagtgggaactgtgtttatacctaaaaggatcaaaagctcacttttaaatttattctcagttgaaattctggatttgatttgaacaggttaaatgtttattgtagtgttgttcagaacatggcagctcttcctttttctccaaagaatctttaacgcattgctgtcatagccaagtggtttaggatctaactagaaaatgacattagcatttgcggaaccgattaatcacagaactgttcaggagaatcaaagaatgtcttgcctttctttccagggatgatgacattgaggtcattgtggatgaaacttctgatcacacagaagagacctctcctgtgcgagccatcagcagagcagccacgtaagtaggcaggtttgggccagggaaaagacagcttgaggagcaatatgaaggcacatctgtggacatgacaaagaatgcagtcagatgcacccaaccccttaccccttttctgggacacccagcgtcgaacacaccacagaggtgtccagtctttctcagttcacctctgcttaatgggagggaagcagaacacgggtggcttcaaatgcttctaaatacaaaaaaatgtagtggcttactcaaatatggacagtgaaaccttattaagcagaatgattgtttaggtttgatcatcctgtttcattcttactagggcttccccccgcccgcaccgcccttcaagagtggggattggttactaacagtcagaaattgtgaagttagttagccaggaattgtgaggttagttgtctaatgctttatttccagggaaattaatttaatactagggaaccttgtttcttttgaaacttctaggctgggttttccctttcccttcccactgttttctggcagtttggtactgtgttgggtttctcttggctggggtttgggaactaagtgggaaacatattccc

SEQ ID NO: 99236 - DNA, 1966 bp, Homo sapiens
agaatctagaaggacaggctatcaacagaggcagtctgcttaagcaaggtcgtcttggagtcctttctaacaatttgatgagcagtaaacctctgcaatcctgtctaatatttgtctttatgttatttcttaggagacgctctgtctcttccttcccagtcccccaggacaatgtggatactcatcctggttctggtaaagaagtgagggtaccagctactgccttgtgtgtcttcgtaagtatgcttcagccccgaaccctaccacgcttgatatggtgacagagcctggcaattaaagggtcctttctaggcctgcagctaagcattccattgttttacttatatcaagcctttccaccttttggctctgtcagctgtgagaaattgatatattttgcttagtttcagaggacaaaatttgttacaaccatcctctgtaatggcagagctgactgagaaaggattgctagcatgagggatggggcaaaggaaaagtaattagggattgtgaaaaatgggagagggatttatataattattgtcaccaattggctccagtttagagtgagttgccagtcagtggtgtattatggaagttcagtaggacagctgttggtttcatgaattatatccctatctgtatgactcccagccattaggggtctatgactggaagcagtcctgggcagaagccacggtgatggataccagggctgtcacccggagttcagagctgggtcctagtactagcaggtagtttgcatcccagctggggtagttgagcagaaattgaaccagcctggggaaacattcagtacctggctcagaactgtcaaagcatgaggagggtaggaaacagagcacaaagaacagaacctggagagttggactgactccagtactggcctaataactggcagcgggtaagtgaaaggagccagctttcaaagcagggaagattttgccgtaaaaatgggatggaatttatatggtgggagctttgggttccaggtataaggagggacttagctagttacacagtggactggctgagtgatgaactgccttgactgttgtaaagagagttccgctttggaggaggagttgggatggggcgcatcaacgccccttcccagtcccactccactcctgtgattccatgatgcaccgggcacctgcagaggtcgatgatgattggtaaaaggtctgattgcactgaatgtcacggtccctttgttgccctcaactcccagcagcccattttttccctcccgtcacatttaagtcatgtgtatgggatcatggagcagctgataatttgggattctgtcagtgtgtgtttctgagagtgatcggctcacagctgacgagtatccaacaaaaccagttacacaggagactgacgagtggcagtcatgggtgtgatggtgcatgatctcaagttttcaatctgagacctcctaaggagaaagaaaccataaaaaagaaaaggaaatttcatgggggtaaaaggtttggtcacctgtcatacttttcagcagtgggtcacaagagggaggcaaagtggaaaatgaagttaccaaagtgatgcctgttgcccagcctgttaatagtcactccctccgtgatacttcaagcattttatttttttttagtcccaagcaaatgtaaatatcacatattctcttccccaagtgaccttttagacaagtgattatctacttaacaatctcatattgatagtctatgttttctagtctttcttttccttctctattatagaaatttccaaacatacgcagtatctcttcccccccacacttatgctggagcaatttgaagccaattctaggcattatatttcatccaaaaatattttactgcccataatcttcttaagagagtatagtgaatttttcgattattcccttttcccattctagaatgggatgctgagtctcact

SEQ ID NO: 99237 - DNA, 1037 bp, Homo sapiens
agacttttgtaaagccatgtggagacttgagagatttttagaaatgggtatggtgttaagttgtggtggaactgtgacagtgctgaagactggcttggaggaagcaggtctgcagtggcccgtgcgttcagtgcttctgcagagatgcagaaggcccaggtgggggctgaggaaataggggagaaaggagaggaccaggctcgacacattgaagatgaacagttctcagagtgagagttgggagattaggcaaggagagagtcaagggtgcctctgaggtttctgacttgttaatatttgctgctagtgaaggttgccaagggaaaagtgagtagggaaggctgggttccatttggagcttgaggtgtctgcaatattctgatgaaattgagcaagctcagaaaaaaaaaggtctgaactcgaaggagactggcgagttgaagcacactcacgacagtagctggtattcaggctggttgtatagggtgaagcatctaaaccttcttgtacttgattattggggaatttatatcgtgtgaactgaattcctctgatttggctaaaaattggttttcctcttctttattcccacagggatcttacctcttagcagcttcaaatgattttgcaagccgaatctggactgtggatgattatcgattacgggtaagacccagttaagaaagttagtgcaatctccaaacttcatgtggtgttatcaaggcacaaactggcaggtgcttaattaggggactttgttttcccaaaaatcatgcttgattcaccctgcccttcctttcctccttggggaaatctgtgtttccactttatactctttgtccaaaactcagtttcaaaatatttgcaatgggaccctcacatttgcatgaaaaccttggaatactcttcataaggactaaatactttggtagatagcaattttggcttaatggcacagaacttagcaacagcatgtgaattgtgattcctgtgggctctaaaacctaattacctaaagtgggatatagaagtacaaa

SEQ ID NO: 99238 - DNA, 4105 bp, Homo sapiens
atgtggtccgaagttttcgcttctgtgctaaagtggagttaaccccactgaaaatagaggaaggattggtttcaaaaatgttaacacaaaaaaaatctaaccctgaaccatgaggtctcatctttgggaactaaggtttggagtgcagtggcatgatctgggctccttgcagcctcgaccttctgggctcaagcagtcctctcacctcagcctcccctgtaacagctgagactataagtacccaccacacccagctaattcgaatttttttgtagagatgagggtctcactaatttccccaggctggtctcaaactcctgggctcaagcaatcctcccaccttggcttcccaaagtgctaggattaccagtgtgagccactttgccaacccttgcattttctaattagaaagaaaacatcagtgaataccttctgaacctctggtgttttacacatagaaaaatgttgatcatgcactgcatagaggtcaatgatgaatggtaaaaggtctgagtcctcagatcccctcccggcatcccagttatccccagctgcctctcctccatcgcacttcagaagtgctgcgatgggcagaagggcagctgacactccgtgatgtccctcattctgtgttcctccgtgagctcagggaagacactggttggcatccaacagcttagtcacaaagggatttgattgttgggagtgctggtatctgtggctatgatctgccttgttcaagctgagacctctgattgaaaatcccccaggggttttaattgtttacataaggagtcctgatgtttccttttgtaaattatgcctgtggtgaccttgtctagtctgactttaaatatggaactgactttcagcagcatggcgcaacatcgaggctttaaaaattctttaatttgatataattcagacatagaaaaattacaaaaacagtacagcaggtatctgtggtagagctgatttcaaattcaagattgaggatggggagcacgtgaagcttggtgctagtgatgttgaatttttgtttttaatgttatttttagtgggagttttatccttttggtcttgatacctcacctttggccaacactcaaagataggcttcctatgagatacatggcccctggataagactcagtgaatgaaattgttgcttcttgtcctgtttgggatgtgtgtgtgtgtgtgtgtgtgtgtgtgtgtgacaggatcttgctatcactcaggtggagtacaatggcactatcatagttcactgcaacctcaacctcccaggctcaagcaatcctcttgcctcagcttcccaagtagctgggaccccaggcgcatgccaccactccctgcaaatttttaaaaaaatttttttgtagagatgggggtttcactgtgttgcccaagctgttcttgaactcctgggctcaagcagtcctcacaccttggcctcccagtgtgctgggattgcaggcgtgagtcactgtgcctgacctgtttctttttcctttgctgtcttatcgctttgagtgttcctggccggatctcagggtggtctgacactctgactctggaggtaaggatgctgtggatactttgccagcataggcagggcctggcgccctgaggctcaccctggctgtgttctctctcctagcacacactcacgggacacagtgggaaagtgctgtctgctaagttcctgctggacaatgcgcggattgtctcaggaagtcacgaccggactctcaaactctgggatctacgcagcaaagtctgtgaggaaattcagtctctctgtctgtgtatatgcttagatgttagcgtggaggtgtgtgtttgcacgtcagagcctgcatttatgtaatatagtttgaatttcagatctggcttcatgtttagaggggcactgaggatagtgatagtttttcttgtttaaagcttcatttaagtgagtaactctgacaagtcagtggttagagggtggcagcattatgtaaacagccacgttggtgcctctgcttgattaatgatgtttgcatttctttcaggcataaagacagtgtttgcaggatccagttgcaatgatattgtctgcacagagcaatgtgtaatgagtggacattttgacaagaaaattcgtttctgggacattcggtatgatacccaagctcctgactggaggcacataagagtctccacagtaatggttctgtacatgggttgtgcttttaagatctcaggacatggcagaaatgagtttcggtacacgtatagtgttagcttattaacacttggctgttctttcccatgaagtagactgtggagcttagcaatcatttattgagcatgcagtgagtgctaggcccttcaccagctggcaggtaagaaaaggcaaacaggatactctttctacctttaggtaatttaaactgtagtagggaaggcagaacgcaaaagtcagtgactagtgtgttgaagtggaggcagctacgtttgttccagtgtgttaaagaatgcctctccagatttctccggagacgtgagtaggattcacacggcaggaaagccactcaaacttttgagtgtgtgtctggtggctgatacatggcaagtgagcaggaaacagggcagaagccagtgagggggctatgaggggttgaaatcaggttgccacaggcttgataagccattgtcaaatcactcgatcttgtaagtcgttgggtgtttagcaaggaaatggttgctttgcaggagtctagtagacgactttggtggcattttgagagggcatattagggaataggaaaccaatagagttgataaggacctaagttcaagtcagtagaggaacatgtggaggagagaatctatttgaaggagaatttggacagggcttattgacaggttggaggaaggggaagacaggatggagagtaaatgaggacagcctcccagcagggttgtagagagggtgggggtacagggcctgtggtgatagatgatgctttgaaacacagcatggcaccagaaagtcctgacaatgctcatggttcctggacaccacttcacattttattcataatctttagtttgcttttaaaacctgaaattggaacttgaaagatggaatttgagagttaagttggatgttcgaagtctcttagtccatcccataatttgacaggtgaagaccctgagtcccaaggaagtggagtagcttgcttcaagctgcatatttagcaacaataagataaattcttgcttagttaaggtgggaggtaggaaaaggtttcattgaaagcctacaacaaaatcatcacagaacaggtcagcaccccctttggctatgaatgtcaccaacagggccctgcccagggtggctgttagccaccctggacatgggccacagcacagagaagaagagggaggtgcgtagggccgtggctctgccctggctttcctggccccatatctggaggtggagggccacagagccacagtgaatagggcagaaaacctgcaagaggctagagttacacttacaaggcagcccaggcccactaatgcaggtttctttgccaactttatccaaaagttgaaatcacatcactgaaaataatacgaattgggtagtagccctagttagctcatgctgatcagaaaccgatgggcgattgttgtcattccaaaaatggatgaggaaattcttaccaacttcagagttctagtctgggaatgactgtcttagggtctgttgatgggaaagtaagaaaagcagtcacaggttattagaagactgggaacacattgactgcgctggcagagcgttgcatgctagttgaattgcagtgccttttttttcctccacggcatgatgtgaagtagttctggcctacgttacatttctcagatctgttctccctcttagatcagagagcatagttcgagagatggagctgttgggaaagattactgccctggacttaaacccagaaaggactgagctcctgagctgctcccgtgatgacttgctaaaagttattgatctccgaacaaatgctatcaagcagacattcaggtaactgaagatgtgctg

SEQ ID NO: 99239 - DNA, 1009 bp, Homo sapiens
ggtctctcttggcctggaagaataacactgaaaaaacctgacgctgcggtcacttagcagaggctcaggttcttgccttgggaaacactactagctctgaccttccatacctcacttgggggagcacagggccccgctgggcctcctcaccaacggcagtgccaaaatcagcccccacatcaaggtggtgttctctgtgctttctctcgtccttccaaagtcggttctggcctaacgcatgtcccaacaccttgggttcatttgcccggtgaactcactttaagcattggattaacggaaactcccgaactacagacccctccctggtgggttgcatgaatgtgtctcattactgctgaaatgtcctcacatctctttcactgttcttcagagctttctggctctctttcccccacaaaattcgacatatttaaaaatctccgtgtggctttaaaaaatggttttttgtttttttgtttttttgaggtgggagaggatgtgtgaaaatcttttccagggaaatgggttcgctgcagaggtaaggatgtgttcctgtatcgatctgcagacacccagaaggtgggtgcacactgcatgcttgggggtgccaagggattcgagacctccaacatacttgtctgaaggtggtgattctggccatggcccctctgccaagcctgtgtgcgatgcccttggtgctttagtgcaagaagcctaggctcagaagcacagcagcgccatctttccgtttcaggggttgtgatgaaggccaaggaaaaacatttatctttactattttacctacgtataaagttttagttcattgggtgtgcgaaacaccctttttatcacttttaaatttgcactttattttttttcttccatgcttgttctctggacatttggggatgtgagtgttagagctggtgagagaggagtcaggtggccttcccaccgatggtcctggcctccacctgccctctcttccctgcctgatcaccgctttcca

SEQ ID NO: 99240 - DNA, 1117 bp, Homo sapiens
tgattttcctgcctcagcctcccaagtagctgggactacaggcaaatgccaccatgctggctaatttttgtattttgttgtagagatggagtttccccatgttccccaggctggtctcaaactcctgagctcaagtaatacacccacctcagcctcccaaagtgctgggattataagcttgagccaatgcacctggcagaatatgcatttctaacaagctcccagaagatgctgatgctgctggtccatggaccagactttgaaaaacaagaccttatggcacacatgtaaagagaagcctctccaaacttcaaataattcttcaggttatagatctttagcatattgaaaatttgatgtgtgcagatttgtgatggccatttatcagtttagcatttcatgcatgtctgattttttaatatgttcgagctctttagagttgaagctgtccacagcaaagacattacttcatttgtatttcctgactacagtacacagtaatgactctgtagaactgcatagctagaatggaaagaaagaaaatggagctaacactccgaccagcacattcaccagcacattataaggtattttgaaatttcagtgaagaaccgtgtaattctgcaaagctatcagttaaaagagtttaatttatttaaaagtttctagaaagttaacattttttggatatgagcatgaaagtgcttggattcctgattttaaatttaaacaaagcattttttccattgtgaaatgaagactagtaaaaattaggtaaagggtttaagttgtaaaaaacttaaaaaaatgcaccgcagttttatgagatataattcacatgggatacagttcagtggttgttagtatattcgctgttttgcaaccatcaccacagtcaattttagaacattttcatcaccccgtttcctctcaactccctcaaccataggcaacaagaatctactttctgtctctgtgtttgctgattctggtcattttacataaatggaatcatacaatatgtggtctggcttctttaacttagcataatatttttaaggttcatccatgtcatggcatgtatcggtacttcatttctttctgttgctgggtaata

SEQ ID NO: 99241 - DNA, 1050 bp, Homo sapiens
tagatggcttgaacgacagttggcccttttgtttgtgcatagaacccaacaaagtgactctaagagcccggtggcccggcatggcccgagcgaactgtgcaggggcctggccctttcactcctgactctgctctagggggcaaggagaggcctcgtcagcctagcagcatttcctgtgggtgcctttcacagctgccacgtgcaaaatacagcacattattttggggtgttattttcttgaccacttttggttcattgcttttgactaaatgtttaaaaatattctgcagcatatctatagtactcacaagcagcgaatcaggagaagaaatgcagtttctgagaaggcttcaaagaaataatggtctttatcttttccccagccttttccgctgaaacccaccagtctttttctgagcactcttgttataaataaagcagcagctctccttgggcagcccaagatcgcagactctcatccgccctcagaaagattgtgcgtgtgcgtgtgtgtgcgtgtgtgtaagtatgtggtgcagtgagttgtgttttaattttgcttttcttttatgtatgagatgtgtagcaggagatgcaagaaaaaatactccagcatctgtcctttaaagataacttataacttttctgggttttgggttgttggttttgtcttttttttttttcccatttagggaagagatggaagtgattgctttccccacaaaggtaaggaagatgaatggggggccaggagagacgtcttcacagtgaggcctttgaggtcaacagagaaagggtctcgtggtatatgtttcaggcttccatggatggcattgttctgtgcagatgtatttgaaatgagtttcatccatgtgtacttggatgtgaaaaggatgtttggaaacaaataccatttcccagtccttcacactgaagactggtttatatcctcgctaccagaatcggggtgggactttctgtctgccttggatcacccttggtctgttttggacgggacctcagatgctaactgtatgctggggatccccg

SEQ ID NO: 99242 - DNA, 1864 bp, Homo sapiens
tgcctcagcctcccaagtagctgggattacaggtgcctgcaaccacgcctggctaaaatttttatatttgagtagagatggggtttcactatgtaggtcaagctggtctcgaactcctgacctcaaatgatctgcctgcctctgcctcccaaagtgctgggattacaggcatgagccaccgtgcccggcctagagatggggtttcaccacattgcccaggctggtcttgaactcctgacctcaagtaatctgcccgccttggcctcccaaggtgctgggattacaggcatgagccactgtgcccagccaaagtagaaggagctgagcttcttgatgtgtgaacagaaatgggaaattctttatttttaggctttctagcaattaaccttgtttctgtgtgccctattgtaggtagatttaaagctagaagcaccaggtgggtgctgctggaggaggagcagccagtgaaagtcacagattactgccatgtttaagcggatgtggtgttagacattcagacaccagtgtgttggctgggattctgaatacctgtgttttttatcaggattggtgtcagtactaatattttggtatttaagaaatctggagtctgaataatttacattttgagacatatccctagaaagttactgcattaaaatttgaaatggaacaaagcagcttgtttagaaagggttctgaccacttccctcaattaaaaaaaaaaaaaaacacgacaaaataaccttttacagttagttctggtggtgcggggaggggaaaggttacttaaaagattgagtttcttttctgagttattagtttgattttctccagggttcctcatagagccatcgtagaatagaggggatggtataagggaaacaggaggcaggggctgtgccgggggaccctgtagggagtggagagggagacgggggaggtccccaggcctgactcccagccctgccctggagcatctttctctccaggaccaggatccttctgctctactcccttgtttcctttcacggccagaccctttccatttggacctgtctctcttctccagaagaatttgttttagccaggaccttccccctccatgtgctcgctggaggaacaagccaggaggacacggaatcctcagtccagaccccggccttccctcagctaaaacactgtgtgagaacatacttcacatgtaaaagtgaatactggtattgacagtagtaaatacagaaataccagcattgggttgtttgctttggttctctctctttcttccttcactaatgcaatgacaatgtttgtagatttttttaaaaaaatcatggcactatacctgtgagcccgagcttttggttagaagcaggtgggtgggttaatttggattggcttattgattggatgctacagtttcaaggtactggggcttctgtgggtgcttgttagggatcattggggtgtggtgggcagcgctggctagtgcttagggatgtacctgtctttatgtgccttagtccctgtgtttgtctctttctagtcaatcatatttgatgaggtggatctgacagatgccagcgtagctgaatccagtaccaaaaacgtcaacaacagttttacggtaagattcctcagtcatgcctttcttgattcttcactgaagttggctttcctttttgatctgaacatgtgtccaagcagttcaaacgttttcattcttttcttactgattggaatgattgctggtaaaatttgaatttaatgctgaaagtaatactgtggttggagaataaccaagaatttggcatgcataagcacaaaaggacaatagggaccaaatgaaaaatttttatatgtg

SEQ ID NO: 99243 - DNA, 1616 bp, Homo sapiens
gggtgtgttggcacatgcctgtaatcccagctactcaggaggctgaggcaggagaatcacttgaacccaggaggcggaggttgcagtgagccgagattgtgccattgcactccagcctgggcaacaagagtgaaactctgtctaaaaaaaaaaaaaagaaagaaaaaaaaagaggtgatcaggccaggagggctctgctctggggatggattaatgctgttattgtaggggtcagttcctaataaagggatgagttcatctcctcccccttgttctcactgtcacctttgacgcagcatgaagcccctcaccagatgccgcaccatgctcttagactttcgaactatgaggcaaataaacttctgttcatttaaaattatctagtctgtggtattctgttacagcagcgcaaaacagactaagacacatgtctagagggctgcttatgtgtaatagctatataatactgcatatataaagggcagtttatatttaatgctggtagaatatcatgaaggtagtgtatgttagagttaggtttagctactgtattagtttctcatggcttccatagcaaattatcagataacatgaaacagaagaaatgtaattctatcacattcctggaggccagacatctgaaatcatggtgttggcagggctggggtcctaggagagactctgtgacttgcttttcccagctcctggtaattccaggcattccctggcttgtggctgcatcgcttcaagatctgcctctgtctccacatggccttttcttccttcttctgtgtcttctcctctgttttcttaaacagacacctgtccttggatttagggcccactcagataatccaggatgatctcatctcaagatccttaacttgattacatctgcaaagactgtttttctaaataaggtcacattcacaggttccagagattagaacatggacataccttttggaggccatcattcgatgccctatagctacaaataagaatggtgtgaacaggcaaggttttattctttcacaccaaagaaagtagtccttggtgagtatggtcattctgcaaggtcgaccgagcccttccagaatgtgagtcttctagtctaagaggctatgaggtgctagtcaccactgtgtctcctgttgttggacggggagacgaggagaggagaaagtgtgttgcctggtaggagttcataaccaggattcatggccccctcaaagcggtctgtggatatgactatattgtattaaaattggtttccactgtaatcataagtattttatttttggcacttagagaaattctgagaaggagttcataggcctcaccagactgccagaaggggtccatggcacagaacagacgaggagctcttgtatgacttctccaaagtgtgacatggcacttctgcggacatcctcccggttgatctttagttatgtgctcataccgtatagctctcaggatgcttgccctgaaataatcatatcagaataaccatgttatgcagagagaagggtgatttttcatgtctgtatttatgacttccttttccccaagtaatatttttgaatagtttatggtatcaagaagtttgatga

SEQ ID NO: 99244 - DNA, 1906 bp, Homo sapiens
agaaactttatgagagaagggatatcatggggcttgttgatctgttttcatcccagcgcccccgaaccatgcctggcaccaaatagccacactgtaaatgcctgtggggttaattgatttgttgttgctgtatctctattccttggcacctctgggaagcatttttgtctccccccgtccacatgggaccgtgtcgtcactgtgctgtgacgggagctggctgagtcaggctggcaggctgtggctgccctgcatgccgtgccctcccacggtggctcttcaaattcttggctatgtgcccagcactggtacacagaccctctgagtcagggcttgccaatggaaaaaatattttcaaccttttttggtcttttaaaatattaaaacctatagttggaattacttcttttcatttttacaatgtacttgaagtatcagaggaataaggaaagccattgtaagcttggttagtggaaagggataaaccacctctgagcatccaaataaaattaggaagcgggggttctagatgagggaggacaattccaggaggctcttgaccttgtatatgattccctgactgggaatgtggtctgagatgccctttcctggacagattacaaatgacagcccctggagcaaacacatgaatcagccagggagttaaaaaagaacagggtagtttggactgggcctctctctttcaggacatgactgctgtggctacagactgcattcaggtccccagcatctggaaggagtctgtgcccacttatcctttgcatcctaaggggactgggtctttgtgcaccagcagcagccgtagaggttgggcttgggaatcaggggctcccttatcaaagctgggaaacttagaacaacagctgtgccgctcatggacctgtagtctctcctgttaagcagagtgctgagttcatgtgatagcaaacacagctctgccagaccacagggtcaccaggcaggcactccatccctccctccagggggagaccacggcatgccttggatgaggtgacttggccaactgtcttgtggccccagctcctgacattacaatgtgatgactgtgacacttggaagagaaatgtctcaggtatcgtggtcctgggtcctgtggtacaggaccttgtctctgcggtcctgtacttttgcttcacaattagaagaattgaaagcttcaggttgtttcaggtatgttttttcaagaagtgcaatagtagtgtgtttatagatgttttccttagagttagttttgggggagagaagatgactgcccttccatcctgcaggtggattggctggggaatgaggccatctcttttcagagtgagcagtgaaccatttttgtctgtacactgacctggggctgatttggcatcctgaccttccagtctgagggagttggtaaggggctggaagggcccattctttgtgtgtgtgggtattttttagagacggggtcttgctgtgttgcctgggccggtctggagatcctgagttcaagcaatcctcttgccttggccttccgagtagctgagactacaggtacatgctggacccacactttggactctgtccctgctggcctagttctttgccaagagcaaaacttgagagcaccctcacacaggtaacagttagaccttgtcaggagacatggctgttttcccagacagctgagctttcagactaaagcacagaaaagttggaggacatgggactccttagcccacaaaagaaactctattttaattttccatgtgaaataggagtagggtacgttagggtagggcatcttggttatgagatgcctgcagcaagtgccatcagggtggctgccagctgagtcatctccctcaaagagctttcctggaaccactctccc

SEQ ID NO: 99245 - DNA, 1047 bp, Homo sapiens
ttttctcatttctcttggaaaatcatgtacttgaatcaagaatagaagccaaaattgttctttcaaatagaattttaaagcttttttttttaatccttaacatataaacgtaagactttatttttatttatttatttatttttaagatggagtcacaccctgtcgcccaggctggagtgcagtggcgtaatcttggctcactgcaaattccacctgccgggttcacgccattctcctgcctcagcctcctgagtagctgggaccacaggcgcccgccaccacgcctggctaatttttttgtatttttaatagagacagggtttcactgtgttagccaggatggtctcgatctcctgacctcgtgatttgcccgcctcagcctcccaaagtgctgggattacaggtgtgagccactgtgcccggccgactttattcttttttaatagctcatttttggattggcaacacatgcaagtggtacagaaatcttaaggctaaaaagatataaagtgtttcccagccactcagaggtcctctcagttagaggtgactaatattagtgttttctctgtacccatactcttcctgcaattggcttttatctattaacagtgtgtcttagaggttgttccatataagaacatgtagagtagcttcaggggttttagtggctgcatagttttctgttatatgaatgtactgtcattactgtagccagtctctaccagccttatattgatcactatttgtttggtttcaaatattttgtctttatagtgaatgccgccacaaataaccttgtatatacagtatgtgatttctcatgaagatacaggagaggataaatttatagaagcatggttgttgagacacaggtgtatattttcaagtctgacagattttaccaaatggtttccatagaggttgtattaatttttgccccagtgtatgagaatcagtagaccatattataaaacatttgatctctgtgaatctggtaggttaaaaaatgggatctcctaattttaacttgcatttgccttataa

SEQ ID NO: 99246 - DNA, 1012 bp, Homo sapiens
aaatggaaaggcaaaggtggagaaaagtgtccatgctactgttgacaaaagggacaatgtgatatacatgtttgcatgtatcttaaaaatggaaggagaaaccttactttctctctctcttttttggtaaagcagcctatgggaaccaagataggggagagatataaaagctagatttctaaatctaccttgtttgtagatttgactttggaactccatcgctatattataatcattataaaacaaaattaagtaaaaggttatgacccttgaaaattttgatatacactatcaattttttctctaaaaagtttataccctgtttacctcctgtcagtacttgaggagaactctttttcccccacatgtttgtcagtactggatagtcatcttttaaaactttgccaatcccatgggcaaaaaatagattgctattttcatttgcattctctgatgactagagtgattaagcagctttttacttgcttattatccattttgtatttcttctgtgaggaagtccaagctagagcaatcaaacaacaacaaaaaaagaaataaagggtatccaaattggaaaggaagaagtcagattatccttgtttgcagatgatgtgatcttatatttggaaaagcctaaagaccccaccaaaaaaactattaaaactgataaattcagtagagttgcaggatccaaaatcaacatgcaaaactcagtagcatttctgtatgtaccaacagtgcacaatctgcaaaagaaatcaagaaagtaatcccatttacagtagttgcaaataaaataaaatacctaagaattaactgaagaagtgagagatttctacaatgaatactacaaaacattgatgcaagaaatggaagagaacacacaaaaaatggaaagatactccacgttcatggactggaagaatcaacattgtgaaaatgttcgtattacccaaagcagtctacagattcaatgcaattcctattaaaataccaatgacattcttca

SEQ ID NO: 99247 - DNA, 1684 bp, Homo sapiens
ctcatggtattccagacttacagctgagcagacttccctcaactgttcaaatgctggccatcactgtgggctccctgaagcagtagcaactgtgtcttccactgttcggaaaacaacagttgttacttctttttttatttccttagggtttactactgtgtctaagtagcaagcaattataaatgtccacttaaattgattgctgatgaatatataaaaactaaatttcactgtctttttggtttgagatcattcttatttttaatttttagtgatccttgataaccatttttgttttcggttcagtgtgaatacctgaatgaaatagtaatttttatgtctgtgtgaggtcggttttaagaaagcgttcatagctatcagcacttgccttttgttcatggatctgttgaacctgtttctttctctaggtcataactccatgcaggaagctcatcttgtgtgctgataacagaaaagaaatggaagattggattgcagcattaaagactgtgcagaacagggagcactttgaggttaaaaaagaaaatacccttctccaaatgcctcctgttgcctccctcaccccagtgtctgctgtctgagtgtctcccacgtgcggacccacagtctggagctcacgttcttagcatgttctttatacaattaaagcttattgcttgtcctctcagcagacctgtcctttataaaccttcctcctctcctctcttggatactttgtttaatcttgtccaagttactgcatttaacaatttaaaagagaagtcttatctttgccctcttggtttcgttcttccagcccacccagtacagcatggaccacttctcagggatgcacaattggtacgcctgttcccacgcgaggccgacctactgcaatgtgtgccgtgaggctctgtctggggtcacgtcgcacgggctgtcctgcgagggtacggatgtgcgtttgttattctgtcaggaaaggtggcctggcattttacttgataaagccttggaaatccaaacccagtcaccataaataagccgttgtcacccatgtggtcagtcaagggcacagcgatttctgtgatgccattcttgtttattttacctgccgaagagtccttgataaatcattttttatagtgctcagagtgaaaagggaagtggtgggtggcaaaaggagaaatgggaaatctagagcacacagagggaaaggcactgaaggaacagtggtcggcccctgtgtctcacactctgcagccggggaaacggggctgtgcatatatggactgaaagtgtgttacagacttagaggtcagggctgcagggtttgggcaagggcattcagtctggtggcaaagcagtgggctagagcagggcttgttagctatagcctggaccacaccctgcctctgcctgtttttgtacagctcccacgcttcagactggcttttaaatttttaaatgattggaaaaaatcaaaagaagaatcatattttgtgacacatgaaaattacatgaaattcaaatttgtgcccgtaaaaaaacattgtctctggctgcttttgtgctacatgacagagttgattagtggtgacggaagctggttgcgacctgcagagtctccactgctcactctctggcctgttacagaaagcttactgatccccagctttccctg

SEQ ID NO: 99248 - DNA, 1023 bp, Homo sapiens
tgttctgtgtggagcctgggcttggtgccgcatcacctatgcctgtctgtcttctgagcactcattctgggtcagacactgagctcgaggcagggtgcgcaggtgagccaggcggggagtgcagatgcagggaatgggtaggagcacacgcagggtcccccggcacttcagtgggggtgacacagcttctctgggaacccggtgggggcagggtcgcaagtcaaactgggcgtccttccacgtctccccgagctggcatccgaggagctctagtgttctgaaggctgcagggaggcgggaggcttctgggctgagggcaccgcttgtgcagaggcgaggcaagagggaatgcagtggggccaggccaggcagcagcagaaaggtggcacctgccgtcagggagggctgcgggtgctggccaagaggttcgactccttcctgcaaatgaggggcagcctcataaagcaaggcccgtggccaggctcgtgttttagaaaggtcttcctggaactcatggggagctttcaggaagggtgtcaaggtgactgaggctcctgtgggactctgcgagagcacggtggtgacctgagcgggtggctgggttgggtgtggaggagaggctgccaggaggggctgggtcggctgcaggctgagaggaggtgggtctggcctctggactgggttggtggtcgagctaccattctccgagtagggatgtgtcctgttggatgtgccctgggataccagagtggtgtgttctggaggacaggtgcaagtgttggctttcaggagtggcctgggggctgttgatccagagtcacctgtgtggtccttgaaactggatgtggtcacacaggaagaggatgaggagtgagcagaagcggcactggtctcctgagtggggacgctgctgggcaggggcagggggagcccaggaaggaaggaaaccgaggagttaggagggtaggaggcgtgggtcacatcaccggaggactgagtgggcccaggcatatgtgctgcagt

SEQ ID NO: 99249 - DNA, 1091 bp, Homo sapiens
attggccacttcatgctcacctcatgtaaatgaagtggtagcttgcattcagtctgattggtggcagaaagcagccaaccagaggctgaagtggttacaaaggtcacactcctgtgcaaacatctgattggttgcaaaaagcaaccaatcagaggctaaggtgaagttacaaagttgcatttctatgcagactaagactcagctcgcaatcagtatggttggttgtggacagccaatttccccaatttcccacctgccagggcgggaaaggtggggatttgcaaagggagtagcctctggtctttttgttacttaggcgtggagagttaggattttccttttgatcgagttctaggaagtctgggtgaaatggcctgaggttccctgcctgcagaccctgttctcctgcctcagctctgcatgccatttcctttccttgttcagtgctctgtcctgaaagagaagctggattcccttctcaagaccttggacgatgagtcccaggcctcgtcctctctgcccaacccgccccccaccattgccgaggaggctgaagatggagatgggtcgggcagcatctgcggttccaccggagaccgcttggtggcatcagcttgcccggcccggccgcagatattccggcctcgagaacagctcatgctgagagccaacagcctgaagaaagcaattcgtcagatcatagaacacacagaaaaaggtaactggccttgtgatgaggaggggctttcctcaggccagcactgggcatgcccagcgtcccctgaacacggagatgacagaagggtgcatgttgagaaaacctccactgcggccctctccacccatgtccaggcaccagacccccaacgagttcgcttgccctccttccacccctcctctcacaccctcagaccccttcatgctgcctcccctcgacctctttcctggccctcattgacttcactataagcgtctcactcccgtgagagccttgaggtcacggcctcacacccgcacacctgcgtgtccatgcagccgctcctcccgcttgcagccctccagcctgcgccaggctcctctgcatcccttgc

SEQ ID NO: 99250 - DNA, 1030 bp, Homo sapiens
cagaggttgtttgaggaagatcaggccgtggggtgaggatgaggggccctccacccagcctgacagcgcccttggctttgcacccgcgtgctcagccgcacacactctccttgcacagctgtcgatgagcagaatgcccagacccaggagcaggagggcttcgtcctgggcctctctgagtcagaggagaagatggaccacagagtgtgcccaccactgtcccacagcgagagcttcggggtccccaaggggaggagccagcgcaaaggtacttgtgcctccacctccctctgcgcaccgtcgtgtgcttggttttggtgagacgtagcgggcttgccaggggaggttttagggcactttctcatagttgctttggccacttggttacataaaaattgagcgcccaaggcctgtttctgtgcatctcctgtgcgcgcccttgaggtgggtgtgtgcggtctgtcttggtggacagcagtagaacccgcgagaccccctccatcagggcgaggactgcctccctgaggagcacttgcgtcctgccctcactgcttccttggaaccacactgggccccagaactgctcagaaggggctgtgtctggcagagggaaggcgggtgggtgagcgtgggccttctttgtccttgcccctcctggaacagcccacagcgcaggccctggtggagggcacccccagcctgtgcaggctgctgggaggcccatgctcagaactgacccatggccactgcatggccaccactgagagctctgctgtgtgtgtgctccgcctcccacagcccggactgactgggctcacccctccctccagcgctgccacctgtggcctgtgttaacctctccatgagcccagccccccaaacatgtgcacccactcggtcctccgcccccttctttgtcccacacacttcacgcaactgcctgtggtttgcagccctccctcctcagccctcccacctgctcgtgtcgctaaggaccccccaggatttcacagtctctattccacacagc

SEQ ID NO: 99251 - DNA, 2079 bp, Homo sapiens
tgttctaggattttttttttttttaagacacaatgattaagctaatagggcagtaatttctaggaccatctccttcccctaatgttaaaaaaaaaaaaaagtcctatttgtctctttctagttgtgatctcgttggcatccccatagtgtctgtcgcagtcagatgcatgcttcagagcagcaggtgtaattgggctttcgggtccataggcatttgagagcaccctgaagtcctgggaagacaagcagaagtgcgagctgccccgccctccatcctgttccctgcacccggagatgctgtccgaggaggaggccacccagatggaccagtttgggcaggcagcaggggtcctcattcacaggtgggctcctacccctctgcgttgcgcatgagcctcccccagggtccctgggactgcactcttccaaggcccctggggcgtggagctgctgctcctgacttttgtggggtctgcattacccatgagggccgagcctgtttatgtgccctcagctctggctcatttccccagtggtctttcagaactcgcctggagtttacatggctggaacctaaagcccactgtgattttcaggaccactcgtttaaaacctgcccgggctcagccgggcgcggtggctcacgcctgtaatcccagcactttgggaggccaaggtgggcagatcacaaggtcaagagattgagaccattctggctaacatggtgaaaccccgtctctactaaaaatacaaaaaaatttagctgggtgtggtggcgggcgcctgtagtcccagctactctggaggctgaagcagcagaatcagtcgaaccccagaggcggaggttgcagtgagccgagatagcgccactgcactccaacctgggcgacagagcaagactctgcctcaaaaacaaacaaaacaaaacaaaaaaaccctgccctggctcccgagggcagcccgctgacagccgccttcactttgccctcgttttaccctgagaacaggcttgctctttgttctcaagtttactttaaaaaaaaaaaaaaaaaagacaactgctggggcatttcctctcacctgccttctagaaacacccctggagccactgtgtccctcgtggctggtggtcagcattgtctgccattcctgctcctcgcccgccaggtgcgggttccgcctgtgagtccctcccagccggcagctgtgctgctccgccggtgcggggcctgcctgcattctccccccgtggccgcacgctggctggtgccctggtgtccctttcttgtttcccctgggctccttcttctcctggctgtggacaggtgcacccgtcggttttgtgcccggcatgccgtgtgcccttccaggcagcctgcccagccctggcgtgcagatggatcgtctgtgccagccttcggctcttgtcgagcaggtggtcgctgtcccagtcatcaccggcgttcctcgctctgcacttccataccggctgcagtccttcctggcgctgcattctctgccccaggagttggtgccactgcggcccctgtcctcgtctctcccccaccccacccagatcagtgatggggctggaggacttcagttcagctaattccttgccgtgcagtgggcttctggtggcctcccctggaaagccattaccctgtcccctcaaagcccatggtggcccctctggcctgcctggaaggtgcacttgcacagcactgcaggaagctgctggcagcggcctgtttccacagggtcaggacaggctggccccgctgcctttgcttgcactgctcctatagtctctgtcccccgatctcacctgcctgagccacatctcagcctccctgggacctggtgtgacttgtgctctcaccgtcttccctatgagggctgctatctggggtctggctcagagcccatcactgcaccaggattgtcctgttcagatgagggtccttttgtccccagggacagaccggccagttacaggttccagcaaggctgtggggattgtgccttactgcagcagtctctgcagtgggcctgtgcacactgtcacttgcccactgg

SEQ ID NO: 99252 - DNA, 2296 bp, Homo sapiens
caatccaacactagaagattggctaaagaggttattttaataatttttgtttagatactgatatttatgatattttcaaaaagtttttaaatctcatgagaaacgcacatgtaaagtgaaggaagtagaatatgataaaaatagacactatgatcactttgaaaccactttaacactcactaaaatcaacactaaatacaagaatcaataagggagagaagccctttcaggcacaagaggtctttcccagctcccgctcatctcagccctgcctgccctcccagcctctctggtggagatgggcatgaggccgtgatcagttgcagcctgattctcagtattcctcattctccccaacagagtgtgatgctggatcttgccaagcgcagtcgcagtggtaaattccgcctcgtgaccaagtttaaaaaggagaaaaacaacaagaacaaagaagctcacagtagcctgggagccccgggtacctgcctctctcccgcgtgtgtttctggccgtccacgcctgctggatcggccccgttcccctggtctctgctttctcccttggccttgcagctcctccctcttggtccctgtgctgtaacccccggtcctgcgaccacacttgtctgttggtagctgcagccctccaccctgcctgcttcccctctgaccgttgtcacacccggccctgacgtgctctctggctttctgcctgccctgagttgggggattcgaggtggggaggaagacagcagtagagtggtgacaagacaaacttggagacacaaagctctggactcaggccgtgctggggcatgccctgcctgctccctcctgggctgctggttcctgataaattgatgcattggtcgaggttcctgtgctgggaagcccaggccaccagagattgtgggtgatgaaatcaatcgaatatggtcctgaaggacattgttcctttgggtcagtaaattggagctaaactctctgtctgaaggatcagccctgaatacccaggccatatccagtgctgtcaggggctggagaggcctccaagcctggatattgggactggtgtttgccgccagtcagggcagctcctgtgggtttttcttctttgcatgtttgtccagaaatggggtttctgttaataatggtggctctgactatgtgaattgaaatctctgctcgtttcctttcctgctatggtccagaagtgaaatttaacccttctagaagctggaggaaaagctggctttggccacaatcatgaggacatttccctcatatttggtggtggtaaatccctcctgggacacggggaaatgaccagaggctggcggcccacctggcaggaacagatgccagctctgctgcagccatcgccccttgagcgggtggctctgtgcctctttctgcactgctggtgggtggtgctgttggctgggtgatggataccggctgccagagatggctcaggtgccagctgctgggctatctcaggcactggctgctgggctatctcgggtgccggctgctgggctatctcaggcgctggctgctgctgggctgtctcgggtgctggctgttgggacgtctcctgtcctggcactgggctctcgggtgctgggtgccagctgctgcctaccttgcactgggctctgggcactcactgcactcgtgcttttccatctccgacagttcacctctgggggacagaggaggttgctgcctggctggagcacctcagtctctgtgagtataaggacatcttcacacggcacgacatccggggctctgagctcctgcacctggagcggagggacctcaaggtacttccataggcgtctccctggaacctgcacttgggcttgcacgcagctcccttctcttccatcctctcccccgacctggccatgtcccagcatcacgattcttctcaggctttcgtgtatacctcaggtgggggcggctgtggccctcatctaggcagtgatggctccacccaccacaaccagaggaagccaggagcagacataatggggggcagagccttggttatcttaggctactcagacaaggactgtcttcgtgttaaaaacactatgaggggacacagaccctgaagcacagtcacacacgactgtccccatgctgctcctgggcgggtgctgccactcgtctgcagggagcattgggaggggtggttgggtgccaggcctcggtctatgccaggcctcacgccacatcttgcaggcccatgcccctgcccaggttggcctcaacgggccaacccctgg

SEQ ID NO: 99253 - DNA, 1030 bp, Homo sapiens
cctggcatagaccgaggcctggcacccaaccacccctcccaatgctccctgcagacgagtggcagcacccgcccaggagcagcatggggacagtcgtgtgtgactgtgcttcagggtctgtgtcccctcatagtgtttttaacacgaagacagtccttgtctgagtagcctaagataaccaaggctctgccccccattatgtctgctcctggcttcctctggttgtggtgggtggagccatcactgcctagatgagggccacagccgcccccacctgaggtatacacgaaagcctgagaagaatcgtgatgctgggacatggccaggtcgggggagaggatggaagagaagggagctgcgtgcaagcccaagtgcaggttccagggagacgcctatggaagtaccttgaggtccctccgctccaggtgcaggagctcagagccccggatgtcgtgccgtgtgaagatgtccttatactcacagagactgaggtgctccagccaggcagcaacctcctctgtcccccagaggtgaactgtcggagatggaaaagcacgagtgcagtgagtgcccagagcccagtgcaaggtaggcagcagctggcacccagcacccgagagcccagtgccaggacaggagacgtcccaacagccagcacccgagacagcccagcagcagccagcgcctgagatagcccagcagccggcacccgagatagcccagcagccagtgcctgagatagcccagcagctggcacctgagccatctctggcagccggtatccatcacccagccaacagcaccacccaccagcagtgcagaaagaggcacagagccacccgctcaaggggcgatggctgcagcagagctggcatctgttcctgccaggtgggccgccagcctctggtcatttccccgtgtcccaggagggatttaccaccaccaaatatgagggaaatgtcctcatgattgtggccaaagccagcttttcctccagcttctagaagggttaaatttcacttctggacca

SEQ ID NO: 99254 - DNA, 1057 bp, Homo sapiens
tgcccagtaccctctctctccttgcggaatttttagtccaactgatcacagaacccacaccctaaaaaatacaacagcattctaatggcattctaacggcattctgatggcatgctaatggcattctgttttgctttttagccaccaacaactcaacctattttcagagcaggtgaaaaacaattctgaatccagtttggaaagattccggcaaccaacactttatgtcaaagcacaaggaatgatgacaaagactctggcgatggaagatcaaaaacaggcttgttttatttatacacagaacaacttatgtacagcactcaggtatggactatgtacatgacaatacaagaggcgtttgtttccacggtggtcactatataaattaagattataaatacgagggggtaagccccacctgagggcacagaaccttttctccaagactcttcagggatccttcctgcctctctctgcacagcagaccatgaggcccgtctggcaacaccacaaggggacctgggccggggcagcagagcagcccccagacagcgaggacaccccagtgcgggacgccagcccagcaccaaagggcaggttcctaaacactcatgttcattccttcctcacattctaacttgttagaattagaaaaatggtttttatgtaaacagtgttgttctaatcactgacaacatattaattttaaacacttttgatccaaacccaactccttgccaggagtaggacactgaggacttggggtggccctgatgtccttgaagccacagtcagctgtttatcctcctcatgtcccctccccacccaagttccagcttgcctggggcttgttctgggaccctaagaaccccaggatgcccacatcgccaggccagcagggccaatggtcatgcagggactgcgggacaggttcccatcatctcctgtgttagcccattccacctgggaaaccaagcgactgccgtggctggcttatttctccctctgccaacccccatctacaatgttctggggaaaacaatgagaggtggaaaag

SEQ ID NO: 99255 - DNA, 1077 bp, Homo sapiens
cactactagaatataagtacttggtttattcattgctatatccttaatacctagaatagtaattgtgcccatgtcatagtcaataattatttattaaataaagatacacccaaaattgtctacaatcaaaccatcttgttcttttttcgctgtaggaaaatattttacaagtccttttgtaaatatcatgaactattaagatttgctctacctattatgatatgagtatccttcttgtggtctgcttgttatatgagaaagttatctttcaaccatgtctaacatgtatttaattttagtgtttttataaaaacacattcttaatacaagttgtacaaccagaaatagtttcctggaggggaattccaggatcaaatggtgtggacattttaaacctcttaaaatagttaaatatttcttcaggcaagttgttccagaatatgagtatttattttacctcacccacaaaccagcattgactatttcatcgtctaggtatttcctaaattgataaatgaaagatgattatcttgttctcatattctccagtgctttgatgactaataagttcaggcatttttgcaaactgtattttgtgagtgcatgattgagttatttcgtgtattttgactgcttctgtaatgaagtctaaaggaaaagctctcttggaatttgtgtgagctctttatgattttgaccctttgtcacaatggttgtaagctgtgtcaggttttgataggcacagtgccttttgcccttttgaagagcagctgtgtgcctcctcaggccccttccatgggcttttctgtccttgaccaacttccagggcactcctgctctcaaggaggcctctagtccctcctgtttctctccagcagcctctgtcccctccttggcaacttcagcatctgtgccgatgccctttctgtcctctggccgcactgtgctgggctccaggccttggcctcactccctggccagcagccccctcccccatggggacatggggctgtgcagcctctgctcttgcactctgcactcccctgattccatgggcccacatcttcccgtgaactc

SEQ ID NO: 99256 - DNA, 1071 bp, Homo sapiens
agccaggcgtagtggcatgcacctggaatcccagctacatgggaggctgaggtaggagaatcgcttgaacttgggaagcagaggttgcagtgagccaagatcgctccactgcactccagcctgggcaacaagagcaaaactccatctcaaaaaaaaaaaaaaaaaaaaaaaaaaagaaagaaaaagaagtagtgtatgtgggagacatttattaggagtaaaaaacattgatgatgaagcaatttatacttctgggtaggcataattattgcttaaattgtaacattaatcatagtcgtattttcatataaattgagattttttgttaaagtttcatgggcccttggctttacatttttgaaagtaaataatacatttattggatttttaaattcagattaaattgcatttacacatctgtcttgttattagttgttcctgttttttgcaatggggagtgacgttcaacctgggacagaaatggaaatcgtagtagaagaaacaatatctgtgagagatgtaagtaattttaccttttgttttcagaggctgtgtgtgtttgtatgtttgctgtgaggaacagtggtatcctgtgttaagatttggaggtcctaaactaggcctgatatggtgtacttcagagaattatatgtactcactagaggaattattttgggagcttgaaaattggtgaaccaactggatttttttttttttttttttttttttagagagtctcaactctgtcacccaggctggagtgcagtggcatgatctcagctcactgcaacctctgcctcccgggttcaagtgattctcctgcctcagcctcctgagtagctgggattacagttacctactaccacacccagctaatttttgtatttttagtagagatggggtttctccatgttagccaggctggtctcaaactcctgacctcgagtgatccacccgcctcggcctcccaaagtgctgggattacaggcatgagccattccactcggcctcaactggaaattttaaataagattacaatttttttctttctatcaataatagttttttatt

SEQ ID NO: 99257 - DNA, 1714 bp, Homo sapiens
tggtgtatttaagcaatggatactgttcgtcactgaagagcaaggcactgctagttccaccacatacaacacatgaatgcatctcaaagtcattatgccaagagaaagaaagtagatgcaaaagagtacacattgtgtggttccatacataggacactttagacaaataaaatctaagctgtagttacagaaggcagatcaggattgggagggaggaagagggattggctgcaaattgacagggagttttaggggggatgatgcaaactatacctcagtttgctggtggttaccagatgtttaggtacttatcaaactattaactgtacatttaaaccagatgtattttattataagaaaattataactcagtaaagtccattaaaagtcattggtttattaaatgcatagtttgctgtcatcccatgaaacttgtctcccttcttccactcttgcccctctccaaaccatttgatcatcgtcaatacgtgtgaattagatcctgtcactcctccgcacaaagccctttagtgctttccattgcacttaggttaattccttaacctagcctacaagaacctgaataatttgacccctgcttaactgtaaccttgtgatctgcttttctgcgtactcacaactcacttcccatgctgacttttctgcgtttctcagtgcacaagctctctttaacccccaagacttcttagtgctcagtctctctttcaagtctcttccctttgcttttaacttcagctgtttatttggtcttatatgagatgttccttctcctttcatccctgaccacacagtcccagttaatcttgctgatgtactctcctaacaccctgtacttttccttcatagcatttatcactgtagctgcccttttatttgtgtttttaatatccacctcccccattagacaaggttctgtgaggactgagtttacactgctttgcttaccactgtatttccagtttctagcacagtgcctggcacgtagccaatacacagtaagtacctgttcagtgaaaaccaacagattttaaagagacagtattttaaaagcactttttaagttggggaactctttaagtaaattgtttccgtcgacaagagatttatgtgagaattgtatgctagcctcatattactgtaatacaagatattgaactcaggaatctcagaaagggattctgctgtggtctaataaagttagaacttctaaggctcagactattgttgtctatacagaacactcaaccttcccccacccctccaatttatgtcctactttttaagaattctgtttgaactgaaaacttggtatgccccttccaagcaccaggggatcttgaggaaatatattcttccaaagcaagaatctgtatcctcaaacatagcacatgctggccgatttaataagcataaaatcacccaacatattttaaatataggcagtctgcttgtactgctctgacatgcacgaatttcattactaccatttagttatataacatcaatcccccagcaagatggttaaaatttcagcaaccatggtatatggtatattaactgtaactgaataaagtacacacttgactgccagctcttcagggcacaattcatcacataaataacacatgtgcaccacaagcagtaaccattgacttcatttctttcaagtctggtggtttgtcactgcatgtac

SEQ ID NO: 99258 - DNA, 1018 bp, Homo sapiens
gaatacaaaaaacagtttagggagaactcacatacctaccacccaaaatggacaaatattaacattttgtcatatgtttgtttttgtttgaaacattataaatgaagttaaagtcccctgtgttctcctcctcagacctattctttctctccttccccagatacaatgagtatatctgatgtgggtgtgtatctagtccatgtattcatgttgtactatactgaatgtatattctgcaaactcactattcacttaccattaggctttctgtgacagccttattaagatataatctacataccataaaattcactcagtttaagtgtttaattcagtaatcatcagtaaatgtgtagagttctataaccatcaccacaatccagttttagaatacttccattactccaaaaatatccctgtacccatctgtattccaagcccctggcaaccactaatctgctttctgtctctatagactttattttcttaatgtttaatgtaattggaatcataaaacatatagtcttttgtgtctggcttctttcacatagcatatcatttttgaggttagtccatgatttagtacgtatcaatagcttgttcctttgcattgctgactagtctagtattccattatatggatagtatcacattttgtttatcctggacaaacatgaattgatagacatttggattgtctctacttttgtgcttttatgaataatgccactatgaacttttacacataagtcttggtgaggagatatgttttcatttctcttgggtacatgtaccggattggaattgctgggtcatttgcaaatttatgtttaactttataagaaactctcgcactattatccaaagtgactgaaccatttatactcccactagcagtgtgtcagggttgcagtttctacatgtccttgtcaatctgtgattaattgtgattatcttttttttttttttttttttgagacagagtctcactctgtcagccaggctggagtgcagtgac

SEQ ID NO: 99259 - DNA, 3142 bp, Homo sapiens
ctggtaatgcacctttataaatttgcaatgggagacattcctttcaagcagctagaagatgagtgtgtgctagagtcagggctacatttccctcaacattgctaattctgcaaattagtcttgctcttttgagtaaaaattcctaggctgacatgctcatcaacttgctttctgagaaaagtgctcttcatatatattaagcagaattgtttagatggttgttgtgccctttgtgtaggccagaattcttcactcaggaatggaggagattagccgtctttggctttgactaatttaacaagtgatgccttcttttcaagttttcggtgttgggtgggggtgagagtattcatttgcttgctctctgtgtcatcttcatatgtgagttggcacagtaacctggaaaggtgatatgtatatgtcacttttcaacattctcttttccttcattaatattcttcagctgttagaattttgggaaggagacatggttcttagtgttgcaaagcttgtaccagcaggacttcacatttaccagtcacttggcggtaagataaatatgaaaacatagcaactcactctatatatctacatttttgtccggctcacctgcgattttctactctttgtcagtccttccccacctactactttcttaactaagtagattatcttcacactgtaagttttccaaaagaaataaaatatccacgttttaatgtatccagtttatataatgtgtgaaattcttctaacatggaaacattttattttttctgaaattaaggctacctctactaaaatttcttgaaaagctttagaattttttatattgacacatattgttgaacaacatagtttcaaaccatctgaatcatatttatgtgacttgattttctgcccagttctcagcttcagattttgtagtaaaacaagaaatactttgagagtttgaaagcatttacttcctttaaatagcaggaaaacaatgagaattaacagtagcggcagtaacatctaatttgggccaaaatctgtaataggtgttttatgttaattatctcacttgattttcataaaattcttttatctccatttcataaatgagaaaactgaagctgagagacttgaagcacacaatacagcttgtgttatggacatatcggtggagttgggaccattccatgcttaagcctaactcctgtttccaatgtcatgtgcctcaagtacacttgacctttggattatctctcttgtcctgccaccatgctcacaagcttttgtcacaacgttttaaagaaaaattacaatgaaataatgtcaatagaataaaaataattactactttttaaattttccttagtgaaaatactttttcaaacaaatatttgtctcagctctttctttagctcagttgtttctgatggtcatgatgaatggtctcactggtgatctctttctaggggatgaactgacactgtgtgaaactgaaattgctgatggggaagacatctttgtgtggaatggggtggaggtaaaaaaaattactgaagaaatattcgtgataattttggatgttttaaaagtcatcgtaatggccgggcatggtggctcatgcctgtaatcccagcactttgggagggcgaggcaggcagatcacctgaggtcaggaattcaagaccagcctggccatcatagtgaagccccatctctattaaaaatacaaaaattagctaggcatggtagcgtatgcctgtaatcccagtgacttgggaggctgaggcaggcgaatcgcttgaacccggaaagtggaggttgctgtgagctgagattacaccactgcactccagcctgggtgacagggcaagactccatctcaaaaaaaaagtcattgtaatgaaattttattcagcctatgtgagggcaattagatattagaaaactactgaaatgcttgataaatgttagggacaatcagtgctagttgtacgccaaggagacatttcttgagcgcctccgttataccaggttgtgcgtcagatgctagatcaaaggccagtcagttgatctgtgtccttttaggccctcgtcgtgtgaagaactgcaccatacgtgctggagtagggggtctgtgcatagtgcctgtgggaatttagaagagtgagaatctatactgagttggggagtgggggtggtttggaggtagagagtgaattttctatctctagaaggcggccaggagcacttcagccactctgtgaactgaccttggccaatctggcttcatcaccacccatgataactcataaatgtctatctccagtctatcatagatttctcctaaaaaaataaaagataagaaagtttcaaaagaaaaatctgaagttgttcctctgatgcttaacagacatttgtgaaaattttattttacttggaaaaaatgagggttgttctctaagagtaatcttttaccatgttatgttgacggtgttggcaaatatcagctgtactaatggttgtcttggtatgattgcaggttggtggagtccacattcaaactggtattgactgcgaacctctacttttaaatgttcttcatctagacacaagcagtgatggagaaaagtgttgtcaggtgatagaatctccacatgtctttccagctaatgcagaagtgggcactgtcctcacagccttagcaatcccagcaggtgtcatcttcatcaacagtgctggatgtccaggtggggagggttggacggccatccccaaggaagacatgaggaagacgttcagggagcaagggctcagaaatggaagctcaattttaattcaggattctcatgatgataacaggtaactcgctaacaagagaaaaaggatttctaaaagtcattttaattacagtaccacccagcagaactctaaagctttattttagtgacaagagttgaatgtttctttatttctagacattatgttctaaatattgcatacaggaatgttttaggttatgtaacttagagaaaaacatgattttttgtaaagggactttttggtaaatgtggtgagaaaataatataagtatccctgattttctagactgtatagagtatcaattagttggctgtaatgcaaaagt

SEQ ID NO: 99260 - DNA, 1019 bp, Homo sapiens
cagagtctgtctgggttttcaaattatcttttatggtggtacactgtgtgattgcctttgttttgtgccttgtttagattgcttttaaatatttcaaaagtgtttgttctacctaatctgttccagttaaatacttttttaaacagcactagtgaggtgtaatcaaaatgctttttagattgtggcatagcgacctcctccctggatgtcactatcagactatttaacagagcactgtggttttattaaatgttttatgatacctagatggattttcccccgtagctggccaggtcagaaataaagatgaagttaaatgatctaatcacagaaaggaagaaaacattttttaatcacatctaatttttgtttaaataattaacttagcatttttttttttgtttctgtgtagttcttacagctccattctcagatatttctactcagttcagatgaaagtacagttcgtctcttgaagaatagttctctccaggctgagtctgatttccaaaggaatgaccagcaaattttcaagatgcttcctccagaatccccaggtttaaacaatagcatctcctgtccccactggtttgatataaatgattctaaagtccagccaatcagggaaaaggatattgaacagcaatttcagggtaaagaaagtgcctacatgttgttttatcggaaatcccagttgcagagaccccctgaaggtatggaaagaaaaatgttcctatttgtttcagttaatggctttagaagataaacatggaatgctgtttgaatttttattcttttaaaaaaaggtttactcttggaacatttttaaatattttaaagctaacaagaactatattatgccaaatgaaatctaacaatttgtcattttataaagattatatacttctctttaattttctaccctgtaataatgtaagatcatcattacattttcaaaattggatttccttggatagcataaaaccttcttgtgttggcaaacttgagtgcgattgcca

SEQ ID NO: 99261 - DNA, 1063 bp, Homo sapiens
taatgagttaattattttgtttgttattgtggtgatatttaaagtgcatatctaatcatgttcctccctgcttaaacataactcaaaagtttcttaccatgttcaggctcaaatttgtacttcttaggagtctttcatgatctagcccagtacttctcaggctacctgtgtggcaaaggacctgtttttgtgtatttctttttattcccaatctgttgcagattagcacttttctagtatataataaaaatgccatgggaatgtcaaattgccattacaatttctaaatgcttattctcctttaaatacttaaagtctagcctacagaccagactctgagcaacattgctcagtctgccccagccctcaccacatcaagtaaggcaggaactcacttggagccaggagaaagtgaggcagggtgtgctgagaactccagagcgagatacagtattgtgcctggaaaatttctacagaggggaaattgtgtgtatcagaggtattttagagaaataatggactattagaagagattcaaactactgtcaatctgtaatcagttgagtggtttattaaggcctatttgagttttaatgtttgtctgaaccatatcaaggtagaaaactccaaataactattattttttagattgcattataattttcacagaagaactgaatcataattagtttttcccttataataggatatttataaactttctcctgaatgaactgggagatataaaaaagctagtatgcagttgttttcaaaagccttagtcaacacttaaagaattcatttagaaatgtgtttgtttctcattcaggttcgaatcatccctttacagttacagcgcttgtttgctcagcttctgctcttagaccaggaagctgcatccacagcagacctcactgacagctttgggtggaccagtaatgaggtacgaggatcagctctttaaggaagagttaccagcaatagaggaaagaataaggctggtttaatgttatctaacttcctttaattttgtcttagggtctcaacatattgtttgaatgtt

SEQ ID NO: 99262 - DNA, 1917 bp, Homo sapiens
acacacctttactttatgtgtatcttttctcccaggatactgcagtcgtatctccagaaagagtcctggtgacccagcgaaaccagcttcatctcccagagaatgggatcctttgcatccttcctccacagacatggccttagtacctagaaatgacagcctctccctacaagagaccagtagcagcagcttcttaagcagccagccctttgaagatgatgacatttgcaatgtgaccatcagtgacctgtacgcagggatgctgcactccatgagccggctgttgagcacaaagccatcaagcatcatctccaccaaaacgttcatcatgcaaaactggaactccaggaggaggcacagatataagagcaggatgaacaaaacatattgcaaaggagccagacgttctcagaggagctccaaggagaacttcataccctgctctgagcctgtgaaagggacaggggcattaagagattgcaagaacgtattagatgtttcttgccgtaagacaggtttaaaattggaaaaagcttttcttgaagtcaacagaccccaaatccataagttagatccaagttggaaggagcgcaaagtgacaccctcgaagtattcttccttgatttacttcgactccagtgcaacatataatcttgatgaggaaaatagatttaggacattaaaatggttaatttctcctgtaaaaatagtttccagaccaacaatacgacagggccatggagagaaccgtcagagggagattgaaatccgatttgatcagcttcatcgggaatattgcctgagtcccaggaaccagcctcgccggatgtgcctcccggactcctgggccatgaacatgtacagagggggtcctgcgagtcctggtggccttcagggcttagaaacccgcaggctgagtttaccttccagcaaagcaaaagcaaaaagtttaagtgaggcttttgaaaacctaggcaaaagatctctggaagcaggtaggtgcctgcccaagagcgattcatcttcatcacttccaaagaccaaccccacacacagcgcaactcgcccgcagcagacatctgaccttcacgttcagggaaatagttctggaatatttagaaagtcagtgtcacccagcaaaactctttcagtcccagataaagaagtgccaggccacggaaggaatcgttacgatgaaattaaagaagaatttgacaagcttcatcaaaagtattgcctcaaatctcctgggcagatgacagtgcctttatgtattggagtgtctacagataaagcaagtatggaagttcgatatcaaacagaaggcttcttaggaaaattaaatccagaccctcacttccagggtttccagaagttgccatcatcacccctggggtgcagaaaaagtctactgggctcaactgcaattgaggctccttcatctacatgtgttgctcgtgccatcacgagggatggcacgagggaccatcagttccctgcaaaaagacccaggctatcagaaccccagggctccggacgccagggcaattccctgggtgcctcagatggggtggacaacaccgtcagaccgggagaccagggcagctcttcacagcccaactcagaagagaggtaggtgtgtttctgttggttgaatgtggtttatgtgagtgactgctctttggacagaggctttttatggtaggaatctttgcgccacgtttagtgaatctcagccgaattcttacatacgtgatcattttctgagctttctcccaaatgcttttccttcctgtaaagtcagcgtctctatcaagaatgtgtccctgtgtaagatgcatcgaggtaaagcagaaagtgctcttgcagaagtttcacactttccattagaatgcattcagaggcttttttcctgca

SEQ ID NO: 99263 - DNA, 1902 bp, Homo sapiens
aaaaaaatctattggggccacacacgggactcttaagagcagccctgacctctggaccaggatttgaagctgcatagttagggaagcaatagtccccacattccctggtgcgatcaggctagaatcagctgcaaggtgaggaggctgacccttggcacctgtcccgcctgctgagaggtcatgttgggaggggggggatgtgatggcatgagaggtgggcacactcacctgccaacccctctcttaaggtcagtgccctctgccatagaataaaggacattgcaacaccaaatacttaggaagtacacattgcagaataagaattcatctccagaaaaaggcagcaatctcacaggggtgtatgtgttttcttactgtgctgctgaccagcggaaagcctgtatttgtggaccaccgacttagtggatgtacctgaaatgctttttcctttaacccaaggcagcaagtggtgtcctcttggttgctgtgttgatccagggaacagattagggttaggaacgaacggatctactgggtcttctttgtccaccgtccggttggcccctaggtgttcttgtggtctgagtataatgctagacaaagaaagctaccagcgcccctggggtaagaagttactggcaggtgagtggtgactgtggctggaagctatcctggagaccacatcaactgtccagatcttagtaggacatattttcttcccactgcccgaagcctagctggccactgtcaccacattcacacgcttgtcgacatggctgtgctaagatgcacagtccgcatcgtcaggggagaacccagctccttgcacccagttgacacctggcaacttttttcttgtaaccactggctctgatttcagtgtgcaggtaacagagctggaagggatgtacgtgtgactccgctgccttcactggcctcacctgccgtgcctgcccccggtgagtgtgacatagaaactgtatgaacagtgcgtgtttccttcacttttgttggagctgcgtggcccctcagagctgctcatactggccacgccatcatttcctggtgtgtttcatcaacataacttgttagagatatacttggatttcactggaagattaagatgtttcaaaatgagctgttttctcctccacgtctgctctttattccagtttactagcttgaaaagttttgcatctccagaagcacaggactagtacagtgaacacccttcacttgtttcacaattaacatgttgtcatatctgcgttatcaccccctgccacacacgtgcacacacagtgtgtatttatttgcatttgtgtatgcatttatccctaaatgcctcacacatacctccaaaaatcggctaattctcctttatgactacagtacgcttaacacaggccagaaattgaacattgatgcggtactgttctacccattgtgccagtgacgtcctttgcagcctttctggtttgcctgatcgtttccggacccactcaggctggtaccaccgttgcgtttagtctccctccatcaagagcggctccttggcattttctccctcatggtcacctttcatattattgcctttcttgaatagcacaggccagtaattttgcagaatgtccctgaatttggacctgattgcttcctcgtggttaggttcacgttaaacatttttggcaaaattactacagggatgacgtgtcctctcagaacatttggtcagtctgtcccattcttggtgacttttaggctggtcattgagttaaggtaagaccttacttcgatgtttctcattgcgacaggccctttttccctggagtcatctatgtgtgattctttgagatctcctaggaaccttttctctaaaagcttctcacccagtgacttaga

SEQ ID NO: 99264 - DNA, 4961 bp, Homo sapiens
ggaggggaggcctgcgtgtcggagtgaggctgggaggggacgtaggacgggaagggaaggggctctgaggactcggagcgggggttggggaagcgggactggggcttggatgcggagagaaggtggaggcggagctgggggctccggagagggaaaaaggaggcagcgccgaaggcttcggtgcggggacggggaggaaagactggggcctccggaacggggagtggggaagcaggcctggggctcgggtgcagagaggagggtttggtggggctgggggtgctcctgagtgggacgagagaggcggagttgggggctccgctgcagagaccgcgtttggggcgccccaggccagactaacggcctctcacgggctggcgccgcctcctcccgggtctggggcccctcgtggccctggaacctgacaggaagccccttcctcctccgcagtacaaccagcccttcgaggacaccccggtggtgcaaatggccacgctgacctacgagacgccacagggtaagggtcttccccaccttctgagtattcgggtgaagagtgtgaatggagtagttgaaatgctgtccctgctctcttaagaagtaaacattgttcacctaactaataggaaccaaaacattggtgcccttaaacctgtaaattacttgaattacttattagaacaattcctgaagagacataggtgcctcctggctcacatgcctccggcttaccgggttggcatccccgctggccacctccccaccatggcagcgtggggcagttgcttagctggactggtctcagtgtcttcatctgtgaaatgggaaggatgatgacaataatgtctcctgggcgtgggtgttgtaacagtcacgtacaatccctatgaaactgtgaacagtaccccgccccgcactgtgaatactcacattgactattgtttgccctgtttaacttggagtagtaactgtcttccttgaggctccaagtacttgaatagggaggagaaggcattccgtttaatagttaatgtaaacggactgaaatcttgtggattctttttggtaaatagctggtgacactttgcactggctggggtcaattcctcccatatagctttataactaactcagtatcacttaatgaaaacaaacctcagagcaagttctatgttgcattaaacggacacagaaggttcacaagatctgctccttgagttaaaagaaatcctacctttctgcctttatagccaatccagacacatcttgggtgaaaagtttacacaggcagaaactaaaatattccagtggcaggtctgctaccctttggtctctgtataacatgtagattgcccttagaaagcattcattcagtatatgggatgtagagattgcctgcgaaaagtgcttactccctctatatggtatatagattgccctctatatattttaaggacagtcgctgtcatatgttccttgttttcatttaactttttgggctaatgatgtaatttgatgagccgttttctagtaggtaggagagatttccatgaatgacgaatttgccttaaaaacctgaaactttacaaagaggaacaatcgcagggtatcagaaacctggcttggttttaatattgtaccttttttttgcctgtcactttggcatctggtgaacacagattgagcagaagttcagcgttcaggattatgtaaatggtcatttttgtttcttttcttcaggattgagaatttggggtggaagactaataaaggaaagaaacgaaggagagatccaggtatttagtgtcaaattttattgccaaataaccttgctgtggaggagtattcatatgaataaaggtgtgggtatgcccaacctctgagcttacgcagaggccaccacggggcactttttctcatgattatactctttctgtttttaaggatttagaagcatttcttctgtagcttgtcaagtgcaaggagtcactgtgtaatatttggcctttttcatcaccctgtgtttcctgtgtcacaggctgaggggctctgataatacatgtgcagaggctgggccagttgggtaaccctccccaaggtcacgtgccagcccagcgaggcactcactttgtttgggtccttacagaaaataccaaatccagttccttctagggaagaagaatgtctctcttcctgttttgaaaggggaggaagagagatgaggagaggtgcagcctggaggatcacacatctttccttctgcatttttctaccttcggaagaccctggcttccctgcctagttgatccgagggtgttgtcgctctgagacccgttattttagtggaaggtgctgttggcctttctacgggggcatccaggagcccttttgccacagtggcttttgccaggttatctggtattcagttaatcactgcctctcagatgccacatggttcctctctgtggtcacaggtcaaggaacctgtatgaaagaatgaaaaacatcaagatcaatgtgacgatattaacagcaaatttgaaatcaaatcttcttgattaattattctagtcataaaaatgttaaaagtacatacaactacataaatgagctgattcctctctgcaaagatggtcactaatgctattttagtacaatgtgattccctataatacatatctttataaatgcatttttttctccctcacttttccggttaatacatctggcaaactcttctcttcatcaactgttgtataattataaaattatataattatttaaaaaatcatgtttttttaactgctctcctgttgataggcaattagctatttgtggcttcctttattaataaataagggtcagcacactttttccacaaagggccggatgatacatattttaggctttgctggctctatggtctctgttgtaactactcagctctgtgttgcaggaggaaagtggccgaaaataatatgtaaatgagtgtacgtggcagtgttccaataaaactttatttataaagcctctgttagaaatggttttcagagaaaatcccggtccttgtctcttcccaatactgatagtcccccttttcgataaatgctgagaagtgggattatcgggttaaagtatatatactctttgaattatgcataatacagatgtccactcattagaccagtgcttaatatggtcctggtagcaaaaagttttcatttaaagatttatttaaggtttttgcttaaaatgtaggaggaaccctacctgggtctccagaatcttcagaccctttcttgggattaggaaactgggcgtagcctgagatttcagcggggacatctctgacttcactgtaattgctattggtgacagtgtccagatccgccttcaccttttcccagacgacttggtgctcctgccgccctggaggctgggggaggctgtgggccctggcaggccgggtgttgacctgtgctgggttggttataacacaatgcctgggttctgtttgtagctaccagagctaccacatagtttggggttggtgtagatcgtctgcttctctgtgattctcaaaccaggttctgcctcagacacagccacaaaacaaccctgtaaactccaccttacgtgacggtttcactggaagcaaaggttctgatattctggaagtgggcttcagttaccctgtagtgctcctgggtagccccaagtcctctgaaccctcagagttgacacctgaggaccatccctaacggtataggcctcgccaccttctcacgccctgtttttataaggctgggtggttcctaaaatattaatatttcagccaatctggtatcctgaatgcttgaatttcattactgagaacccaccgatgccatgctctgggattattcgtggggcctgctatagagcaggctctggagagctgaagcaggcctgaccaggagtgtggccgcccgaccacctctgcccaccaggtatgagctcctggtcaggacaagcagctgcctctgtgcgttagcttgggcttaaactggctcctccccgccttaaatactccagcatattctttaaagatcacaggaagttgcccaggggccacttgcctatttctctgttctcgctgatgacctcaggacaattttgttctgtttcaatttggctttttgtttgccccagtccctgtcatccctgggccactgttaggaggtgtgagcttatctgctcgtgcctgggcccctgactttccctgctccttccaagtggctttttaagtagcagcccccgctgcaacccaggggagcctcagctccttcctacgctcttgaggcctcttataaagtggacatgcagggagaagagaagccttgtggcaggctcttgctgtctcctgtgttaacagaaggattgcagttttattattttgcggtgactttgaaatgtgctgtcactcaaacaaccatgtttttattggcttctgcacttggaggactcctccatgaagcccgcggacaggacagatggctccgtgcaagctgcagcctggggtcctgagcttccctcgcaccgcacagtcctgggagccggtgagtgttgccttcgtcagagaactgaagtcaggagggaccaggtctgacgcacctgttacaacagcttaaagcctagattcctcagtagtgaagtttttattttttctaaggtatatcttaaaaactaaaatcatgttaaagtaccctgttgattccttctgagctctgccttgcccacagttacatccggtgcctgacatatgaatggtactcaggtgttttttgagtaaataaacatgcccctccatgtgaaaagttaatatccagatttagtaagacttaagatttgcccctacagggtggtgttgtgaaccctcacttctatagggcagcttcccacttcgtcctcctaggaggctc

SEQ ID NO: 99265 - DNA, 2500 bp, Homo sapiens
gaggactagagtctgcaccaagaaagccttttgcttgtgttgcctttagagaagaggagaccagctgggcagcaccgcccctcctgggttacgtgcagctgagacacttgtatcccggcagtgagccccggccatcttgatggccgattccttgttccagaccggggcctgttctcttgggattgttcttgcaggacccaatatgcacagtgaaggaaaaagtaagtgtggaggagtgactgcaaaacccgccaggtctgatggggagcatgacccagaagctgagcctcaaggctcccagcactgttgtttccggagttcctctgatgtccctgagctcctggctccccatctgaaaatgagggcgaacattcccctttctgcctcacagtgtgaaggtcagtcacatggtgtgtgaaaaacccttgtcacctgtaaaggggctctcagtggaagtgacctgtgcattcctgcagccagaatcaagcccggcactcctcaaacctgccagatgataagaaccccttggacagatgctcacatgaccagcctcatccttggaaatgctcatcagtggttgtgggttgaggcatgggaatcagtgctgagtaagttccctagggtaattcttctcctcggtggctggggaaacatggactatctgatcgggtggttctcaggcttgtctgcgatgacctgggggaagataacaaagagaaagactccattttttatgtttgaccactgatggctttcaatccgttatctttccctcccgctggaaccacatccaggcaagttgatgagaacattgatgccttctccctgggtgcctgagtgcccgtggggagttcaaatcctggcctctgtgcaggaaccctcaacctggctggctcacttttaaccacagtaagaaccaatgctactgccattgcacctactttattttctcaagccccctggactgtatggagcccaacttgatctcccaagaaagtcacattatgtgacccttttcacaacctaacaatggaagggaccagtctgggcagcctaaccaattttggatggcggttaatcccaccctccatggggcacctgcatgacagggggcttcaaaggtcaatgcctggcctgcagagtcagatgtgagcatctgggaggcagcctggccatcagtttaaaggttcctgggtgatccctggtgattgctgggtgcagtggggactgaggacgtgggtctcattctcctcacgtcccatccagttgactgtagctttctcttagctggccttgcctcagcctggtgagagcaaagtctgtgcattttttgttacctttctattcccggatcttagctgaaatgcaggcgctgcttaattgacagaaagaaatgaaaaggaattgaatgcttagaaacagtgatcgcatatcagccaagtatacaacaagagtcaggcctcccccactttgacactttctcctctctattgctattcattttggggacctttggggtaaaactgcatgttaaaatgtaaggaataagactccagctgaggaataggattttcacacctagagtttttaaaaaatgcaacagagtccggtatcaaactctaaacagaaactggatcggggattctttagaagggattcctaaaatgggtggccccaagcctaaacgacttcagtggaatcttccagtcttgcattcaccgttaccagctgtttgtaatgggagagattcagtgactcttatcgggcactagatggcgatcaggcatcaataaggcccaacaaccgcctcggacctgggacctgggattggctcctccaaccctggccgccaccctgggaagtggccattgtcatcttgattgtctgtgggagaccagtgaggctggcggtggggattagaacttcacccaaggatcacaccctccttcaacccttcctgtgcagcaggttttacattcatgtgcagtgaccgcagccgaggatgtggggcacagcccgtgagagagaccaggaggtcagcagtggtgggagtgttgtgtgcagtgcagccagggaccacggaacgggtctctgtggccgctggaccctgccccacgggcctcagggaggaagagctcttgaaggccgagaaggggctgtgctctaagcctgctgcccaggcctaccctgcagcccccaggatggttttcaggatgcctctaataacacccatgtcactcttaccactggccaagcaccattttgagcactttccacagatcaatgtatttaatcctcacacaagcacaatgggctgggtactaccatcattgtcattctatagatgaggaaactgaggcacaaggaaattacaaagtttgttcaaagtcatttgtagaccaaaaaagaaaagaaagaaaaattctgagcccttcaaccatctaaatggacccctcctctctgcaaggacattccaaagctaacctgaaaaactagttca

SEQ ID NO: 99266 - DNA, 1496 bp, Homo sapiens
ctcactgcaaccccacctccagggttcaaacaattctcctgtctcagcctcccaagtagctgggattacaggtgcacgccacaaagcccggctaatttttgttttttttagtagagatggattttccccatgttggccaggctggtcttgaactcctgatctcaggtgatccgcctgcctcagcctcccaaagtgctgagattacaggcgtgagccaccgtgcccagctgaaaaatgttttagataaattttgttcaattgaaaaaaaaaaaaacaaaaaaaacaacttattacctcttcagacctccttgagatgaagcaactgactccctctcacaggaaatttctatgacagtcaacaaaagctgtcaaattgcctgcctttgttctttgagaaattagaacagcctccaatgcctgcaggttacatttccaaccagtgactcatttcattgagatgggttctttttcctgcaacgatagcaagtttgttatactagttgggtcttggtgagaacactgactaggaaccaaaaagaattccacagcccaggacaattaggtcaagccatgaaagccctttaattctggtaaaaccccctcaaaggggcatgtgaacgtaagtcttcacagccctctggcgccagcacaatggcaaaatcactccacccagaagcacttggcccccagctgggacgttctgggttcagcctggctccttgtcccaaaggtccctggttggcacagtggggctctgcaccatctatctggtcctctccagggatggcaggcatgaggcggcatgggcagcctcctgtgccgggagactctggcttgcaagtagaaattaaattcatgtcttttgctgttggtgttatttggatacaaaatatcgtctctttcaaattaagttttaaagcatcgaattttaaactactggcaagatagtgtgaaaactacagtgattagaagggcttggaactattctcagattttagctaaaatgtcactttcttagggaagccttttgtggccatgccttcccgatccctccgtcattcagtcaagaccttctgaaatgccctccagcaccaccgtccttccttcatcgtaacatcttaattagtaattatatactaatatatgtgattatttgatgtgtggctgtccccaactccttcccccaacctcaaatacactaagctccatgcttgtgtttttaacaaccagagtggtcaggatatgcctcaaaacatcaagcatgtgaattacttaaaaaaaaatgaaaataaatgagacgttcaattaaaaaaggggaaaattaaggaaaaagtgaggtcctgtcacatgttagcctgattaattaactacaggatggcatgtacacccaatggcctattttatctaaaacatttttcagctgggcacggtggctcacgcctgtaatctcagcactttgggaggctgaggcagtcattaaaattcggaagtatcgg

SEQ ID NO: 99267 - DNA, 1407 bp, Homo sapiens
tctcattccccagctgtcattcatagaacattcgtctatgtatagagctgaaaatggtcatctcttttaagttctcacctgtcactctggggcaacatcaattacttgatcaaattaagaatatagagcttacttaaagctacatgcatttccttggaagcttaaaaggaccaaaagtaaatacaactgtgatccattatgtagattcaaccatcttataaaagatcacatacagccagtgtttacctaagggcagcaaaaacagcaatactgcaattaattatttaggcaacagcatctctgagagttgcttaagtgatatttatgatattttgccatggcaactattcttgttttgaatattattaaaaatctatcaaactgcagtagtaatgtacttgtggtttaaaaattgcattgagctagcatccccagatacagtctctcccaatgaactactcaatttcctgtcgaagatgaagaagttatgagtatggcagtttactcatgggctggctggatgtggagtccctcgagcagaaggatcacaccaccagaaaggacagctctacagcccaggaatagatgaaatgcaatttcctacacagtgtgttagtttcctattgcttctataagaaattatcacaaattctgtgaattaagacaacaacgtttattatattatagtcatgaagggcaaaagtctaaaataggatatcagtgctatattccttcaggaggctctagaggagaatccacttccctgcctttccagcttccagaggccacttgcattcttaggcagaagagcccttcctgcatcttcaaagccagtaccattgcatcttcaaattccctcctgcccctcacctctgtgtctgattttcacatctcctcttctgactctgaccttcccacctctctcttataaggactttgtgatcacatgagcccaccccaataacacacgttaatttcttcatctcaagatccttaatcactatgaacaaagttccttgtttgccacgtaaggtagcacattcacaagctttagagatcaggatgtaaacgtctttggggagccattagtcagcccactttacacaggttcacatgttatgttctgggaaacatcaggacctcctgggaactgggatctgtgaagatcagccctgaattcacatgataagtgggggatagagcaggtataatgtggcccccatagcctgcatgagccttgaagttttcattgcagggaagaagagattttagaaacttggcttgtctagcactgacaattcctgacctacaggatggcttggatggactatagttgtgagatgtgacacatagagacatcgttatgactcagtggtatccccctcaaactcatatattgaagcccta

SEQ ID NO: 99268 - DNA, 1017 bp, Homo sapiens
tgggtgacagagtgagactccatctaaaaaaaaaaaacaaatcctgcaggagctcggactccgtcctgctgggggctgactgtgactagaggatgcagtgcctcaccagtgagaatgcttgtggagctactgccatgaataaacggggaacaattttcacccatgcctggggaaggcatgagggaattgtgctgcaggttcatttatcaaacaaactaggtgaagcacaggtcttagggaatgactgtcaaagcattcatgattccttcttccaagtttagttctgtgggaacaagtggtgtaatccagacccaggggctccgagttggcattgacccctaaggaccaaaatgctgaagagaaacttattaagaccagtaaataattgacatgggctcctggagacactcagtgaagcatttccaaggcatctaaccacaaactgtaaatgttaattggcacccttagataatagactcagataaggagatcaaaggcacaggaagtcataactcctgacatcgcttttcagacaagtcaggttagaatcatcttactcttcaaaatgcttttcacagtgtttctgccctgatgggcacagaaagtttaattatagagtgatcagcaagagggtggagtctgcccttcatgatcaagtctggacaatcaagtgtgaggaatatttgtttagaataaggctgtttattctctctctggaagctgaagtgcatctcagctgtcagattaatcattaaactaagcaatttttagataaacttaatctgaaaattagccccatggcttccccagcactgaactcaagcccatcttccttgagttacgtgatgatggtgtttcatagttctataatttactcccaatgcagttccagggtcttcctctttctctccctctaggtttcagagtagcctcttcaggaggttctcagccatgaagactctaccccaagggagcttattccacagctgacccctcacaagggcaagttcacagagg

SEQ ID NO: 99269 - DNA, 1047 bp, Homo sapiens
gaaccaactactctaaggtgtgctcaggccaaaatatatctgtagacttttcacattgcttcaagggctgtttacattaagattaaaaaaaaaaaaactactcttttatcatcttacatatttagttttttttttttttttttgagacggagtctcgctctgtggcccaggcgggagtgcagtggagcaatctcggctcactgcaagctccgcctcccgggttcacgccattctcctgcctcagcctcccgagtagctgggactacaggcgcccgccatcacgcccggctaatttttttgtatttttagtagagacggggtttcaccgtgttagccaggatggtctcgatcacatatttagtttttaacccaattttgtaagatcaggtctgcaaacctgtaattacctgtgtaattaaagtgagatatatcattaaaatattcaattttttttaaaaaaattcctttttgtttctgtaaaaatcatgtctgcttattttttagaatttaagcagcgcagaaagagttgaaagagaaaagttaaagagaaaaatcatcaaatttctgcccttgagaaataaccattttagatttaaggaaaataaatacaagccccaacaaaagattcttaataattgaagatatagctaagtaaaaaggatttccaaaatacactcacactaattatatttagagtttgcagtttgattagaactgcctacagggtgtgatttgaggcctctttgctaaaacataattctcccgggctgtcagaggtgtatgaaaagcccctcccccatcccctccctaaggtttcactccagcttcaagattctgctgaccttgggcaaatcaccccatctctctagtcctcagactcttcagtttcaaaatgagggggctggaccaagtcatccctgaaggcccctccatgactgacagtctaggggctgttttccctgttaaattggaaagtgtcctatgaggtgcttggatggtatgaatggaagtggagatctcagaaatatgggggtaggaggaactcag

SEQ ID NO: 99270 - DNA, 1074 bp, Homo sapiens
tgaagttgaatttttgtagggattgttaattgccatttgtacctaatcctgtatgtgtgtgtgtgtgtatgtgtatatatatatatatgaaatatgatctgtcactatgtgacacaagttgcatatttgggactgcagtaagggcttggtgggctgggggaatagtgtggattttttttttttttttttgagatgaagtcttgctcttgtcgcccagagtggagtgcagtgacgcgatctcggctcactgcaacctccacctcccaggttcaagcgattctcctgcctcagcctcctgagtagctgggattacaggggtctgccaccatgcccggataatttttgtacttttagtagagatggggttttgccaatagtatggatatttaatgactacttgttttttaattaatgaacacttagcctttctatgtgcataatggtgtaaaggttagatgggtaggcgtttgacaaacagatgcttgccattcagttacagactggggaaatagctcagtatttgggattgaaactgtaaagactggataggttttagtcatcactctcttttgtctggtggggatttaataaatactttcaagcttctggtttgggaatttagagagttttgattttggatttgtaaatagttgattgctaaatttggtcagatttctcccgactggctgttcctcaattcttaggatatgtcccagtaaaattgcactttgtgaattaattgttatatgcgtaattgttgcattttggatatacctaatttgataatttttttaaaattccatttaaggtatctatttgcaggtcagaaagtaagaaaatgtaattgtgtaatcctctgaaatgtaaaaaaaaaaaaaaaacaaaacaaacaaaaaaccttcggggctggaatacaaaggcatgaatcatgaaccctctgctcaaggagtcagggcagatgggagctaaacaggcattcagaaggcttattatcttgttaacactcggtgacaactcctaccatagaggtaagcacatggtggcctgcctggaaggcgacccaggctgattctt

SEQ ID NO: 99271 - DNA, 1034 bp, Homo sapiens
tgggaaagatcctaggaaggggtttgtgctcatcctgccccatcaaaacttacccaggagtttctctgttgcccttgggaaagaagttgaaaaagctggtcccattagtcacccttgctggtggcctgggagggctgcattcccaagcagcatcccaccgagggtccccctgaaaaggtcacaccctgagctcagtaatcattctcggcaatgtgcgtgctgtcaggcatggcttggaagaaaagcttaggaggggttgcggtttctgcctttgtggattttgagcatcagcatccacaaaacacacaaattcaaacacattaaataattgtcctaaaactcaggcatgccgcatctgaaagacacgttgcttcctgacacaccgcccatttccccatacccctgccatttcctttccagagcaaaaaaccccactggcatcccaacgctaaatggttcatgcccccctgagttcaaggatcctttaagagtcctctgataaaaggggaaaatgccctgataatcctaatgggcttctcagttgccaatggaaatttgaaaaatgtgaaaaataacagagcaagaaagattgttcagacgactgtggttggcaataatttgcccatggagttttacaaaggcatccaaattaaatcattcctcatgatgcattttgctcaatatagctcctgaatataaagaatagtatgacttataaaattcagcaataacacgtatgcacaaattcaacatttatattgttattttcttcattcgtgggttaatgaagttgagaaaccagcaagaatggggttgtctaaaatgcctgctactttcgatggcttttggggggataatcagcacatttttcaattatccatttttataatgtaaatgactaatatttcagccttcatcagtcattgtacactggaacaaactgatcgatcagatctgctagaaggtgggagatgctcagtgcaggacaagaagagcagggagggccaggcacagtggctcacgtctgtaatccc

SEQ ID NO: 99272 - DNA, 2421 bp, Homo sapiens
ccaggcctggggagggcgccgaacatctgaggcggcttcgcgggagacaaagccgcgcgtagagacgcgatgcccgccgatcgcgagcccggccggcgagggcgcggggactgcggcgtctgagcgcgccaagccgtgcgcccgcggggacgccgagccccggggccggtgcgggcggcggcgggcggggcccaggtgcgcccggccgcgtcgggcccgtgactgctcggggggcggcgccctcccgccgcagccgcagtggctggcgccgcagccaggagccatgggcaacatctcctctaacatctcggccttccagtccctgcatatcgtcatgttgggcttggactcggccggcaagaccacggtgctctaccggctcaagttcaacgagttcgtgaacacggtgcccaccatcggcttcaacaccgagaagatcaagctgagcaacggcacggccaagggcatcagctgccacttctgggacgtgggcggccaggagaagctgcggccgctgtggaagtcctacagccgctgcacggacggcatcatctacgtggtggactcggtggacgtggaccggctggaggaggccaagacggagctgcacaaggtgaccaagttcgccgagaaccagggcacgccgctgctggtcatcgccaacaagcaggacctgcccaagtcgctgccggtggcagagattgagaagcagctggcgctgcacgagcttatcccggccaccacctatcacgtccagccggcgtgcgccatcatcggcgagggcctcaccgagggcatggacaagctctatgagatgatcctgaaacgcaggaagtccctcaagcagaagaagaagcggtaatgcgcccggagcgaccggggagcgagcgagtgcgtcaagaaagaatgaatggatggatggatggttggatggatggatggatggatgagcgagaacccgcgcccgcgaacaaagagcgaaccaaagcgatgcttcgaatttttaaaacggaatctctgcacccaaatgcaggactggtgacttaaggagctgcgaagtctgatttaccggcctactctcgacctgccccccacccccagctcaggggaccttttgtctgaacgccagagctactgaccaggtcggggggccgcggtggggagtggaagagccggtcctgctgtccgccctcccagccccaggtggaaggctcagttgtcggaaagacaaaagcgatttcttcccactcctgcagggccagaagttcaggctgccccgcctccactgggggatcgcacctgtgaattacctgaggtatgcatttcccagaaccgtgggcgtacccaccttggggggcatgttggttctggggggaccacctctccttgcattcaggggctgtgaagctgagtaattttcggtcacagggcaggcccctgttgaaatttcatttgtcctgctctgggcccaaaggtggtggtggtttgggtcatcagaggactgcctgggacggttcagcgggcacggagcgctgtgctggcctggctggggatggccgcggaggtgcccttttcctggtgctttgtggtggctgcagaagaccagttttgttgagaactgcttttcagcctggaatcagacatcttccagatggtttggaccctgtccatgtgtaggtcattatcacacaaagagaccaataaaaataaaaaaaataaaaaaaaaaaaagacgaactattggaggtggtggccaatgatgcatttactgtttgcaggatagttaaaggtgtttaaagggtaaggcttttggtgtaaatgctggatggggtgtgtgtgtgtgtggatatagggacctccctctgtactgtgtactgtgtaatcggcattaatacctagactcatatgtatggaattttaaattctcttagcctactgattggtttggatgagcacaccagctgcaggtgtgtgctgaattgcaagatggtatttttttttttaaccaagggatgtctcttgtaatactaaccgcgtgataatgggttttcagacatgatgaaaaaaaaaaacttttacaaatgaatacttaccttagaaatattcaccttaggaaaaaagactttgctctgcccttttatattcctttatgctgcaagtggtgacatgttcagatttctaatttggttcattgtggcctatctggtttaagtctttcattaaaaatgtctcgttagagtatttgatgtcatgcaccaaaaaaataaaaccccaccttgttgcaaaagctgacctcgttgcatggaattaaaagagaaggaaaaacacaaggatgaagtctttccgaattcattcttgtgggaactggccttcggagccagccagcactttgggcaaatgcaaacaacaatgagtgcttgag

SEQ ID NO: 99273 - DNA, 1057 bp, Homo sapiens
aatgtgataaacgttcacagagtctttgttcaattctgagaattctcagtaggatggcaagaataaatgctgtttgtttcgggcaaacagagagaaacatgagcagcttcctagaggtgaccacactttcaagaggctctggaaggtagcagggtagaagcacactgttatttgttttgttcatattaactgagtacccagatttcaacaagaacctggatgaaggaagggccatcaaaaaacccaattctcaaatgtctcggtctggcctaatgaaacccttagccaacagtggatccaatgaacaggtttgaaagaccattcatccttttcatagtggattaaaaaacatgtgaataagcttttcactctcttttctcactggaataaatacttaaaacctcctccaaccaacttgtacataattttctcacaaccgcaaaaccatgcactcaactcctctatccctgaccttcctgagctccgtgtgaccgcacaaagtcacacgacactccttttagctgagtgtctagaataccagtaaattctctcccacagaactcaagtgaagggcccttgtgttcagccacatcacagaattctctggcttgtgatctgatctttttctagcatgtgattccagtaaaatgacccattatgccttaagttacaaatatttacaggcctagggtcaatttccttaaatttgattttatttttggtcccactagtatttttttcagaaatttaaacagttattgccaaaaattatttcccttctatttcaaaaagcatgaccagaatatttgcaaaactcatggactgtgattgttggataccattgttagtcaacagagatagtttagcatctcttggccaatcaaaagtcaggttttcttaagattatattcatcctaattgtttgctattgggtctttttccagtttgcatttttattattttcctgtctgtatcttcccccaattttatttaaatgtaattgacaaagaaacattgtgtatatttatggtgcatatgatattttgatatgtgtgta

SEQ ID NO: 99274 - DNA, 1047 bp, Homo sapiens
actgcttcaagtcaggaattcaagaccagccggagcaacatagccagatctcgtctctacataaaatttaaaaatcagctggatgtgttgatgtgcacctcttgttccagctacaaggtagaaagatcacttgagcccaagagtttgaggctgcagcaagctatgatcacaccactgcactacagcctgggtgacagagtgagaccccatccctaaaaattaacaaaaaaagtgaaaaataattggtgcattaaattgagaggatgaagtggattacagatgtggaaataaaagtacggaggcgagaggttggaaaacacaatgaatgtacagataacattgagcaaaacagcttttcgggtgcaggctgcacctctggaattggggaaggagatgcacaaagagggcttgtgagcagtgctggggtgggttctgaaaacacccttctcagccatcacatactcgctgcaggctgggcatgactgttgagcttgccccatgatggaacacagttgctagctaggtggggcaaatgggcttctttcactgctctccgacaagacggtggcttcccaattaagcactgcatctgctgaatcatgaggtctgagcgtccctccaagcaaaagtgcagatgctgcccctgcaatacctgtgtgtcccagaatgtttgacagggggagatgccttggagcacttcctcagacaatttctggacaggatgagaaaattcggctcgtcaatatctgccattgcttacaacatacaggcaagcatgcttccgggatgttgagaaaataagagaacttctctgaattgctttaaaggaaaattattgccctccctttctctgctgtctggcactgaaatactgttttctccagtttgctacatagtcctctcttctgatgtttatcttttttttttgactaatatttgtattggtaagaggtgctttggaatttgcacacatgaagaaataaagagcttttttcctctacatttctaatattcagctgctctcttacctttcttgtccaggtattt

SEQ ID NO: 99275 - DNA, 1050 bp, Homo sapiens
tttagtcgttctttcggcataattggatgtttccgttgctttgcaattttaccagtagagaaatcctgtgtgtgtgtatttcatacttttcctgatacccttttattgcctccctttctaggtcatttcattgtggttttattttatgcaaacagtgtgcaagtgattctttctgccagttttcatatttggtgttgtaactcacacagttgatcactgccctcttctttgaagatgctgtcttctagagctctttcttcctttatgatttggaagcgagaccagccaccctggttccaggcgactttgctgttagctttagaaaggagagcattcaagctagtctcagcccagggctacttcccccagggcgcctcttccccgtagccacaggggagctttcatttgagaggttctaattttgtgttgttgaagttgccagtcttgttaggcagactgacagcttaggctatctcacttattggctttttgcagaattttgtgggtggttttggttttgtacgttcggtgctctgatctgcgggtggctttggggaacggtagagtctgggtctatgctccttcctcatggtcaagtcccctcccctgaagtttggaagttgcatgtcatcacgtgcagccctgggacgtcccagtgtgtgctggctctgagtaggtggctctgtgaccctggcctctgactgggaggccacccttgttcctcctgcccattcattcgttgattctctcagcagacacgcacaggctgccttcagcgccagttgtcgccttccagctattccaaggactgaaaacacagatctgatcgtgcctcttcctggcctgcagacttccaagggcttcgtggttgtacagaataagcctccgcttttccacacagcacacggagcctggcaggctggacttggagggttttatcccgagcctgctcctgccctgcctcctctggtgggcccctaggatgcctgtgggtcctctcagggaagcatgtgtgtaccccagcctttcccttactgcctctgcccagtg

SEQ ID NO: 99276 - DNA, 1044 bp, Homo sapiens
gagaatgcttctggaagcttctggtgacacttgacctttctcaggcactgcaggcctgtccctcatggcgctctcctcctgtcctcgaagcccacagtgttgtccccagtgtgggaaggtcatttgtcatcctggcatccagaagcccggccccggcgcattcccagaacagccccgtgtttctcttttcagcgaatccactttctgttgccacccgtggaacgttctcactcttccaagaagccaggctagcagctcccccaccccagcagccgcgggacagagcccaggttgggtggtgtgtacacaaaggagggattgttctcacgtcgccctgcgacgagatggggatggacccgcggttagaggtcaccctccctggggcgtcaggggagcatttgtccttgaaacacgctggcaaaaaatgttccaaggaagcctcagctggtgtttgtgaggaagagctggattaaatggtgttctggtaaaatgttcctggaggttttcttggctgttcttggcttttatactcctggttggcaatagaaggaacaccctcctttgtaaagtcggttggataggatcacctacctcatagggcgggcacagcctccagttttttagaaaagcaacatacaagtctttccccaccaagtagaaaggattggatctaagtaaacgctacgtttggatgctcaaggccaaagggggagttgagaagccgcagctcacagtgggattcctttctgggccacgttggaattttaaaagcccttctaaataaagcaggcagctacttgcactgtttcaggtttttctttaaatcctgtaaactgagggtagctgattggattttatttcaacttctccccccaccctttctgtcctgtctctttgttttccagtatctgcctgtgccttaggatggagagaaggtttgagatgttcaggaggaggctcagggcttttcatagtgacgtgaggaattcaggagttctctggtcccagggtcagtcctccgcccactggggcctcagcgacttg

SEQ ID NO: 99277 - DNA, 1356 bp, Homo sapiens
gccagcagcctctgtgtgggttctgcctttttctgcactggtggtgtctccccatcgccccagctgcttgtgggcaggcgtcaccttgttctgacctctttccttcccccaggcagctctggactttgctctcagtaaacacaacttgattcttttccttcttaccttatcattgcccataaatcccgtttacacggtgcccacttttgtgtctgagctgggacgtacaacctcgtctctgcctccagtttttgagaaattaattataaacagtgttgacagaggctctggcttgacttggggcatctgctgctcttcccggccttggtcttctgaaggtagctgttatcagtaacagaacagatgtgtttatcctgggctcccgggcccttggcgtggccctttgagggggtctgtgaaacccctgaaactgcatgctaaactttacgggtggaggtagttttctaaagagagggtccagagactttgtcagattccttagaggatttgcaccctcaaaaaacgttaacaacctctgagctggaggaaggcctaagacaagcctatcgcacttggagataagataagccgaggcgggacctaatggggcctcaatgtcttggccagagtgcacagctgaaacggagatgacacttgacagaaaccagtgtaaaactctccttccctttatttagcttttatttcttgtgcttttcattaagtacagatactctttgcttgcttacagaacagggaagacctggcttctgaaaattatctttaggtttttcattgaatttggtcttattctgaacaatgcctgaacgtcgaaggtgctcccctagataggttaatagaaacccacagtccagggcaagaggccgcatccgggaagcctgtgtacaggtgactggagagatgagttctcacggaccgttcgggcaacttggtgttccggcctggacatttcagtgctgcatttgaagaggaattatgaattggctctcaaaggagggtgaggtgttttgttttttgttttttattttttttgacatggagtcttactctgttgtccaggctggagtgcggtggcgcaatctcacctcactgcaacctccgcctcccgggttcaagtgattctcctgcctcagactccagagtagctgggattacaggtgtgcgccaccacacctggctaatttttgtatttttagcagagacagcgtttcaccacgttggccaggctgatctcaaactcctgacctcaggcgacccgcccgcctcggcctccccagagtgctgggattacaggtgtgagccaccatgctgggctggagggtacatttttaaacgatg

SEQ ID NO: 99278 - DNA, 1012 bp, Homo sapiens
aggtttccctaagaccttctccgccccagacatgctctcgttaggttggtttttctggattggtttgttctctaattgttccttggggtagatcattggcagaggccacagggagaatattctgtgatctggagtctatgcgtggcgtgacagcagccgtagcggagggggtgtgtgcggcttcttgagtttgccgccggaatctgtcagtgattccttctgtatgcagtgatgttgtctgttcagacgctgccctcttggttcctggggaggagccaagagcagcctcttttgtctctggatgaatcagcctttgcacagaaaaaggaaaaacttatcagttatgagctcaaatgcgccttcctgtcttcctagacctgaccccggctgggaggtgaagaggtgagatggagcctgctcttctagggggtcttgagatccagtggtggctgtcctgcccagggtgggccctgcaactgcaggctgtcctggagaagtgaccactgggacctgctgagtagacggtggtcaagcttgttgggctgtccaggtaaacccgaggtgcccaccaagggaacctgttggtgttttgagaatgtgtggcttaggtttcaggaacagagtagaattcctaaattcagtctcctgagtataatcctatcacatcagccatttggctcccttaaagattatcccagagatacctaccgagttacctctgaaacagtcatctttgttgaaaccgaattcgttcattcattcgggtttgagagccaaccatgcacatgacaggagcagaaaaagacaaacagatggtcttatgtcctgggaatgctcagattctcatggagaaattgggccagggacaagtctgtgcatggtgtgtctagcggtggtaaagggcagagaaagaggatggggtgagggccggttgtgttgacatttgagcaaagacctgaatgaagtgaggggatgagagcatctcgtgtctaggctggggccttctgggctg

SEQ ID NO: 99279 - DNA, 1034 bp, Homo sapiens
acgaagtcgggaaaatcatcctgtccccgtttgccaccactacaaagtacccgactttccaggaccgcccggtgtccagcctcaagtttggtaagttgctcaagactgtggtgcggcagaacaagaaccactacctgctggagtacaagaagggcgacgggatcgccctgctcagcgaggagcgggtcaggctccggggccagctgtggaccaaggagtggtacatcggctactaccagggcagggtgggcctcgtgcacaccaagaacgtgctggtggtcggcagggcccggcccagcctgtgctcgggccccgagctgagcacctcggtgctgctggagcagatcctgcggccctgcaaattcctcacgtacatctatgcctccgtgaggaccctgctcatggagaacatcagcagctggcgctccttcgctgacgccctgggctacgtgaacctgccgctcacctttttctgccgggcagagctggatagtgagcccgagcgggtggcgtccgtcctagaaaagctgaaggaggactgtaacaacactgagaacaaagaacggaagtccttccagaaggagcttgtgatggtgagtgctcagcaggtgcctgggcgttcaggggtgctgctcagcaaagcctttccgccttcccagtgcacatgggcgtgggccgtggtgtcgtaagtcaccaggacagtgtctgtggctgatgtcccgctgcctgagataggtgcggctcagcacagcctttcgccttcccaatatgcgtgggcgtgggccgtggtgttgtaagtcaccaggacagtgtctgtggctgatgtcccgctgcctgagataggtgcggctcagcacagcctttcgccttcccaatatgcgtgggcgtgggccgtggtgttgtaagtcaccaggacagtgtctgtggctgatgtcccgctgcctgagataggtgcggctcagcacagcctttcgccttcccaatatgcgtgggcgtgggccgtggtgttgtaagtcaccaggacagtgtctgtg

SEQ ID NO: 99280 - DNA, 1057 bp, Homo sapiens
tggccattcctgcgccgtctgctggaattctgcggggagcagagcctgccccactccctacactgtctcacgctgtgtgcctcttcctctgcaggccctactgaagatggactgccagggcctggtggtcagactcatccaggactttgtgctcctgaccacggctgtagaggtggcccagcgctggcgggagctggctgagaagctggccaaggtctccaagcagcagatggacgcctacgagtctccccaccgggacaggaacggggttgtggacagcgaggtgagcagcggctgagcttcgagctcaccgagcccctctgtccctgggttccgtggacccatgcagtgcagccataaaaagtcttgcctcgcggcatttctgtgagggtgcaacaggtggaaatgtgcacgcatgtgcccagcactgggtgtgcctcactgagtgggagccatcctccggattggttgtcgtgagccctggctttaggatgtcaaggctgttccacacgacatgggaaggacaaacagaactgcctgtcccttgttcattttgatcttaaattaccatccgtagggttgaataatgcaataacacatacacagaggactttgtgagccgctctggactggagtgatacctggtatgttacataacttgggccaaagccggtgtggccgggctcttgctcagaggtcctttgtgttctcgcatgtttgtggagggcaccctagtaagcttcctggaagacggttcaggcttgcaagatccaggaagcaggaagtcccaaggacaaagctgtcttttatgaatgggatgaatttccaaacaaatggcacagagagaaagtgccataaagattgtaaggaaagagaagtcctttctgtttattcatttgttgcgcacctactcttgcacaaagccctgcttttccctctggaatgtgctgaccctggccccgagatggttccactgtttcttctgtgggcttgtctcactcgtgaaagagtgtcccaaatagtgactactgaagctgcaccaagtaataggaacaaa

SEQ ID NO: 99281 - DNA, 1765 bp, Homo sapiens
gtctgccttccggggctgtgccctctggatttctggtggctctcatttctctgtttccaggctgctgatttattttcttgcttcatccctttggtccggccaagactcacctggggcaccaggtggcatgtgcgtggacagtgtggagtcatatcttagccacagttgatcagcactttctcccttctcagcgctgttggccagtgatggtaaaaagcctgcagagtggcttgtccataatacagactggccggtaagacctctattgaggaacattgagaatggcccaaagccggcaggaatgtgcctgaaagcctggtgctggcgttgcccagcctcctccctctgtgagggagagggtatcagcccacagagaggctttgccttggcactatgtagtctgaactactaaccccgaagtgctttggtttgaaacttggccagttaggtggagaaagtggatgttgtgttgctgagcccttggcatttggcagccctgtagacttgaaccatgtcccagccaggctggatgactggcagactatacccttgggggacttgttaattccaggggaggatccgggtggagctccagccttatggggtcctagccctttgtgtgtatctgtctcccatgaggtcacctggctgccttgttggtgacttaagatgctctgtggattcctcaagagatgggctctgtctgcctctgcatgactcgtgatgagtggcggtgggacctggacccatctgctgatgatcaggtggtgttgcagcaaggttcctccagagctccagctctgcgtctgttacgggagctgtgaaggctgcacggtgctcatttcagatggttcttcctggctctctggctgcatccacagaagtctgatgaaacactgtgaaagccggcgtcaggtattgaaggcacctggctgagagcctcttttgctgcatgaagacctctggctgagtggggttcacaacacctcgtttttatttcccattcttgaagctgagctctggggctcaagcacttccagcaaagcagtttgactttctagcaagaggatgtggttgcattttcctttctcccttaaaagaaaaaaaaaatgcgtcgttcctagatgatggttttttttgacagcacgatgcctacctttgcgatttgagattttaggccccttcttggccgggatccttgtcatttttaataaggcttagaatcattgggtgaatcctgtttgggactggggtgatgctgttatttttctcttagaaatagggatgtctacattatgtggagctgtagttaatttagtgaggcttaagaaccactcagacatgctgctgttctttgcatgttcttctgttatcaataatgataccacttttcatttctgtagaactttaacagaaatatttttgcatgtatagtctcattgtgtggcttcaccaaccctgtgagggtgggtgggtagcttcctcatcctcattttatggaggagcgggtggaggttcagggagggataatgacctccttaacatttgactgaggtggtttgaagtctgatctgaaccaagggatcatttgaatggagtttctgtctccacactgcatgtggatggcaggaacccagtgctggcaactaagcctgcgctggaacatcacagtaactgcagagggctccctgcaggggcagagagctgcccctgcctgtgcgtgcaccttggaggttttaaagtctaactgtttccaatcaggaca

SEQ ID NO: 99282 - DNA, 1330 bp, Homo sapiens
ggcgcaatctcggctcactgcaggctccgccccgggttcacgccattctcctgcctcagcctcccgagtagctgggactacaggcgcccaccacctcgcctggctaattttttctgtttttttagtagagacggggtttcattgtgttagccggtatggtctccgtctcctaacctcgtgatccacccaccttggcctcccaaagtgctgggattacaggtgtgagccaccgtgcccggccgggcacttcttaacgttatgaagagcttttgaagatagggtttctcttgttggcacaaaattcccacatttggctgcaccctactcaaaacttcactgttttctggcatcttcaggaatttttgctgttggagtgaggtgcagccttgtccaggggaaggatgttttggctaatgcttatttcagagcgcgtggaggtgggtctgggttgtaaaatctcttaacgatggactaaacatattttagttgaaaggcccaccaaggctcccaaataaaaacacatccgtaatcctgtttgtaggcatgggatacaggtgattttgccctcagtcttgttttaaaacactagcttgtcagaagagaacagtttttttcccccaatttttgttttgtacattgagaggtttattcccccctcccttcacccccaaatcactagagtttaaggaagcattgctgattgttccagatttatctgatcaggtttctgggatgtcctatggggcatggcatgctgtgaaatgtagccacacagctgtgtcgtctctggagcctccgcagccaccatgcccagaaatgagcctgagagccatctcgcctccagtctgaacagcgtgtgttagtttcccctctggttctccttagaaaagtccatcgggggttgatggcattgaggtagatgaattaactgcctttcttgttcaataaagcttgttcttctttcaaggataaagcctctcttagcagtcacacatcgtaattcagcttgccagcagcaggaccgtgatgtgagtgatagcccagccagctcattcagccaggcggcccgattcccaggttcccacgcatcgccgggaaggttggccttcctctgaggttgagccctcatccagcccacaagcctccatccccaccaggtggccgatgagaggaaacccaggctctccactggcctggcacttggcaggagaaccctgccctgcacttcttaagggcatttccacagggagattccaggaccccttagtagtatctcagccccagtgtttgggggacctgggaagatgggtcagggttccccactttgtcc

SEQ ID NO: 99283 - DNA, 1038 bp, Homo sapiens
aaggaagtgactcataagggagagaagcagtgggggcagctgcaggaaccttcaaaacaaaacctgcagccctgttgctaccacctcttgttttttgcctaaaccaggcgttttattttgttaagacgaaaatcccttattttgcatccgtttttccccctgtataccctgcaggtgtttatagtttgtgagtctcactctggcttgttttaaccactgatttcgtttcgtcttatgtttctctacactctagcaaacctgtgtccccctccccgcccccatcccaatcctccagccttcacgtccttagcttaagtgattgagtctggcaaagcggatgaggcttagctatttttaaaatccagggtttgaggttctgatctggtgcttagctacataattccttccctttgttaagtacctttctccgagaaacaaaatgcactctacagatgttaatctctaatctttgcagcatctgttatttttattcaggggtacaagtgctttgtgtgtgctgcggtgagccctggccttctggaagctctgtgcttctgaggggctgagggggatttgggggtcccttttcatagtgtgggctgtctttcccaagatgcagtgatgacccatcagaggcagggttggtattgtccgtggggtccagtccctctatcttccagggcttttctggtcacaagagaccatggccagaagtgggtatcgtgcttgtgtctggggcctggggagggaaggaaaacaaataccaccccctgcagaagagatcgttaatggattctttgagtaaccagccagatagcttgtttgtgtgcgaggttgggacattttccgtaaagagcagactaaatataggctcgagggtggggaccagggcccgagagggggctgccactgcttgctccagtattgtttcttccattggtaaccagaacttgccaccagtcccaaacaggtggccaccctgagctctctgggaacagattggtgtttttgtttaaccaggggctcatttgcaaattt

SEQ ID NO: 99284 - DNA, 1090 bp, Homo sapiens
tggattgtctgcaggctattaattccttgttagttgaataatgacggctgtgtgcatggagctgtgtgagcgaaatccctcaccaggaagagggcgcagttcctctgggactggaacaggggcccctttggctctccttggctcctggcagaagtcagttgtcaactgggggactctttctggctgagccccaagcagcctcaatccatccctgtgctgggttttagataacccactggatctgtgttggtctttgaaagggaattcactctgtatgtttggcctaaactgtgttatggccttcatagttacgtattagcattattcagtttttgttgtttgtagcaattatgctgaagacacaaaagaagaaaaaaagctaagtgttgccaactcaaggagtaattttctttgttccagcgctgtgtcctgggagctgcccatccccctccacaaaggccagtgctaaacaaggccagagccaggaaggacacgcggggccatggattgagtgagggcagtgtgtgcgtgtgtggatttctctggtggctttgcaatggcaaatatttattttgagggatggtggtgggaggaccaagtttatactcactttgtttagtaggggaagtggctaatgtgagaatcaatagacaagattttatcaagcctctgcactgggcagagcgcagtttttgaagctgggagaacaggcagatgtgtgggacactcagggcccttcagatctcccccaggagccactgatacaggtagagatcgcagccacacaaggctgtgtgggaggggcctgggagatggggcggagtccagggagagatcctggaagccaggtagcagtcaggagggctttccaggctagtgggtactaggattggagcatccagaacagagtcacttcagcctgggaagagcggggtaggcggccgaatgataagtgatccttgacagcccccgagagcaggctgggagaccttttgttggacggtctactactgattatggatcctgcttggagaggggagtgctttttttaaaattcttttctttttttttttttttttttaagacggaa

SEQ ID NO: 99285 - DNA, 1036 bp, Homo sapiens
cctcagcctcctgagtagcggggactacaggcatgcaccaccacacccaactaatttttatgtttttagtagagatagggtttcaccacgttggccaggccggtctcaaactcctgacctcaggtgatctacccgccttggcctcccaaagtgctgggattacaggcatgagccactgtgcccggccctgttttatttatttatttatttagctcgggtttcaatattttaaaaaatttgaagccaggtgcggtggctaatgcttgtaatctcagcgcttcgggaggccgaagtgggaggattgcttgaggccaggagtttgagaccagcctaggcacagtggcaagtgcctttagtcctagctacttgagtggctgaggcaggaggatcacttgagccaaggagttgcaggctgcagtgagctatgattgcatcactgcgctccaccctgggtgccagagtgagatcttgtctcaaaaaaaaaaaaaattgaactgtgatgactatgatattgtcttttggggggttttctggacataaaattcagaattttacatagaaacttgaatttatttgtccaagagtttcttgttttgaaaataggatgccactgggaacattcttggttaggagccaccggaagccgggtctgtatgggcagggccagtgagatgcaaagccacacacgaaagctaagcacacactcttgttttcctcactcacatccatgttcatcctctttcctgtgctgacggtttgcaaagctgggagagaatgagggcggggcctcgggaagtgaatggcagagcaggtggcatagacacctcagccgtctgcccacagggtatgggcaaggtttgttttggtgactttttcttccagtcttgtgtacattatcgtctctcacaggacttgagcttggagggagctggagtggccgcttgctgagtctttctccctggagctcgtgggcagctggttacctcgcgctggggcgaccctgacttaggacctcctgccgtttctctgggtgact

SEQ ID NO: 99286 - DNA, 2602 bp, Homo sapiens
tcccgccggcagtgtgagagtgtccactttgggcttaagttcagcaggcttctggcagtgatgggatagcagctgtccttaagaaagagcatttgccctctgtgtctcttgggctgtgaagtgtcttgtactgatgaggggggtgggaggctataggagtgaggctgaggagggaaaggagaagcctcagaaagaggtgcagactgaagaccaccttagaaggtcgcaaaatccaagggagcagagccagtgtgcctctccttgtgacctctggcctcagtttccctgtctgtaaatccggatgtttggccaagatcagttttcaacaaggtgctgggtgggggggcggggggcggcggtgtatggcgtgcaagcattgtagcccccaagaggacatttggccatgtctggggcaattttcggtttgttacaactttggggtgtcatggttgttactggcacgtggcaggtggaggtgagggatgctgcccaagatcccgcaatgcctggggcagccctgagtcttcgtcatcccgagactgagagccccaggtcagatgagctctgtgaccccctcagcctctgatccacactcaccaaggattactctggtgcacgattctgtttcggtgggagctggtgtaattatctagaggtgtgtctacctgtgtgcccagaggggcccgccctctcggtgagcaaggacacctggttccctggggtctgagccaggccctcagggaggggggcagccaggagccgcagggggctcagccagctcctggccctcaagtgttctaggaaaccggcttctctgtggggatgtgactctccctcactcctcccattgcctgagtaggcaaattccacctagctctttatgactaactgcctggcagcctgagctcagggcagttcctaacgaacttctttgattattaacctatgctgggcccagggaaattactcacttgttttctggccaagagaaaatctcctggaaacttctatatataaatctttttgacaattccgcattcaagagagttcccctggcagttcttctatttgtagggtggggagaaaaacccatgtaatttccccaaactgtggattttgttcctatagaacatgcttgtgagattcagtgtgcgtatttgtgtgagtgtgtgtgaatgtgtgtgtgaatgtatgagtgtggatgtgtgtgaatgtgtgtgtgtatgtgaatgtgtgtgaatgtgagtgtgaatgagtatgtggatgtgtgtgaatgtgtgaatgtgtatgtgtgggtgtgaatgtgtgtgtaaaggtgattgtgagtgtgtgaatgcgtgtgtgaatgcgtgtgtgactgtgtgaatgtgtgaggtgtgaatgtgtgtgaatggatgtgtgtgtgaatgcgtatgtgtgaatgtgaatgcgtgtgtgaatgtgtgtgtgtgtgaatgtgtgtgtgtgtggtgatggtcattgtccacattggtggtcttgtcactcacttcttgatctgttgctgcatcagcagaatgctgggcagatggctgcatcttgtttgggagtttgggagttttctttgagtatctgttttttaactttcaggggagaataccaaggttgggaaacactggttttgctgacataagaataagaaaattggccaggtgcattggctcacacctgtgatcccaacactttgggagaccgaagtgggaggattgcttgaagctaggagttcaagaccagcctgggtaacatagggagacccccatctctacgaaaaaacaaaacacccaggtgtgttggtgctgcctatggtcccagctgctcaggaggctgaggtgagaggattgcttgagcctaggaggttgaggctgcagtgagccatgattgcaccactaccctccaacctgggcaacagagtgagaccctatcattaaaaatcagtcaatcaatcaatcagtcaatccatgcgcgtcctcccccattcctgccttgatttccctgttaggatttgccatggggtgggcagctgggcaaaggcatctgagctggaggtaggtgataagctccctgggcctcccaccctgcctgcctctgctcagtggctcctgggtccctcctgaccatgtaacctttgcgccagccagagaatctgccctttgccttcctctccaggaagttgttgagatacatgagtgaaaatattattcttttaagtgctttggatgttataaaaaatacactgtgccattaatgctcgtgcagggctcccggccggcctaggccctctgcacttgagattcctctggcagcatctgtttagaactgggcactcctggttctggtcaagtttatcctgaccagttcatttcatggcagttctggtcatttttgagaaaatctagtttgcactttcattgggcccctttgtgttttctagttcagatgtggcttctctagctttttcttgctgctaaatggtcttaaaggtttgagatcagtgtctcagactttagcctgcgtcaggatcacctcaggtcacgttttaactgagggtgggttaaaatgcagatcactgtgccgggcgcgggtg

SEQ ID NO: 99287 - DNA, 1048 bp, Homo sapiens
ccattttggtgccacactttgggtactatggctttgggcactcccaatccaggtgccatggcatggggagcagtgggtgaaccaaatcctggagcctggactgttccattgggtgcatttctggctggcagatagaggaccacccagctgtgcttgatggggtctagaagcattgaaactggtttgccgttatgatgtccatgaggttggagtcctttcttagttaaaaaatctgaagacccaacaacacacagcacccccacgctgaaccctcccgagaatgattgagctcttccaaataaagggcgattttgtagcttttcaagttttaacagtttgataactcccaggctcctgttgagatgctttgtgatgaggttgtgcgttcccctgtatctttcctgtgggtgtttatgtgtacagaacacatgtatctgtatttacgtgactgagcacaggcgatttccccgagtctcaccttggtgtgtgccagtgcatgcgcgtgcgcgcgcgcacacacacacacacacacacatacctcctctcagagaatgttgatgtggcaattcatgtttgacagctgggttaacccataaatagatcccaaaatataaatttacccagacctcaacctgcttaagcctttaaatagctcactagggcttttagaatgaagttgaaattccttggcctcacccttaagcctttttagaaggagtcatggaggaagtaaagaaatggaaatggagttgcctcgctgggctcccaggccctttgccgtggccctgcctgctctccagcctggtctcaccccacctgtggcaccttcgctgtggaggataccgtcagccaggctcacagttcctggcaggccacttcctctgtctggggccctgcctgggggtttggatcacctgagtcctgccccttggcaagcctcttttaacccacctgatgccttcacaacccagctcaggagtcctgcttccccaaggccattccgatggctcctgctggcgattccagggcctgccacctggtggcctgt

SEQ ID NO: 99288 - DNA, 1101 bp, Homo sapiens
gcgctgatccactggaatggggaagggcctcgagctgttctgtcaacacggagttgtttgtcaggcgtcatgggtatcattttgtgcatctgcccttgttcagtgtttccttgtaattttgcggaaaaaagtctgcttagtgttgaaccagacattctgcagcctttaaaagagaatggaaatggagagattgtaatgtgttcattggtgacttttgacacggatgctaacctgtaagatgtgcagatatatcatgtgcaaactgttaagatgctgtcaacattttgaatgacttcttgcaaatagtaaggaaattaaacacgcacagagctgggcaaatgctagaggatggtgttgccttttgcatcttggtgggaaagagatatttaagggggtgaggggagctcagcaacagcgacttaagggcctgctaggagcggggagaagttggttgctggggtgtgcggcctctgtagcccagtcctccgagtatcgtgacaggtggctgggtgcctcagtgctcaggtatgggctcctgttcctgccgcatgggctcctctgctgctgctgctgctgctgctgctgctgctgctgctggcccgccagttcccatggactctccctcacctgtgcttccttctgctccccgacttcatggttggaacgtgctgtcttcccatccctctgggcacgtggctcctcttttacatgcatgcctggcgaatagtatatccccagtaaatgcttgcagaatgaatgtctttcctgaatgttctgctctgctccccagcccccagaaataaaacagaaatgctgtactccttccctgtctcaggcccaggagcattattattattttttttaaatctcttgtggcacttttctactttctcctccacagtacagctgcttgttgagaggcagtatatgtcatgtctaagaagagtcctcaagtgaagtctggtgcagcttctttctagctgtgtgctttcaggaaagccttttgaatttggagcctctgtttcctctagctttactccaaaggaaacaagtgtaagtgcttggcacctgcagcctgagcgtagttcatgccgcccgtat

SEQ ID NO: 99289 - DNA, 1037 bp, Homo sapiens
tggtaaaaaggtggtaaggagtgggcacattggacttagacctcctgggcttctgtctgtaccagctctgaggtacctctcctccgtaagacgctcagcctctctgtatctgtggggtcttgataataccaatctcatggttcataggaggcgtgatggtggtgatggtggaagtgaggaaggagaggacgcaagagaatgggagacaccctggagaagccaagctggggagggaaggaagacggctcatgaggaaggccaggtttttggttgggagagacttgagcttgatgagtgtttggacaatactggccctgatgagggagcgattgcagggacggggtgatgccgatgaagaggctggccacaaggcagaggggaggctgaaagttgtgtgaagatggctgagtgggaaagacaagcaagatgggagtaagggaggatgtcttggcctttgtgcctgagcctgttttctctgcaaggctggaaagctgacctttatggtgatatctgtttggtactgttagagcgatttgtcctgcatttctgggcaacctgtgggcagaagaggagaaggatagatccttctgatatctcctgggtttggcagttggcatggtggatgtcatgtgggtgacatgccaccaggatgtcttagctggggctactgtagcaaaacacctaagactgagtggcttcaacaatagtcgtttatgtctcgcagttctggcggttgggagtccaagatgagggagccagtgagggcaggctccggtgagggctctcttcctggcttacacacggctgccttctcgctgtggcctctcatggtggagagagagagagaaaggctggtctcttcctcttcctgtaaggacactgatcccatcatgctcctcacggccatgacctcatctaaacctgatcacctcccagaggccccacttcctcatgacatcacagtggggtttagggcttcagcatacagattcagggggacacatgcattcagcccataacagggtgagggtgcagtt

SEQ ID NO: 99290 - DNA, 1657 bp, Homo sapiens
aggactgatacataatgtggaggactgatacataatgtggaggactgatacataatgtggaggactgatttataaagtagaggactgatttataaagtagaggactgacacataatgtggaggactgatttataaagtagaggactgatttataaagtagaggactgacacataatgtggaggactgatttataaagtagaggactgatttataatgtggaggactgagaggcagttggatctggatggctatttttcaaagtcaaggccactcagccagatgaatccagaggcatatctaggttctcttgattgacaggaacctgcagaccagctgtgctcttggtcctgtggccttccatgggagagggtatgggaagggctttggtgcaccacagatgtcttggcctgtctcttccgatgacttccctttgcttataactcacacctgtttacttggagactgtgaattagatttttagttttgcagcaggaaaatcatttgaaattatagactatccctcttgaaatctcattacataaaaagatttaacaagcctcttgtgaataagttagggtgacaaggaatgaattatttggagaagtaaaaaaaccttaaaaattaaaaaaagtttttacaagtaataagaactttacaaaattattgtgtgtattaatatcaaagggagatactgatgaggacctgaacaacatgggtgatgggtaaaaggtcattgccaccctgagtttggaaatttgaggtgctcgttgctactttgggttcagaatagttatgatttatgataaacctaaaaattaaaagtaccacagttttctctcaaatcgtatgtgggtgggttgtgtccagaaacaaataggaaagcttccacagatggaatgaaatagtggaacagatatggtggttttgttttggaaaggatttgtctccaaagttttggggtggaggcattctagtcttgtttttcttctgagatggaaacactggcaaacttggagtcttctgcaaaactgtatcaagcaaaagtgaaacagtagttgctgtgtgacaagttagtattttgtccatgacatgtagcaatcagtagaaatagataaaggatgggatattggaaaatcccctggagatgagaaacggtgggtgacatctgatgagaggaggaggattcagggagcagaatgaagacattggccaggcaagcatctcagtgtggaggtggggctgcttagacatttaaattgacctaaatcaagcagttattaataagtgggcaaaacaccggaaaaattgcactccattcctgtgcctgtcagggctgttctattatttggaaacagactttacttacttaccttattgattgagacagggtctcactctgttgcttaggctagagtgcagtggcacgatcatggctctctgtagcctcgacctcctaggttcaggtgatccccccaccatagcctcctgaatagctgggactacaggtgtgcaccatcatgcctggccaatttttattttattttattttttgcgtttttttgtagagacgaggtctcgctctgttgtcaggctggttttgaactcttttgcccaaaccatctgcctatcttagcgtcccgaagtgctggaattacc

SEQ ID NO: 99291 - DNA, 1338 bp, Homo sapiens
tgctaatgcacgtgtccgcaaatctagactcagcacaaggagtcttagtttgggatcacaactgattctcctggtccagtgatacctctgggctcttgttcattggctggagctctcctttttgctgggaggcagtgcttcatcttgcagttcatgagatgactggcacttttgcagccggcctcacactgctggttatgtgcatggaagaggtctcatctcactccttcctatggcttttctagctgggcagactctggttcctgtattctccccctcaactgtagtgttgaatgttcactgcccatcctttctgccctgctctgtggctgcctgtcctcatctctgcatcggtcttctcttttcatgtcctgtagctcatgagtgacccgctcccatgtcacctgccattttggccttgaaatttggtaatgattcatacatgtgtcctcgcttgtgccatatccagtgggacaagggaattgggacacctttggttctctggtagctttgcctttttttttttttttttgagacagagtcttgctgtggcacccaggctggagtgcagtggcgcgatctcggctcaatgcaacctccgcctcccgggttcaagcaattctcccgtctcagcctcccagagtagctgggattacaggtgcctgccaccacgcccagctaatttttttgtatttttagtagagacgggggtttcactgtgttggtcaggctggtctcgaactcctgaccttcgttgatccatgtgccttggcctcccaaaatgctgggattacagacgtgaacccctgcacccggcctagctttgcttttaaattgcaagctgggactccagccctgtgaagtggctgtccgcattagatcggacacctggcagacacttgtttaagttttagaattttaaaaaggaaaatacaggagaaaaagtagagttgatcacaaaaagtagattttgcaggaaatagtttaacttttaaaaaagttatcaatgtgttatatgcaaatatggaaaactataaagaagaagaaaacagttgcctataattcttctagctggaggtacctgctgttactcttggggatgctttttgtttttctacctttgtagctttttagtttttttctaagacaaagtctctctcttgcccaggctgcagtgcaacggtgtgatctcagctcactgcaacctctgcctgcccagctcaagtgatcctctcacctccacctcccaaatacctgggactgcaggcccacgccatcacacctagctaatttttgtatttttgtagagatggggtttcacccagaatggtgtcagac

SEQ ID NO: 99292 - DNA, 1875 bp, Homo sapiens
gctgcttttgtatgttggcaaatggggctttcgctttccttggtttgattctgtcattgatgcttcagactagtcatgcttttgtttgaagggaaaaaaaaatcaatcaatcaatatcagtaacttgctatagatttttataaaggaaaaaaccccaccacatgtatggtggggagtgagttgatgtggaatcagtcatgaccgcgttgagttaggagcatcgcggatgtggagttacagctctgctgtggatgtttttgttttaagaaaacatcttttaaaaatctaataatggttcattaaaaaccagaaatggtcaagctcactagaaaccgtcatcagccacattctgatgaaagaggttttgactttcttttttaaaaaattaatgaagatacatccaaatatttgtggcaggcaggaaatcaagcggattttaatgggaaattatgtaagaaagcttaatgactaatttttctggatcagacaagtggagaacggtcttagggaaatgtgtacatccattactcattagtttgctgtattataattactgttgtataggaagaagcatgtcagataattaggaactgggtggcattttatgctaaggatcaaaacaaagattttgcttggaatgttgagcaaaattatactctggctgagattaaacacatggcaagcatcctactccagtatttaaaatcatcaggcaggctttattctatttttttgggtctttgttctttcatgttttcctctaatgaaaaggaatgcttagaaaatagcactgggaggccagcaagaaatcagtgttgggattttctcatgtgtgaggagctgttactgctcctgtcgcctggtttcacccctcggttctgctcccaggagctggacccctccccgctggcccctctgtgctgcaagcatccattttgggcttggggataatggtcaagagagttggttggtttgggctgtgggctggacaagcgcttgctgcttaaaccatgttgattgtggcttaactgctgaaccaaaccaatacttcatccaaagaacttctccagggagggagtgggcttcaggggagccacatgggaagccccctaaccaacatttctgtagcacttgattggagcctccaaacaccgtcgctgtcgatgctacagcagtcctgtgggccgcagaaggagtactcactgtgtgttctccatgcccttctgtctctgagaagcagcgtggcgtgttcggattgtgccctcctgccgaccccggtggctcaggcaaagggcttgccagatggtcggtgttctttgccaaatgggaccgatagcgtgcgcatggtggggatgaggggaggactagggaagtaaatacagtgcctgctgccacgtcaccttcacacagtccatgtttaataagaggtcgctgctgtgatgatagggggtcggccagacatgtccactgtttaaaaagcagcatccatctgaggactcattggattaaatgtacacctaaaaaaaatacagtggcacctgcatgcagtgcccgaggatgggtgtgctgttttactagatctggtgttttttggaggtgcacatttggtagttcattgttgggttggtatttgtctccataacctgtttcagcctcaaggtcatttacctttgatcagtgcttcaagcttagcggtttgtttatatacatgttcatgtataaattatattactcagtctgatcataatatatgcccagtgcaaatcatttcattaaagcctcagggatacacggtgccaccgtttcctcattcagggacacggggatagtggtagtgtgtcttcagcacgacatggggaaattcaaaggcagcca

SEQ ID NO: 99293 - DNA, 1018 bp, Homo sapiens
tgcttttttcctccaaatgcctctcacctattcccagatactcgctggagttggagcacacatgtctgcagatgtaaaacgacctgctcccccaggtgaatggattctcgccagggccaatacttatccgcaggggtgtgtgccaggcagcccaggtcagcctccctccaccgggccacccgcaccaggttgcctcccatcgtttgcaggagcggaagacccgatggagcaggtttcacagtgccctcgctgctgcctcccgtttcatctgcacgtctctttcaatgcgggcgtgcgaacttccaggtagagccgagttcaagaaaatgaagtactgcatgcgacgagcaagtttattgaagagggtgtgaggtcgcggcgcctgaccctcattatgtcagttactactaaatgaaattagaacttcactgccctttttctttttcccatcgaggtgcaggaggaattgatcttagggtagtattttggatttaaaaaaaaaaaaaacatgaaatgaaatccgtgtcctctttatcctcccctctctctgttctgcgcggcaggtagcaaggaacggtggcggggccaaaggtttcctcaaagaccctgggggccgggcggggctgtgccaggcacccgcgtcgcgctccagctccagccctttaatgctctttgccattcaagccactcactttcattttctatagaaaagcctttctgccgcctttcacaaaacttgtattttcatgcctaataagtgagcgtgtgacatgcagtgggctcagtctctgcatagcccggcaggcagcggctctgctttccagaaccttctgggagtggcagacacacattaggagtccacgcgcaggtagcctggcctttgaagctctccaggctctggccacagtggctttcctgccctccttggctggtggacgtaaggcccctcgccccatctgcttcctgctctcccagagccggcctcaccttcgagactcatgctactaagttgtctttc

SEQ ID NO: 99294 - DNA, 1329 bp, Homo sapiens
ggacaggccatggctccccagttctctgctgtgggcaggtgcaggagcctgaccaactcctccgtgagtccatctatctgtgcgtgcatttattcattcctccctagtgaggcaggtccctgatgagcagctcctctgcgcctgcccaggtccagcgttgggcatgcagtggtgaacaaaacagactcaaacgcatcttcacagagctcatgttttggtggacaagtggaggatataaacaataagcacaatttagtaaaacatacggtaccacagctagcaaaggtggcaaggaaaacaatgagagcgggggtggtgtgaatgtgtgtgggtgcaggggcacctcgggagcctggccgggaaggtggcatccgctgcaggcccaggtggggagatggtgggtgctgcttccaggcccaaggaagagaaaggcagaggccctgaggaagcacagagcttgagggagagggctggcgtcagctcagggaagcagggaggccaggcggggaggccaggtggtgtggggcctcatggaggctggggagtcatgaggatgtgggaggatgggggagctctggttgctcaggcagtggggagaggacagcaccatggtaacatgcacttgtgttcatgtcttggctgccccattgctgggcacgtgtaaaataggagaaatcttaaagcttgcagctctccatgtgaaaatgatctgtttgtttcttcttattactatcaatattaatattgatcctgtagtgctttcacacttaaattgttgagttcccagtcttgtctaataattatctcagcaattgcgataccattggctgaggttcatggaggttttcaggctaatgtcactgaatgatcggaaggactcactgctggcagtcacttgtgtgttttgtgtttttttttcctctgtctctcgccctccatttttctgcacggcattaagtcagccacattttagattgtgtgcttctgtcatcagaatatctggcatgctttcccctgaatagcaggcttgacatctttttctgatattttgtaccaaccgtactaagaggcttcttgttagctgttaattcatattttctgaggctgctaatatgcgtggtagagccattactgttgcatgttcaagataaaagccaaatctcagcttataccctgttctcccaggataaattcagagaaccactatgaagtctaatccatactgtgatgttgctgaaaagaaaatagggttataggcttatttggagcctttcactgtttatggttgtacaagttgggtgttactgacttataatgtaaaatctgaat

SEQ ID NO: 99295 - DNA, 1001 bp, Homo sapiens
gaagtgtgttgtccaagataggatttagtatcctggagccaggcttggaattctagtgtgggaaagcttacttactattactttattatggcattttaaaagtttttaaaagtaagtggaaaaaggatttttgaacctgttattactttcttatagcattttaaagccatttttttttcctagtgggaggcagaaggaaaaactcggtcatgtttcactcactcctttcttaaagggagagttttatattgtaccttcttgttcacagccaggtggcagctacattgctaattgcaagctttcagggtgagaaagagaacccgtgcctacctgccttttcctgatttgaaatggtgatctgcgttggtctcaagaccttgtgcagcctcgcagagattgctctgcacacatgtgattgcatctaatcaggactttttctgaaactgctgccaggaaaatgtgtgctaggaaggttaccttctgcagctggacttttatgatgcactggattatcatggccttagatataccatcagggcatggagtggcaacagtgctttgctgtcttgacgcatctcaggtagaggatctcttagggagctttctgattgaatcccacgcccattttgagggaagggaatgggccatgggtctcatccctgcctagcgctgccttgtgaggggtgctggcctgtcacctccagttcttgctcctttttaggaagccatgctgcctccttccttgttgtgcgattattttttgggttgtgtctattttggtatttttttctctttcacctcctctcccatatttcccctctagggtgggaggaaggagacccaggtgtgaggtggtgcaggtggctgcagtgtcctcagagatactgagctgtggggtagaggtagctggaatctagatcaactcacctctcttttatcagccatttgttctgagaagagaggcttcgaggagagacgcttcggtaaggggttgctgtggg

SEQ ID NO: 99296 - DNA, 1027 bp, Homo sapiens
gacttttttttttttttttttctgagatggagtctcgctctgtcacccagactggagtgcagtggtgcgatctcggctcactgcaacctctgcctcccgggttcaagcgattctcctgccttagcctccagagtagctgggattacagacatgcaccaccacgcctggctaatttttgtatttttagtaaagatggggtttcaccatattggccagattggtctcaaactcctgacctctggtgatctgcctgcctcggcctcccaaaatactgggattacaggcacataccaccacgctcaactaatttttgtattttagtagagacggggttttgccatgttggccaggctggtctcgaactcctgacctcaaatggtctgccctcctcagcctcccacagtgctgggattacaggcgtgagccaccatgcccggccatgagtcctttctactgtggggttggtcttatttccccttgctcccgtgagaagctgaatttgcaaatgccagggtgaacttggtaatggaggcaacaggcagatgcttggtgtctgtgcgttgaacagaaaagagcccggtgaaattccacgcctgtttgtgtttagcacacggttcctgaattatttcatgagaatgcaggtatagcggtgacagctacaatatttgttagccaagctgcggacagagggttggcctcaggctgctgtttctgccccagggtcgtgagaaatagctgtgtccattttaaagcaagaaaacaaatggcacgattgctctgctgttcctgtcctagggcagagagctaagtcaagcactcagtggactgcgtctcgtctcccttggactggtagtgacagggctgccctgcacgccacactgctctcctgttcctgtagtgtcgctcatgtaaaatgcactgcaggctggtgctgctgaatcggctcactttctcccatttccttctcctccactttcagatttctttcagcactctccaacttaccttcagaaatgcaacaatgggc

SEQ ID NO: 99297 - DNA, 1078 bp, Homo sapiens
tgggtggacaaaggttttctgtgtgactcacctctggccagaaatttagggaagcttatttgtaactaataccacccagtcactgcaggagacctgccgaagggctctggggaaagtgatcttcaaaaatagaaaggttgagtgaaggtaggacttttgggagaagcagaaggagcctataagacagcacattaatttggcaggtaattaggaactctgatcttgagcatctcattttaattagcgtggtccagcctgccttacggtgctcacgctgaagcagagagtggcctgcttagctgctccgcaccatttatttgggtttcttatttgggaagtttgcatgtgactgggccaagtgacatttgttttgaggtccctcccagggcccaggggtgagctcttgacaaccccagagtagagatggggcacctgtgcccgggcattgatttcctgggaaggaaagaaaacgccaggccatgctgctgtgttacagccctttaatcagaagcccctgctgcatgtgggcctgctgttcccagtgcctttcaggaaaccaccagaagggctccagctttagggaggatggtccatttacacgcctgtggttggaggttccaagtgccttgaaaaatgccttgatgccacttggagctgtttctttcttctctttcctttcccttttaaaatcacggaaccatttctttctttctttctttttttagacagagtttcgctcttgttgcccaggctggagtgcagtggcgcagtcttggctcactgcctcccaggttcaagcagttctcctgcctcagcctcccgtgtagctgggattacaggcgcctgccaccatgcctgactaatttttgtgtttttagtggagacaaggtttcaccatgttggccaggttggtctcaaactcctgaccttaggtgattcgcctgccttggcctcccaaattgccaggattacaggtgtgagccacggtgcctggccagaattgtttcttgagtttttcaaacaatgctttctctccagccagttcaattgtagagggtcctggagaggaggtggagca

SEQ ID NO: 99298 - DNA, 1628 bp, Homo sapiens
acaggggttgctgattcttctttccagatggatgtttctaaagtctttcttaaaggagccagaggcttgcccgccctgcagtgccatccttcttgccgctcccacccacttctgtgatgcacagaacctgccgccctgccctgtctctttgtgttcgttggtctccatttctagtgtctgagtaaaggcagtccccagtccagtctgcaaagcctggccacttgcacaggaagatgctcatagatggctggttcctgccagtgacacacgtggacctcaagcaggtggatgggtggagctcagggaataggcatgtggggcacactctccaggcacatccagggctggactggggccggcatgggggtcactggctgcaagcgaaggcagcttatgtcatgttccctctgccaccgccagctgtcctgcagcaggaagaggtagtcatgtttggaggccgggctgtgcatgagctatgcaggccttggggtcttttcatcagattccttttggcagaatataaggaagttggcccaaaccacatttttgaacttctgctttggccttgtcagtctccttctgtgattcagaccgtagtgaagccctggttggctgaagtgctcaggagaggagactttgggggtcatcactcatttctgagttacagaagttaaatagtgacttggttcggggtcatgccatgtgtgtgaggcctgagtttgcaggtttgtgcagggcattgattggttggttggttgattggctgaggaatatttggggcacctgctctgggccatgtacacaatgaggcaaagcaatacttagacctcaaaaacaaagcgatgtagacctatctgctgtgtccttgtgtttctgcctgtggggcacgtgggacatgtgagggagaaacagcatcctgcaggagagcaatgcctccagcttggcttctggaagcctccagaaggatggacgggggcactgagacctgaagaagggttgtgcatgtgggagggagccagcctggtggaccgtggcctgcacacctgcagcagctcctcagagctgccccctcatgccttggccaatcacagagcaccctttctgtccaggccactgatcagcccccaggtccaggtccaagaacaagcctgtgaccccctgggtcccctttgtccttggcctatacctgccttctgcattctggggctaccctttgctccagtggctacagaagagagaggagggacactgaccccaaggcccaggccagtctcgtccaggctgcccacacctaggtcttcaggatgggacaaggcagtcttgggggactttggggtgacacaaaccagagaagggcttcagcagagggccatgagtgcctaaccgtttacctgttttctgctctgaccaggcaccttgggggagggaaggcatcaggagccttctgctgagttcagtggaaggtggtcttcctttccaatactctggttccctctctcccctatgtgcaagtaaataacatgctactatatgtaaattaacacaaatgaatgtaagatagttatatgtgtctactgccttagaaagtacagtaagatgaatattaaacttttcagactgtaagatcg

SEQ ID NO: 99299 - DNA, 1055 bp, Homo sapiens
ttctgtgctttggagacctctgtgtgtctttcttggttttggtttccctgtctcccagcatctctgggagatatgtgtatgattgattccaagaataaagtgtgaccaggaaaaccatgttttgaaatctgacctctcaagcccttgaaaatactcagagcttttccagaatgttctcatgtctccatccacttcctttccctttctgctttaaccccgctaccctccagtcgtagccttcaggagaaataaaaagaccccagagaggccagcctactttcccccacactgagttccaggaagctgagtctggttttcccataggaacaatgttatgggatggggactgcattcctcacaaaggactctgcctcgaaatgtgcgattagaaagatgcacccgctttcagccgcagcaacttacaataatgccgttatgccctcagccataaacacattgtgcaaattgatttcttgaggagccccaaggtactgtgggtagaaggagagcacatacacatgtgagtgctgtgaaatcattaccatagcctcagacatgtctgttcttaataaggaaaaaaaaagttcattacacgtcattgaagatttttttttttagatagggtctcgctgtgtgtcctaggccggagtacggtggtgtgatctctgctcactgcagccttcgcctcccaggctcaagaaattctcccacctcagcctcctaggtagctgagactacaggcatgcgccactacacccgactaatattttgtattcgtgtgtgtgtaggtggggtcttgccatgttgcccaggctggtcttgaactcctgggcttaagtgatcctcgcacctcagcttcccaaagtgctgggattataggcctgagctgccaccacagttggcttgaagattttttagaaacttgccagcttagtctttataaaaatacgatgaaggggtgatttgggtgtcccaagactgtttggaaggttgttctgacaagcaagtgctgatgttttgtacttgatcggcttctctgtggcaagccagaggcg

SEQ ID NO: 99300 - DNA, 1558 bp, Homo sapiens
cctcgcctgtgctctctatgtgaacacagagtttctgcttcactgtgggatgaggaggcttcagtgaattgtccacagacctagtcgctgtttccaatgttatttccttagggaagagtatctccaattttaaactgcccacaaacaaatgacgtttaggaaaccttgtaggtcaggagctgctggggtctgcgggtaagaacaggagggcttcctaagctcttccactgatttagggggcgaggttgggaggggtttcctgacatggtagaatttttctttattcctactcgttggttcaggtgtgtaattattaacagttacaccctttatctcctgcttcctctggctgctgacttggagggatgctgggagaaggggagggctgaagagttggggatgggtgtgcctggcttccttctaaggtttagggctgaccctggacagtcccagccccaggcaagtgttcttgaggcttattgctgtctgcctagctggggaggatgttgagaggattacttagctaattcagtatttggaaaaagtatctgtaaacttaaatagaggcccattacataccttttgtggattagaactgtaattgacttagtgtttaaggcagaaactaaggcctttgatttaaaaactgttgacagatcggagcctaagccgcttctgtttgcagaggagagccatgacttccagtcaagttgaaacatagctttctttatacccttcccagttggacttctgtcatattttacaaaattcaaggcttttcatttaacttagatttatggcttttccatggactatcttgaggtttttctccaaagcaaaccagctcataccttgacattgtcaaaatagcaaaaacacacatcttaacaaatgatggcaaaatatttgagctgagagattggggtatgtgtagtgttacacctttgcatgtaaaagattatgtcaagcaatcttctaaaggaaatcagtttttagttaacttttaaggctattcaccatgatttaaagtgattccttgattcctctgttacattaagtgtgattgaaactgtacctttattttctcatgccttgataagcagtgtagtcaaatcataacatattatgactgcaatcaagtgattatagcacgtgattatactttttgtctctgtggcgtgaggagtggaaaggtgtctttttttgcaccacttggcactaacggtggggagagatggttccccgaagccccctccctcttgtgtgttttggggcagagcgccctgttcctgaatagcacggattgcacgtgtttctgagcatggtgtgtgagactgctttcccttcctgcagtcaactcgccaaggtgcctccccagccccagcagtccggcttctctcctttccgctgccccatgctttctggtggcctggcagactcaggactatctctgagtccttcacaaaaccctcctccacatgccttcttttgtgaaaaccctcagtcctctttaagagcagggcccctggagccagacagctctggttcagtcctggct

SEQ ID NO: 99301 - DNA, 1050 bp, Homo sapiens
ccctgagaagctacctgagctctgctaatcagccccactttcctctgcccaggcagaaactaagatgcctcggctccttctgtggaggaaagtaatgtgttaattggatccagggtcctcagcacacactgggctatttttacagtcagacaggaagttgtcgttttataactttatcctgtgtaaattatagcccgggcggggggtggggggacttggattgttaagaaagtgatcatcctgttcttggatagggtgattttggctgtctgggtaagttctaggaatttgctgtattctcttgattctaatgaactttgctatggcttgggaaggggcctctgcatggagagagagaaggaagctagcgtttcttgagggtctggtatatgctaggcactgtgctggctgctgaattggactgtttgatttaatccttgtcacaacccctttgaagtggtcttgttaccctcttttacaaatggggacattgtggctccagcaggttaagaagcttgctccaggttacatggctatcagtgggaagctgggtggggggtgtggacaggtctgtgattcccagacccatcctcagatgcctcctggagcctctttgtgggagagtgcatgtgtcatggcgagtatgtggctctgcgattggaggaaatgtcaccggaccagtcaataggtcttcctctttacaattagcttttgtcaatgtacgttttttctttagtccacacaaccttttaaaatttatttatgatcgtagccctggcctttatccatcgaatcctaaagtgatctggctgctcatgaccaggggtgacagccaggatgcttttcttggaccaagaaacctggcttaaatgacagccttgagccttgctttggagcagtcagactctctggggatactgttactattagtgagcattatttgctgcagaaattgattccttctgccgtacagtaggccagggaggcctccaggtgccttcggtgggggaaggattttagttgctcaggccaaataaccgagactagctc

SEQ ID NO: 99302 - DNA, 1049 bp, Homo sapiens
attttcatattaaaggcaactcacctgggatatggcttgctgaaagggaagaggcagacgctgtagtatatagtcagtgctcaatgaagggaaaggggcttcacttccccaacagagtggccctccaaaagggtctcactttgtagcccaggctggtctcaaactcctaggctcaaatggtcctccaatcttggcctcccaaagtgctgggactacaggcgtttgccaccacatccagctgctgctccatctttaaagttgtcttgcccacactttgtgtgtgtgtgtgtgtgtgtgtgtgtatacatatatatgtatacacacacacacacacacacacacacactttttttttttttttttgaagcagctcgtctttattgaaacttcttaaaacatccaacctgattttcaaagctcacagctctgctcctggctttgggggcttagcctctaatttgggtctgaactttattgagctttgcttggcaaatgcaatgaagaaagtgttaccaggtggcattactgagagcccttgagggtggggggagattgcgtgccgtgccctgtgtgtgtgtcagctgactcttgacccccgcttgcagctcagcatggctgtgtgacttaggactttctagatgcacataatttcaggagtggtatttgagtgcatttggcaccaggcatggggtggctgagccccatcagtggcacctcactgttgctgtgcactggtggggtagttcttcaggcagtgggggtgatatccatcagcaggttccaccactgggcaccaccacccttcccccgcaggtgctcctctgtcctctagatgtcctgcctcctgcgtcctttgcaccataccccacaggtcctgccacccctgctcatcatctctcttgctgttttcatctctgaagtccctcctataggggcttcctgcccacttctctgcacctgggcttctgccccagctaaaatctcacctctccagaaaatagtggccaacttccccatcaccttggctagaagtcacccctccatttgga

SEQ ID NO: 99303 - DNA, 1060 bp, Homo sapiens
agttagaaggaagcgtatggaagaaagtgtggcaacaacactgctgacactggaggacagaattctggtctctgcaaacggcatgagtgcgccccatgagtgcgccccatcaccagcaggtgggcttggcaggtgtgccccggctcatctggagagtcaggtcaggggtggctggtcaggatagctgttaccacatggaatgtgcattcctaaatccaaatgcttgcctcaccccagtgctgagcctggccagctgagaggctggagaccccgtgtattcatggctggggctggctcctggcagagcctcccagcgggttggcattctgttcagctttcccctgctgtcgcacaacctttttattgacccctcccttcctgtgttggccaggagcccactggcttcaccagaccctgactgttagctggtcagggaggcagggcctgggtgccttggggcctgtcctatctgaggtccacagcctgcagggacatcacctaaaagttgtcatcagcttcattagcagcactcaggcccagctgggcattcagctgtgactgcattctggcacctgaagcatctgggcctggacggactctttcaggttgtttggataatcatcctaaaaacgcctctgagatccacccccactcctgccatcaggcattaaaatcttccgaacagaaaagctgaaaatgttcccttaccttaagggaaaggcctcaatggattgatttaattgtatgtgtgaagcattttttcttctttgctaaatgcataaactgtataacgaaatgtaattagtgaaggtgcattatctgataaagtaaatctcagccactgggaagagccctttttggcagtgtagtttctcttttaatagctgtgatcagattatacctttaaatctctttaaacacttcccaccactgaagtctttggtttccttgatttgatagtttttaccaggctgttcaaaaagtcaagcagtgttcttttaggtcctttttggttctgtgcgacagttaatgaatagtcatgtgcatttgacccctaaaa

SEQ ID NO: 99304 - DNA, 1588 bp, Homo sapiens
gggtgtgaagggcagaaaggtggggccatctggacccatcatgggacaattctaatggcctctccattgctccctgttgggttggcgagatggcctcaggtttgcctggcagttcagcctctctctggccagttctgcttcttcccctccttccacaggtatccatcttccctccataccccaaatgccaaactctacctctgcatcttcaccaagaaaagcatttctgttgtcctgaaatatcaggccttcctgaacccccttgtacctctgtccagtggaagtagaatgccagccacatacgtcatttaaagttttctactagctacattagaaaaaataaaagaaacagatgaaattaattttaataaactgtttaatccaacatatccaaaatattatcctttcattgcaattatctggaatttgtggacgaggtttgctataatcctgtttggtactgatgctttgggtggtgctgtgtaatgttcattcatcgcacatttcaattcggccacattttagtgctcagtagcacctgtggctggagctactgtattgggcaccacggccttagggttttgattaaaaccccattctcttgaccttctgcccaaagcctttgccagatgagacactgcctctcgctgaatgcctgcttggagcagagtcctgtgtttgtttggaaatgatcggaagctcctgtgtccctggtcgcttgctggagtcggtgggagctgagagtcccttgctgcccggagcatggctgtgtggctgcctgactacatggttcttcccccggttatttttgtttgggcagttaactctgagcattcggaacattcgccgagtggaacgtgtgtgtcgtcatcccctcgaaggcttggctgattgagccagtaaacaaaaagtgcattcaacacaggcttgtctgctggcctcccccgggagagagagtaggtttgctattcctgaaatgtaatccctccttcagcgctgcacaaaaggcccatgtctgctcgctgggacctgatagttcgcctttgtacggatgaaaaaaaccaaacactgagcctggtctgagcggggctgtttgttgaggctcctgatgcagacaagggagcagtgtctgcacagggggtctggatcgcacccgacaccatccaggtgcctgcgtgtgctggtcccgccatcaggacttcccctcgtgaggagctgggtaccactgttatcctgcctgctggtctgagggtccgagcgtgattgggagcagagacaagagttccagggcgagcctcagttctgggaccaccattgaccagtagagctataaaggacttggccaccaaggttggagctgagccccccatgtcatgaaactgccactgtcagagccagcctgagctccacggtgcccgtctcctacctgcactgtgcccccacacctttgttgacaaggacctgacctctcctcaaactacaacctaagaaccacaatgcctgttccccttacctgcccccaggtgtcctgggagaagtcagtgacatgattaagacctttaaaaatgatggtaagcatgtgccagtg

SEQ ID NO: 99305 - DNA, 2017 bp, Homo sapiens
aaacccggtgaatcctgcatggatttgcaaaccaaactacatggagaaatcagttaaattctcaggtttcagggttgcagctgccactgagaagtgtatttaggcaggttctggcaacagacttggtgttgggcttgagtgggaaggggatttaggagcttcatgagcgagtcaaatgcaagttggggaagtggctgaaaaaaatgcctcctggaaaaagcagtaaatgtaaggatttaggtcggccattgtctccgtgtaagtcaacactaccttgtgtgtgtgcgcatacacacaaagagggtgagccctcagcccgccatacgggcatgttatccagaagagaggagagagaagcccgctgcactctccactgaccagaccacccactttgccctctgcacgctcactccacgaaggatgcaggtgggcacactgctacaaccccctgggtgtgtgtggagttgggaaagagacggatgttgagcctgaagaggctgtgacctccccaaatactcggactcccctgtggaaggcaaggtggaggcagctgttatgtggtgtgttggattcacagcagtcaaggctgccacgagcaagtattttgagtgctccttatgtccatgcagaggctgactccagaggatgctgtgcacaggcctgtgtgacctgaaggcccttgcaggctgaggtctcttggtgataatccacacactgtcctgggccttggttttgcagcatttccaacttgggttgtcagagtgagactgtgcaggactgccccgtacagtacggcttctatgtgtgaacaacacagaccactaagagatgtgacaaagctgttccatcagaggaaacatagtctgggggacaaatcctcccattcctgataggacaggagggagcggttggctggggaagacctgagtgagggagctttcttgaggacgggttttgtcggagtgtagttcatataccatgcacagcctgtcagcatacagcttgaatgaactcacgtgtgtaaccagatcaagaggcagaatattactagggtggcagttttgagtcccatgaaaacaaacacatttactctgtctagctccatctctagttaattctagtgcagtttaaatgctcacaaaatccttatttgaatggatgagtcagtggtttgaattgaatagtttttgagccatttgtatggagaaggtattacccaaacagaaacatggtggtgataatagactcacgttgatttcacttgttaactgagcaaacacctcttgtctcctcattctgtgcagagcattctgggtggaaaagtcggaccaagtttctgaggggaggacggaggagtcctgtcttttaagcagatggagctgcaaacagccagagagtgacagagattgagaggcagcagctgtcttttcagttgcgcatcctccttgtagtaaccataggtgggaggctgggattccgagctcagggcagcgggatgctcaccatgtgctgggtgctgtttgaaggaccggaaatgcatcattttgtttaagtctcccaacaggccgggtgcggtggctcatgcctgtaattccagaactttgggaggctgaggtgggcggatcacttgaggtcaggagtttgcaactagcctggccaacatggtgaaaccccatctctactgaaaatacttaaaaaattagccgggcattgtggcaggcacctgtaatcccagctactctggaggctgaggcaggagaattgcttgaacactggaggtggaggttgcagtgagctgagatagccccatttcactccagtctgggcaacaagagcaaaactccgccttaaaaaaaaaaaaagtcacaacaacctgtttcacttaagtacgggcttaagaggccagtgtgagggtcaggagctaacactcagccccacaggggtctccaggtcctgctgctccttccacgcctgcccggtccctgcagcttcccatgaacggaagggaagtcatctg

SEQ ID NO: 99306 - DNA, 1032 bp, Homo sapiens
ccccgtctctactaaaaatacaaaaatcagtcgggcatggtggcacatgcctgtagtcccagctactcgggagactgaggcgggagaattgcttgaacccgagaggtggaggttgcagtgaaccgagattgtaccactgcactcagcctgggtgacagagtgagactccgtctcaaaaaaaaaaaaaaatgcacatttgcatcagtgatttcattctgccagtgttaaatgaaaattgttacagggaagttagttctcaggatccattggggataaaataccagaacaaagggaaggctagggtttcttctcctccacttctctacactcaaccacccttcccatttctttaatgccaacgcaccgtcaccttcctcacccttgatgctgagacattcaagaccccttagaacccaggactcccggtggctgctacaccctggtcatatctggcctctcacacttaacccctccaaatagtaaaatctggataaaaaaaaattgggttttcaaagagctgttaacagtcttctgtagctgagtttttaagaaattataccatattcattttgactcctaattcctttttggaaaaatttctgaattttgttaaattcacggagtaacacaaatggttatctttctgttcctttaaaatctatctttgatttggagattactagggtaaattatagatcaagaatatcatacatgtcattattcactgaaatttgcagtcagctctgtagacaccattctgcctcctttacccagcacgttggggattgtgattactgacgagacctttaaagaatcttccggctgggaaaggtcccgagtggcctgctttcctggcttatttgagaattttgcctggcccctaggtttctcagcagtctgtatttcccactgttcgttgtgctcgtgctgagttgttttcctatcgaaatacaactgtgttttattgaccttgaatagctctgccagatttcacaggtgctccttgctctgggaggccctgaaatgcccttt

SEQ ID NO: 99307 - DNA, 1064 bp, Homo sapiens
caagaccctgtctcaaaaggaaaaagaagagaaggaaaaaaaatcaatcaaattctaaggtgaatttgagagtatacataagtttaatgaagatttttatttagtaataatcataggtgcacatgtagtaaggatagttttcaagcggtgttaaggaagtggagattgagatgttaaatagcatctgataggcgtttgcttttcaaatagacttagtacttcagcttcttactctagagacagaatacagttcttacatggcttttaagatgctgcccccttctggtgactaggaagattataatatctgtagcaaataggcattctggggttttttttttttcatatttaaatattagttttattactgaacctgaaaaacaaaatgaggatcagaggtagcgtctcctcctctgtactctcctttcttccttgagaggaggaataactttctgtctcttgctgttctttgtaaatgagtttccttttggctttctttcttctgtccttccttcctctgatgggtagagcatctctgtgggccaggtactgtgttcagcatttcatgagatttatcaattttaaagaagaattgacaatatgatgcggagttttccagattgctgtttgttttgagagggagtcttgctctgttacccaggctggtgtgcagtgatgtgatctcggctcgctgcaacctccatcttccgggttcaagcaattctgccttggcgtcccaagtagcagggattacagatgcatgccaccacacccagctaaattttttgtatttttagtagggatggggtctcaccatgttgaccaggctggtcttggactcctggcctcaagtgatccacctgcctcggcctcccagagtgctgggattacaggcgtgagccactgcgcccggcccagattgctgtttttttttttttttttttttttatgatgtaaaagtatcaacatattttttaaagaaagtttcatctgctgctatctagaggaggtagctggaaccagagcaccaggctggcactggcaaggaggagagggcacctccc

SEQ ID NO: 99308 - DNA, 1042 bp, Homo sapiens
tggccagcatggtcttgatgcctggaaacagctcctgggcttctcaccagtattgggagctgactcttagaaaggcagccttcctggggagcacaccctcgaggggccggaaaccgtgaaactgaccagaagcacataggtccagtgggcactgaaatacattctcaggaaggaagtgtagctgaagtccagaactcagcttactctcactcctgggcctgctgctgccttaatgtgcctgctcctgtgtttttgttctgataaacacgtatagcactttcaattatgctgttacttacagctaagtaaagcagtactaggtggatttgtcagtgccacttcctacaaagtgaaggctggatttttgggggactcatttccagcagccaccagcaggtggagggagtgagatgcgtaaacaaactgtccctcatgcttggtgtttgggcagatgcattgctaaagcgtgctcactaataaatcccctgctgatatggcacaaatatttatagccgatgattgatgtgaaattaacaaaaactagcagttgacagcgatatgaggtggcaaaggctatttgggaaagtttccgttgtctttgaaaattaagaaaaattatacgtttacttgccttgctaagaactgtttaagaataaatcaacataaactagggcagcttcttaaactatgatggagaagcacaaggtcaaagtgtttcgtctcagaatgaagcagtaatgtattactttgcgtactgtgtacaggggccggcagatgtttctgatgttatgaagctatgctcctggaagtggttgtgaaaatcgcagccctgtgaattgtgtgccctaagagccagctgtgctcctaacagtgatgccgtctttccatggaaatcacccataagcacagccttcagtctaacttcatgtcaagtctaagtggcacagctatccatgaacactgtaaacattcccagctccatctaaggtgattaaacggagtcagaacccggccatggatgtgtattcactgttatttaaca

SEQ ID NO: 99309 - DNA, 1243 bp, Homo sapiens
ttatttagaagtttggtgatgtttttgtgaccagaaataagccataggagcttaactcttgtttatatcaaattaccctatgggaaacttggttgcattgtatgtcgtttcgtttaaagttgctgtttccaggaacctattggtgatgtgaagtgaggacttactggatgacgtgaaactaattttaactttcttttactcatcatcctgggattattcaagtataaactcagaattgccaaattaaatgcaaagatatgaaaaggagccgcttatgctaaatgtacagatgatgcgtttttgctgtaacggagtcgtccctccgggtgctgactgtgccactcagcatggtggcccagggctgtgtgtttggtgcacagtgggacgtcttagtcccactacctcagccagactcctggcaaagtctttattttttaagataatttatttttagattttattcaaaatgaaaacccatttaaaaagcacatgagaaatgagttctttattcactcatctaaatatttagggctgtggatgggctcagctgctttaaatatttggctgggcagatgagtgggagcctgtcttcctcttgttgacatttgcgtctgtggtggtgtacacagatgagctcactgctgtcctcggagcaggtaggaatgtatttatttactcgcatgccttcagatgcttgcagtaagtccatttgagatgctgcttctatttttccttgtggagaacttacttgacgccaacaaagaaatttctagctgcttgtagaagacaccccagggtacgcagccagtcccttccacgaatgctgcgagaacccacacagctgttcatttcggtggccgagggcctgtgggctgcagtacgtttacactgtgtgttgggggggtggcagtgtgctttcttcctgccccaattttgcccaggaggagtctggtgatggagaaggtgtggcgggcagcaaggaggctggggaagtggatgctgcagggtgagctctgggcgacccaggaggaagtatttgcatgaattagccacacgcagagggcagttatgtgtgatgtgggaaatgactgcaaagctatcttactctttattccatagccacaaaaataagtttataaaaagcccccaccaagtcaggatttgtccagaatggtcactctgctttggagaactgcggatcccctgccatggcccatgtggctccggaagttcctgggagtgg

SEQ ID NO: 99310 - DNA, 1023 bp, Homo sapiens
ctggcccatcggacacacttcttactgatatggtttggctgtgtccccacccaaatctcatcttgaattatagctcccataattcccacgtgttgtgggagggacccagtgggggataattgaatcatgagggtggtttcccccatactgttctgatggtagtgaataagcctcctgagagctggtggtttcataaggggaaaccccttttgctcggctctcgtctctctcttgcctgccgccatgtaagatgtgcctttcaccttctgccatgattgtgaggcctccccagccacttggaactgtgagtccattaaacctctttttgtttataaattacccagcctagggtatgcctttatcagcagcatgaaaaacgaactaaggcacctactgtatttgttttcttgtctgtgcaccactgcggaactgtgagctcccagagtgcacagatatgtgccagacaccaagatcagaatgggtgcttcgcagtgctcaatacattatttattgaatgacttaatgtagaatgactagttacacagttcaggtgctaggaggcagtataaaagtcagagagcaaatgctttaagaaactgtagtatacaccaggaaatgcaattctttagttagataccttctcctttcagtaaaattatgttcagtgctgtaaataggcaactttcagtgatttgtttttcaaacaagtggctttttatcttttcctcttgacagtgagtgtctctccatgtgtgaagtattttctcctctcatatctgtgaagtcctgcttgtaagtgtttcggttatgcaacatttcatggggaatttgagcactggaattcttggtcgctagttaggtgggtcttaccgcatttgtcagaaaggaatgcgtccatcaggttggttgacgggttggttgacggtctgcaagttgcagtcttggcacaggcacccatcaaaatgacacacggtgactctggtttcttccagcatccccgagatgaagatgaaaaactgttgc

SEQ ID NO: 99311 - DNA, 1114 bp, Homo sapiens
tatattcatgcaatctcacagttatgtggaaatctagctattatacagaattattagtctacctttagggctccccacagcaacaagcaaactcacagagcccagggcaggaggagctgttctgacttcaggcggccttgccaggagcccgttggcctgggtggagcccgttggcctgggtgtccactgtcagaggatggagattgatctggggttacctttttcagcctttgctttgtttgtcacctgaaggggctggatcctgagccctgtaaggcccccttcggctggtgcacacaagaggacagctttgagcctccaccaaggtctctggattccactttaagtgcgggcttgggtgtgggaagctgcaggccagcctcgagggcagcctcctggaggtggaagggcagcggggcgcgagactgctgcgctggtgggatgcttggattcccaggccccaagtcactatcggggaacgttctttgaggtttaatagtattttaggattttttaaaggatagataatatctagatgttgtgttctaccaaaacaaatattgttcttttggaaatatgttagaccaaaaaaatgcatctagatcttcgagttttgacttggaagtgcctcaagtgagcgagtgcctgctgtctcagacatgaggtggatgctgaagagattacccctgacttcatagtctgcctgtctcagagcgtgggcgggttggcatcgtctgcacgttgaccgggtcgtttttagctttgcccacttttcatttttggcttcacagagtgatgcctctggagcatccccttgcggagcctcagcatctcttctctgcttggcccacgtctagcagttcttcttcatcttgcagggaaagtgtgttggcaaacatgctggatactgtcagaatcagagcaggctggatccatggccgtattctgtaaaattccattgtgtctttttttcccccaagtaatctggctctgggaggaaactcgctgattggagactagctgagagggcttggctgggattctgtgggatggggccttcaggaggtggagccgccccaggccatggagacctggagatgctcagggaaggggg

SEQ ID NO: 99312 - DNA, 1020 bp, Homo sapiens
ctcttcattctccttaaggagatagaggccagggaaagtgtttttaggtaaataataacgccttcttgcctctctccctttatctccccattctccctgaaaaaactacaagaaatggtaaggaagagaataaaagaggaaaataaatcacagataactagaaccactttattgctattattccaggtgatctactgataaattaaaagaaagatgaatataagctggtaattactttaaaatattcctttgtgaatgtgcctaattggcgcgggcctccctgtagaatgaggctcctcctgcagttcgaggagaggctgtaattaacagtgaattagcatatagtggcgccgtgtggcccgcagggtggccttgtccatctgctgtgtaggggacttaggtgacacctggctagtggtagtctgcaagaaccctttgttaatgggaatattgtgcatgagtcagaattcagaatctttggtatggttttttttttttcccccttttgtgtgttttggccaaatactcaaaagcactaagttttcttgcgtggtatctgttcatatattgattcaccaaatattgattgtacatctgcgaatgtgctagataccctactggtgctggtgagcagaaacaggcaaggtctttggcctcagggggtccttggagtctagaagggatggtgacattggccagagtcaccccataatcatacagttagcagtgtggccagcgtcacttaaagcggggaggtggctggtgctggagcgtgtataacaaaagtgggatccggaaagggctgctggcgagtgggagttttctagggagccgctgctcttgcttcaggtctcagatggcataggagtgtgtgtcatcccagaggagcagcagcaaacggcctgtgatgggctggatgtatttggggagggaagaaggcagttgtagctcaagggagagaaaaggcaaggagaaacatggcgaggggtgggggctttgctctttagcccgtgagcagtg

SEQ ID NO: 99313 - DNA, 2074 bp, Homo sapiens
agtggttttcctggcggtgtggttttttaaaatttctaataaaatgcaaatgattacagccccttccatgaagagtgcaagtacgcctgactcctccgcgcagggaatgagcagcctctgctccttcatttgattgctatgacaacccacagaggtgggtgttgtcacttccactgccagccagcttgcacggtccagggacgtccccaccctcggttgggttgtccagggtcacatggttgggagtcagaaccagacttcaaagggcatgtgactacagcatccatcctccctgctctgcctcgcactgccttctaatgggtcccactgaggagcttgccagtattgttacaattggagtgatctcatatgaccaaaagttggaatgatcccattctttactcacagcctgagctattttttttcaaagcattatctctctactgtttgtaggcagagaatttattaaatcttgcctaaatttatccgtaagcatggatcaaatgcacatttggcatgattctcatctctgagccattgcaacctattttttaatgccaagagaaagtattttaaggaagtggggtcagctttcctctgctcccctgacttcacaggatagctatgcattttgcctcttggggagctgggttattgtgaaactaggtcaaattattgttttttctctttatgctcatagccattccaaagacagaatcctttcctcaaaaaatgaatttttgagtgttcctatattcttggggatgaacttcaagggcagaaaataaatgaaaggggattactttgacagcatctgaacaacagaacaccttctgaacagcacaaacacttgtagcaaaattaaaagaccaacaaaaatatgtattacatatagagcattgtcttctatatgtaaagagttcttataaaacaataagaaaaatatttcctaactaaaggaaatggacacaaaattcataaaagaagaaacaaaggagcaattaagatataaatatatttggctttgttgattaaagagtaacaattaaaatgacaggtgacttctgggccggatgcagtggctcaagcctgtaatcctagcactttgggaggtagaggcaggcatatcacaaggtgaagagatcaagaccatcctggccaacatggtgaaaccctatctctactaaaaatacagaaattagctgggtgtggtgacgtgcacctgtagtcccagctactggggaggctgaggcaggagaatcacttgaacccaggaggcggaggttgcagtgagccaagagtgcgccactctactccagcctggtgacagagtgagactccatctcaaaaaaaaaaaaaaggtgacctctttcttttcatctggttaagttcagtgttaaaaacaaaggcccagtgttggtgaaggtgatggaaaatagttccccttttacattttagtgggaaaaatgtaaattgagatagccatctggagagaaatttgtcaaacagtaataaaaaccctaacaatgtatttgacctctgacctggcaatttcatttctgcctatcttcttttaaccctagattgattaaactcgttaaataaaacacatttgtgggtatagaaaacttcataggtttctggcttcctgccccacctgtggtttcattctgcccagttgtgttcaacttgaaaacgcttggtgcctagcacagagtagacccttaataaatgtttctgtcctgaacagatttaaaaacaaatagtgaaaacaaaattctgaacgtatgattttaaaaatcattttgtagcctaacacttaggaaacgtacttttttgttgcttcgctgaagtgaggaggggtgtatcttgtaatttttaaatgccattattaacttccctagggatgcttgtaaaatgaacaaacgtgcatctttaaattttttttattttttttttttaagcttggaaagagttgaaaagtcaaagtcacatcagctctctagggattgggctgggctcacattttatgaatttgctgtaaagaagggaaacatttgctttcacttttggc

SEQ ID NO: 99314 - DNA, 1049 bp, Homo sapiens
gggctgaagtgggggagctgggattcaatcctggggctgaagtaggggagctgggattcaatcctggggctgaagtgggggagctgggattcaaacctggggctgaagtaggggagctgggattcaatcctggggctgaagtgggggagctgggattcaaacctggggctgaagtgggggagctggtcaatcctggggctgctggagcctaggatctagagtgcagtctctggcctggaggagagaagaggctccctgcagatgcagctcttttccccatgtccacccctttaatttcatgagcatcctgggctggctgcactagaaggggacaagattgccaagaggcggccagctgctggagatcagcaacaccagcttcggcgcccgaattgctgcacattgtcccagcagctcaagtgtctacctcctctgatagcacaggtgtctgggcaattctgcattgcaacaagggccctgttctacttttttctgcaaggtttgtccagagtgcgcagccagactatatgctgggcttggttttcctgagccttggccactgctggcgccccgatcccgggccagttgttcttggtggcatggctgtcccaaggagacacatgttactgtctctgtagctgcctgtgcctccaggtgtggtgctgccttcctgggcctctgcagcacctgccctcggcccccagggaccttctttgtcacagctgaagccctcgcatgctggagacttgtcattcttctcctgccgggcatggatgctgacaatagaactactttccagaaatcagcaaatgctgggctgtgccttcaaagtatatccaggatgcagtggcttcctgagccacctcagccattagcaccctggtcccgggcagcagcgttgcttggcggattactgctcacctcttcaagccgatgctgctactctcctggacagtccacttgcccagcagccaggggcatccctgagaagccgggtcagagtgtgatgccctctgccaaaacctcctcctggccctcgccttctgcca

SEQ ID NO: 99315 - DNA, 1078 bp, Homo sapiens
gcctcgttgtgtaaatatcggcaaaccatgttttggggatggaaaattagttaatttggagatggtgggttattagacttcacttggtctgcacgtggtggctttgggatttgctgcttcaaggtttcaggatgacacaagccatcgggttgagtgtgtttgtttcagcccctcttgctgagcacttctctcttcctgttcctgtgctgctgggccttcacagcatggtgctcccaagctagttgctgaagctgtgggccattgagccagcctggagatgcatggtaggttagggtgctgtgttgcaggtctgtgatgcagttgccatatattttttgacttttggatcttcactcctcccctcattttggacattttctcagaatgaatgatacatctctgctttcagcctccctaagccattaatttacatgtcagatttttttgagtattgtagtttttttcaatatttatggaatgcttagtatttgtaatgcaacaaaaggtcagaattaataaggtgtagtgcccaagaggaatattttgtttccattttcaagatgattccaatttgagctgtctcctggagaagttggatccatttgtgtttctgagtgtgcttgtaagcagtcttaggggatctgtcactgcttactactaacagaagaacaccaaaataaggccaacctgctcccaggctgaatccaggagagccagtggccaaatatcagctctgcagccaccgttgcaagtgagactttgtgaaaggaaacttctcaccattaaatgtacattttatcttaaccgttgaatgtacaggatggttcaaatactaaaaactggagaaaagaccatgatggatgtcatttctccctgatgggacattttaccatatttgctttctctgtatgttgtgcgtgttggtgtttatggaagaaacacctacagatacagtggaagtccccttgcccccttctctgttctgttgaagatggtctgtctttcccatctggatctctttcctccgctacttctgtgtccttagacagtagatggtgctctgtgtgcatgaggggaa

SEQ ID NO: 99316 - DNA, 1052 bp, Homo sapiens
atgggagggaggaagaggttcccttaggagcatgaacttaggaaaggaaatggtgcgtttggtggaaaagaaggggggcataggctgaattgggacagtgcccttgactgacacagggagagggtctgagccccccatgcacttactgggcaggcttccccccgaagcaaggtggacctgcttccagtgggaggagaagggggagcactagagccctccgtgagaccattgactgcactggggtagttcagtggtgagcggatggggagaaggcagggccagcccccagcacacgtcaggcactgtctgggcacctgtgcattgctgcctacagtcctttcagagactcggcaactcagcgagagtccctcacttgcctgtgagctgctccacttggtggaggagctgctggggcagaggatactgagcctgaccactgccctgtgcttgttcctgtccccatggaggagcactggacttgtccaggggcacctagcagggatccagggacccaggcagggccggaaaggggatgttctttgcatggatttctgggaatgtacttggcagaagggaagcctgggagtgagctccaggcagaagaacaagcaggtggaagtgcccggttctggaagagcccagggtatctttgggggaagatggagacaagatttggtgggtccttgaatgctctggaaagaagggggagccattgcccacctcttttttttttccataggttattggggaacaggtggtgtttggttacatgaataagttctttagtgatgacttgtagagattctggtgcacccatcacccaagcagtgtacactgcaccctatttgtagtcttttatcccctgcttcccctcccatccttccccccaagtccccgaagtccatgtatcattctttttttgtttgtttgtttgttttttgactccgttacccaggctggagtgcagtgctgtgatcttggctcactgcaacctctgcctctcgggttcaagcaattctcctgccttagcctcccgagtagctgggattaca

SEQ ID NO: 99317 - DNA, 1020 bp, Homo sapiens
gggccgggcgcagtggctcatacctgtaatcccagcactttggaaggccagggcagggggattgcttgagcccaagagtttaagaccagccctggcaacatagtaagaccctatctctacaataaatgtaaaaaaaaaaaaaaatagctggacgtggtggcgtgtacttgtagtcccagcccctctggaggatcccttgagccaggaggtcaagactgcagtgagccatgatcatactactgcactccagcctgggtgactgagggagaccctgtctcaaaaaaaaaaaaaaaaaaaagaaagaacagaaatcaccattgataatgtggcatgaatagacttcatgacagacattactccagagatttttatgatgctttattaattaaagtatcatcttcaaagcagatgttaaccacttcatcactgtatacaaaatgtctgattacatttaatttttttttccagcaggatggaaatgcattaagatgaaactttaaaaatataggactgtagaaagattttgtgccaaattaaacatatactgaaacaaataagttgttttttgaaaacccagggagctatcacacgattgttaatattttagtggaattcctcctaaacgtctttctgtacttttttttttgagacaaagtcttgctctgttgcccaggctggagtgcaatggcactatctcagctcactgcaacctctgcttcccgggttcatccaattctgcctcaacctcccgagtagttgggattacaggtgtgcaccaccaagcccagctaatttttgtatttttaatagagacagggtttcaccatgttgatcaggctggtctcgaactcctgacctcaggtgatccacctgcctcggcctcccaaagtgctgggattacaggcgtgagccaccatgcccggcccctgtacattgtttttttaaagatgtttgagatagggtttgtagccttattaacacattagcatttttccgtgtcgtgttgtaatattgcacatc

SEQ ID NO: 99318 - DNA, 1047 bp, Homo sapiens
tatgaacacgagtgacagccagccgcagcccgatcaaaacaaagagccgctgcacgagaggggcagattgcggaagcatattgtgaacacattctctggtaactgtgaatcgtgtcgtaaaacgcgtctttggcctgtcaaaaatattttgacagggcccacagtctagctccttcatatgcaaatgcactggtaatgcctggataccagggttacacactcagggaaaatccacaggacgagggctgatgttagcagggttcattacttctgcaaataaacacgttgaagagcctccttccagtgggtaaatggcaaactcgataactggaatgctgtcagatcccagggtaacaaaagggtggtgtcccctaaaggcttggaaggattgagttaggagagttcaactgaaaagtcaagcatggcgcaaggaaggacgatggattagccaaccatgaccggccaggctgtgcgagctagccaaggagaggccacgaggcgggagagccaaggaggacagcctccgggtgggccatcactgctggtagagagggtttctgggtcccaggaccggactgcgtggtcctggttatacctgctggtcaaaggtcagtctgccaaggcccctccttgtgaagatggacactgagggcacccttcctagaggacctatttcctcttggtgctcttctgctttttgcttcttccctgggcttgctttccgtgtgattctgggcaagttggttaacctctctgtgcttaggtgaccttcgatggcacgggggatagcagtatctgcttcacatggtcagaaaattctgtgaggtgacacacggagccttggagctgcctgtggcaggtggcggtgctaattaagttccggctgttgtgacggtctcctcggctgggtggcccttcctgctgtcaggtgtggccactctcgtgagatgcaactggaggtgttttgtggcagcttctggaaggcctgcctttgacccttcctttctgctttttccatctgttacctgcatgcatatatgatggctg

SEQ ID NO: 99319 - DNA, 1544 bp, Homo sapiens
gtaggacaaatgttttcctttccgtgctttaaaagtctcatcttagaccgggcacagtgactcatgcctgtaatcccagcactttgggaggctgaggcaggtggatcttgaggtcaggagttcaacaccagcctggccaacatggtgaaaccccgtctctactaaaactacaaaaatgagctgggcatgggggtgcatgcctgtaatcccagctacttgggaggctgaggcaggagaatagcttgaacccggaaggtggaggttgcagtgagccgagatcgtgccagtgaactccagcctgggcaacaagagcgagactctgtctcagtaaataaataaataaataaataaataaataaataaataaagtctcatcttatggagcaaaagattctaaagagaaaggctggtcctgaatttcatccagcttggttctggtttcttctcctttcttcagcgagtgcagggcctttatccttggggcacctttctgggactttatctggctgtgtgcagacagacaggaaagtgtcccctgcccccaatttttgggatgaccactaaaaaatgaacacacccactcagggagcgtttgtgggatcactgaagtcaaataatttacacccaggagaaagcccttcgctgtggatgtgttcatgcctgtggaaagggaagttggctatctggtctcgaaccctcagtcactgtcagggacggcagagaactcatccagaaaccaagtgttgatgtgaagcctccccttccagaggccccccagcgtccactcccctaggcatccctcacttctggaccctccacatcagcatcccatgacattgggctagactcactgttccaggactccgctggcccagaggtgagtcggcctgaccaagtcgtcgtgtcatcacttgttgggggttgaagtcctaacgcccggtgcctatgaatgtgatcgtctctcagaatggaaataaggtcgtcgcagatgtaattatttaggatgaggtcatgccagagtggggtgggcccctcatctaatatgatggatgtccttctgagaagggaaatttggacgcagatgcacagagggagaacatcatgtcaaggctgcggtaatgcttctacaagccaaaaagaatgccaaggataaccagacagccgccagaagccaggacagaggctcgcagcagaccctccctcaccgcccctaaaggaacccgccctgctgacgctttgatcttggacttctggcctccagaactgtgagacaatgtatgtctgtttctgaagccactcagattgtggcactttgttagagcagccccaggaaactaaaacgtcacctgactcactgtgggattcagcatcttgtacgaggcaggtgccactggtctcagtttctttgtctgtaaaatgaggctaagacctgctttatacagtggtagtgacagtttgcccagcacctcctaggacctcaaaatgtgactttttttaaaagacagagccttactctgtcacccaggctgggctggagtacagtg

SEQ ID NO: 99320 - DNA, 1844 bp, Homo sapiens
atggaaaatgttatttcactttattaagttaaaaacaagttataaaatagtaggtcacatataagctcagttttgtatttaaaaaccctcaaaactgtatatatgcccagaaaaaagacaggaaagaaagataccacagtatgaatggtggttcccaattagtaggagaactaggagccatcattgtctttgctttccagagaataatagcgtggtgtcctggagtcacatggctgctctggcttgccagtggagaacaggctgaggccggaggaggagggagcagccaggaagctggttacaacccaggcggagggctggcgtgggcctcaggggtcttcagcctcagcactattgacattttgtgccggataattatttgtcctgtgcatgtcaggatgttcaggagcatctctggcctctacctactagatgccagtaacatctcttccagttgcggtgaccaaaaatgtcttcaggcaatccagatcaaatgtccactggggggcagaatcacctgctgagacccactggttaaaatagtgtcagtaggggtggagagaaggggacaaaagagtcttagagccatttgagagggagcttctagaggacttgatggatggaatttggtcaaggcaggaatgagggtggatgtggggcatggggaattggacggatgatagtggcccacaggttgagagaggggatgggttcagctttggccatgctgttgtgagtctgtggttcccagggagcagctgagtaggctgttgggtgagtggttctcaagctcagagctgagctgggggcatccatttgaaggttatgggaagatggaaagcacgccctggaggtgggtgggtgagctcacccaggaccacggtgtggcctgagaagtcggcctgcgatagaacccggggaatcccagtgtttccagggtgggcagaggaagaggaggctgggaagggaatttgtttctctggccagagctgttgctcagcgactgttggctggtgaggatgaggctcatgaacagatgtggaaacatcgtgggatgatctcatggtgggtgggacttgtcgccgtcatgcactcagcactctctggcctttattggtcaagctgcctgctgtgtttctggtgcccaaatgttctgggcacactgttgtttggggaagaatcgcagggactctccttcactcttagatagtggcagcgcttgcctcgctgcatctcgtgttctcaaaatcagcacatgccatcccacattctagaccatccagttttgcttctcaggctctgaaaaacacttttaagagcaggttaaactgttctcggacttctttttggattatttgcaacgtcttgaggggtccacggattgatagagtcagcagggatggacagtttccccttcagcacctttatagttgtaatttgcccatgatggggttagagacccacagttgctcaaaagcagtttttgtttttcttgatagctggatttgggttatctctcaggaagcggttagcagtctttagggcaacctaattgcatttctttgtttacaagcacttaacttcatccctctcaggcgcacaccagcactgtctatcactaatactggcagttctagggtgaggtggacagttgctcttagtcagaaactcactttgctgttttccactagattcccagatagagaaggacagttgtttcaggcaagcttaagaccctgtaacatttcttgccctttttgatttgaactcccatctccctagctctggcttgttttaccctgcagttaaaagagaaaatgatctctactggctatatggcctca

SEQ ID NO: 99321 - DNA, 1113 bp, Homo sapiens
gctttcactcatttaggtgggctggcaagcagtgctggctgctccacctgttttcctgcctaataacagtgtcttttatagttgtctgataacaatgtcttttataatgtctcataactctgcctttttgtaatgaccggcctaatacctttgcctacaatagttcttttttcctctgggagtttaactcaggttgtgattagagagtatttcccataaatcacgcaaagcacatgtcctgcccaccagccaattacagaaatggagttggtcagacctacactttatctgaaacaatgcataatgggagttttgaactaaaaaaattaccctctaatgttacaaatatgattcaggcaaataaaactgcagatgtatgtgtaagtcctcagtactgcgattctttctttctctctctctttctctttctcctccctccctccctctcttccttccttcctttttttttttttttaagtgtcctggttgtgttagggtaatttgtgatttaaaaagaaatgcctctcctctccccgacccgatttttttttttcttttttggtaggatgcctccctttgcattccaaggcagcacttcaagcagcactttggtaaatgtcaaaaagttggagaggctgagtgggttgcgtggcccgtctgtgcctgtgggctcctctcccgcccacgcggctgtgcctctcactcagaaccctgcctctcttgtgtttgtcccaaggctttactttcccccccacatacgttcagtggcattatttgttacatttttaaaaatacatattttatttatttcacaaacaatgttactggcataatgttaccacactataggatataatggttgaagaatgatttcccataatctaatttcaacacattacctgattcagtattctgtgtcctctccagccttgcttttctctgtgcacaggtatgacctgattccagtgctttttaagaattattagcattttctgcattgctccttggccttcacagttatcatttgaacagtggcacaagattctctgaaactgctcctctgtcttcattcccattttgtgagcatttaagccgtttactgttgattgtcca

SEQ ID NO: 99322 - DNA, 1069 bp, Homo sapiens
acctgtagtcccagctcctcgggagactgaggcaggagaattgcttgaacctgggaggcggaggttgcagtgagccgagattgtgccattgcactccagcctgggcaacaagagagagactgggtctcaaaaaaaaaaaaaaaaaaaaaaaaaaaaagaaagaaagtttaaaggatgttaaaaattttccacacattatcttttaatgtgttgtcaaggagcaatgatcatcataatggcactggggaaatggaaaaaactggaaaactctcttggtttgacagaaagggatagatctaactgtttagtgttgccaagtgagcccccaaacatctcccctggaaaagtcattaggaatttaccatctccatctgcaggggccaagtgagataaccgtatctagtatatccatctgagcaaaaccctgtttctcttcccttgaataggaagccagaaactgctgcagcgcactgttgaaacatagcttagaaatagatactttgtggggggaaaacaacctacttatctttcccattatgctatctcttaatagggcccctggtatctgagccagcatacacatttggttcttctgtgtcctgtgatcttcctctgagtgaaaactgattatctactcaaaggaagcagatgacagagcccccgtgatgtgtgctgcctttgctctgtgcctctgtagtaagggaggcctggaatgagcagaaagatggctcccctggccacaaaggggggtcagtctattgcaaagcagccttcacgttctggaagcagggagcagtgggagcccgggaaggtcagccttgcagacttgtagatgtcataggattatttgagctgcttccgctgcaggtggttgggaagtactggatggaatccttggaggcgagatgagaggatgggagaagaaagtctggaagaacagttagatttcttcctgattagataatactgagtgagagtgggaagaacggagcggagcctgttgccagcgcgatctctgtcccgttcactgtcatgtggcctcttcacggatgtgtgtgtgtctgcaggg

SEQ ID NO: 99323 - DNA, 1050 bp, Homo sapiens
caatagatggaaagctggaaagtgatgtggcctgaattcctttctaggtaatttcaatgttggtcatgcccagggatctccttaagtgttgcagaatcacacctggacaacccaggtgcccagtccttcattgcctcatgggctctctagtcttacttttgatcccttttcctgtatttcaccagtataatactccccactcctagttgggaatatctaacctgtgttgagtacctgtatctgatgagttagtagctgtgaaaacgtttctctagcaaggctgcctgtgagtgggatcccaggccaagcagttaactgcgttccagcgaagcaggtgccccgtgtgttgctctgcaagtccacatggagcaggattccttattttgtgaagaaaggatctttagtgccacgtgtgtatttttaacacatttccaaaagcatgatttattcaggattaagtttattcagtagaaatttccaaggtatttttttaagtgaggcaccatcctggatgctggggaagaatctttgttggaatatgaccctgggttttgtatggaaaagggagggggcagtgcaggatgtggcaaggcagttgttggagctccgatacttccaataagtaactagcagggctgtacacactctaccaggaaagacaaagaaatgcagagtccagggaagcagtccatcgcacgtttcttccttccctgcaagggcactggagttctccttcaccaggaagactgcagcccccattctgattggcctcagggggccgctcctgctgatgatggctaatgaggacaagcagtagagaatattgctttcatttatcttggtgctttgtaccttgatggagacagatattcgggtttcaagaagacaactttttttgcagggcaggcattgtttgcttgttttaaggctacgttcagaagcacgagaacaaacaacagtttcaagcctaacacttgggtttacatgaagctaattgttagatatgagttctaaatttcttttcaaagaatcagtatgtcagtatgttca

SEQ ID NO: 99324 - DNA, 1091 bp, Homo sapiens
ggggtcttacaggagccagggacaggtggggccatgtctggagtagacagtgatacagtgatgtcccttggcctctgctggacagagaaggaggcgccaggaggcagctctgagttgggatggaaaggatgcatgacagtcagcttccctacagctggaggggaagttccagaaagaaaggatggccaacctgggacttgtgggcagggaaagggcttttggaggccaagattgtagggcagtgttatcctgggtgagttggggtatggccataggagggggctccaggaattcagggaaggaaaagaccatggcgctgaggaggcggcacggcctggccctccacctccaagctgaccaccctactcagctcctttagggtggagtggctgtaaggccgtgaccaggaaaaaagggacccagggtggtggcacatgaatcccagctttgtgtatccactcagttgcatgccaggtagtcacatcttaacttgtggcgcggctttagagagtgtctgtgcaggctgcctctgatccctcagtcagtgtgcagagctgagctgatgaggaaagtcttggtatgtaaccaaccaggtctcaccttcagccacactcctagggacagagtgcgtccatggaggggaggactcacagcagttttgaagtaatgtagattgtgtggccatcccaatttagtttatcattcccctacttggtctgtctgccttcatggaagttggtgatttttttttttttttttttggctctgttgcccaggctggattgcagtggtggcatctcagctcactgcaacctctgcctcctgggttcaagcgatttttctgcctcagcctcccaagtagctgggattacaggtgtgtgccaccacacctggccgaagttggtgattttgaacagaggaaagatagcacagtgtcataactcagcaaaggtgctcagcagctgcaggagttggggttttctgggctcacacccagcctgtgtccctcatccccttgctccgctgcaagaacccctcaccctgctcagtgctcctggccactgctgactggtgcatggcgagcagaggtt

SEQ ID NO: 99325 - DNA, 1065 bp, Homo sapiens
gtcgtgagacggtggccaaagcatctcataaacttggaactaagggagcgaagccagctgctgagggtgatgaatgggggttagctagggctggcacctttcctgaactctcctctgcagtcttcctctctcgcgcagcattagtccctgcagcacggaggcattacccggctgctgtttggttttgaggtagcagtgaaatcaactacatgctttaaaaaaaaaaaaatggtgatatgctccatggcatgaaaaaattcaagaaatggcagtctagtgtttaaaaagccacaggaaaataaagcataatgccacctgaacatatatagtattgtgatttttttttcctcttcaaaaaaggctggtctggctttgtagaaggggatttagattttggagtgacatgtcgggagcatgtgtcttctttgcatcgggagagcccatctctctaaggcagtggggaaaggcaattctctgtgaccaggtttttcagcacccacagttgcacttgacatggcatcattatgactggtgtggaaaataagtgcttccttctgaggtggaaatgctgaaagatcacaaacacactggctatggctggaagaggttccctggaagagtcagtgtcatctaaggtggatggaatggattcttctactccgcagcccgcatctcatatggcaaagtgcaaaacctgggatggattctcaacaaaggtacagtaattgggagacacaaacagtccagtgttttagccctgaaggaatactaccttattttttactttgggctctatgaatgcttcagataacaagccagatagatttacataccttaattatggacaagctactttcatattaaagttcatctcagtatgtgaacattgccctggtctcaaacagtgagaattgacctccccctcccacacctggctaagttaggagcccagggttctggtcccacccttgacagtagcagagatctctatctttccacgttgctgtttgtttctcagcttacagacctgggtgacctttaagtctgtacagctgcagtgataaa

SEQ ID NO: 99326 - DNA, 1031 bp, Homo sapiens
ggctcgccggtcgccgccgcacaggtgcggctgcctggatgggagaagccggcattcatcctggcgcccctccctgcctcgagtcgtctccctgttagtgctaccatctgtcagtgttgtgatgtggactcagctgactccgtggccctcggtattgagctggctgtaaggacacctcactacagtggtggggcctggggtgggacggaggcccctctctccacagctttcctgccaggtggcatcttaatgaggagagcgagtctgggactggattctgtttcctcataatgtaggctagcaaaagggcaggaaaaccgcagccctgcagcctgttctgaaacctcaggtctgtgttcccttaagtcctcagacagggactttgcatggagggatctccagccagatatgttattctctgcaggaatcagttaaccttttggtagcatttcggggtcagagcctccagaaacctcaaaacacagactccatcaactgcgcatcaccctgagggggattctgggggtggaagtggtgctagattgctacaccttattctcctgggagggggttgtatgcctgaagatattgtggccacagacaagaggccatgcatttttaccaccaaaaaaaaaaatattattcatcctcttatctgaattctttaacttggctggtacagataaaggtagttggagagtgggcttttgatttgcagttcagactgctgtgtaacccacctctggagagggtattcatcccaagtggacttaacaggtcagctgactgcccctagggtttatgttaaaaccaactcatgcaaataaatgactgtccttatggaaatatttttaaggtaaagtgaagataaaatggtcatgttctaatatgctcctaatgatcctcagaatgtgctagaggatggttgaaaccaagcagtggcatgtgcggtaatgttaaaatctgacctgtttcactagtgaggctacactgttgccacacttatgtttagcttgtcatggcacatctag

SEQ ID NO: 99327 - DNA, 1061 bp, Homo sapiens
tttaaaacaaacagccttcagtggagaacgtgaggacacagcaattaaatgaaataaaattactgaaacaatttgataaagtttgatttttaaatttgatttgttactgaaaaggacactttttgttggttggttggttggttggttggtttttttttttttttttgagacagagtctcgctctgtcgcccaggctggagtgcagtggcgcgatctcagctcactgcaacctctgcctcccgggttcatgccatgctcctgcctcagcctctccgaatagctgggactacaggtgcccgccaccacgcccggctaatttatttgtatttttagtagagacggggtttcactgtggtctcaatctcctgacctcgtgatacacccgcctcagcctcccaaggtgctgggattacaagcctgagcgaccgcgcctggcctgaaaaggacactagtaaggaaactatgtaattcagtgtttctcatttgaaacattttgaactgattagtcttttgttattagaattgattatctacagtgttttgttgttacaattgaacattcctagagtttgcttgctttttgtaaattactccagatagcaatttaggaaactcctcattatttttgtttagggctaaaatgattctcctggagacagagcagttgtacttggggtacaaggaagagctgtgctgaacgtcagccagggaaccttctaagtcaccgctgtgggctgtgtcctgctgtttatttccttaggttggagcccaagtttcagcataggtcacctgttaacatctttctctttgataagtcatcaaagagacttgggctggaatatcctgccaccagggggaatgttcaaaagtacatctgctccagaggtcctccagtgttgacaggcacattgtagcaaattattgggttatacagttaacaaataccttttgtttggagctgtaagacccaattataaagcactagtagtttttgtctttttaatgcattaacaaacatatattgcatgtttatggtgtgttctgcattcactaggcagtgg

SEQ ID NO: 99328 - DNA, 1033 bp, Homo sapiens
cagacacatgccatcatgcccagctaattaaaataatttttttttttttttgtagagatgaggtcttactgtgctgcccaggctggtctcagacccttgagcttaagtgaacctcctgtctctgcctcccaaatgttgggattatgggcctgagccactgggcttggcttaggaaggctttttgaataattatcttcctcactcttctttccacccactctccattcaaccctgatgaaccctgctggacttcattacatttctgctcacttgacatgcagattgcagatcaggtgggcgggagctgataacattctcacttggcctcagtttcctcgtatgtccaatgaagggatgcaccctagctctaaaagtaaacattgttctcaacagaagaatctgggcatttgctatcaaacagattcccattcttcaggcagttaattttccacaccacaggagatgtttgtgacatttcccatttctttgaagtctaaagtagatattgatcctttggaaggagattaagttctccggttccatcaggtgtaatgatttcagttttagtgttcctaggtggggagtgctaacccaaacctttcatatgtaggaatgtcatccctctgcagacctttgagtccagatttcatttgtagttgacctttgggggtgacagtccgatatgtgtaaatcgtaatagcccttcatcgtagataccagtttaaaattcattttaggtgagtttccaaacagatatattggatgtatatcagtttaatttgataaacatgcagataaaaacttattacatgaggaccagtgtttgaaagatggcttacatgacctgatgagttttcattttgtccgtttccaaaatacacaggaatgcaggaatgccaccttcgttcagatcagacttatcttcttcgcaggatgtggccagagatttatttaagacattagctgtgatgaggaaggtcagataatttaagcaggggcaaagtacacattactgaggattcagcgctctttg

SEQ ID NO: 99329 - DNA, 1094 bp, Homo sapiens
cgcctcccttcccttccttccctgtcctgagtgtgacctccgtcatgttgacccctgcactcctgcccgccccccattcacccactaggagaaagtactggatagggatgagcttggggacaatggccagtgacatccaggagagggaacttagaggcaaggcagggatgcaaaatcggagttcctagtagaaacagacatgcagcatattgtgaaatgtttcagagaaataacagcatcacgatagcacattctctagttgctggttatctagttactagtggtaagacagagccagttaacaaagactataaagttttctcaagaggatgtaaaccaagtaaacaaaataaattcagaccccaagtgcgcatattgagtttgaatattcatctaagaagcttttgtacatgcgttatgtatccataagccaaagccgggggctccctggcagatgcccctacctggccaggtctcgtcgtgtctaggtggtgacagccatgtagatatgcccgctgccttgcacctgttcctctggcctcgcctctgtaacagaacgtggcccctgccttccatcttccccagggtgccagtggggaccttgccttctccagcactgggccgtccactttgctcctttgtgcctgcactgccaggtgcacatcgagcctaatctggcttaggaaacaggaggggcaccagctagaaaatgtgacccatgttgccaactcccaaaagccaccaggtgacttccactgccgttagaatgaaacccaaactctgcactccagccccagcatcaaaccatacttcgccctgctgcccctatgctctccccccttgccctccccccttgccttcctgggccatccttttctgactcagcctcagtgcctagccagtgggttcccctcgctgaccctcagccctcaggcccagcacctcagagaagccgatgactgacgtgcaccccgccagcctccctgcttatccttccctgccgcctcgtgtgtcctgcatggcatttgttacagcccgcagtcacaggtcttgcggtggacttgctggtcggctgctctgctgattctcgaagg

SEQ ID NO: 99330 - DNA, 1046 bp, Homo sapiens
agcttgcagatagccgagatcgcaccactgcactccagcctgggcgacagagcgagactctgtctcaaaaaaaaaaaaaaaaaaaattagctgggcatggtggcagtgccctgtaatcacagctcctcgggaggctgaggcaagagaattgctttaacctgggaggtggaggttgcagtcagccgagatcgcgccactgcactccagcctctgcaatagaacgagactccgcctcagggagaaaaaaaaaaagaaaaaaaggaagctgctaccttcccaaggacacttgctcctcctcgtcttgctcaggcatctcctgggcacctttcggggcaagtcctgctgtcactgcacagctcaccttgtatatgtggggtgctcttctcctctcctgaggagttatgggtgattaggaagcaaacgcgtctcagacttggagatcaaatgaagagaggctgtgtaagcaccaggatgcatggggggttccggcttcttcgcagtttcacctggtttaacccaaaggcaagcaacagggatgcccagggcgggtgagaggtgctgagcggagctccatagttggagaatgtaagtatttaaaaattcttgtgtctattttactattaaatagactgtataacctcaaaaccagttaagaatctttgacattcatggtgtgaaggatgagaagctgggaaataacaaggaccttttcctcgtgtttcctccttaattatgcttgccagtgttttaagcatcgaggctgaccttcgcaggcttcagggtttcagcttgatcaccatgtggatgtggatgagtcagttcactccataatagctcttagaggtgtagaaaggaactacttctttccatgagtgcacctttattgccctatcttatagaaatagtagatgctcatcgtaaagacttacaacaggattgaaattggtaaagagaaaaaggcaatcccctacccccgtccctcagagatagctgctgttgtcagatcagttggatattcttgaagacagcttccttcacgggtgttt

SEQ ID NO: 99331 - DNA, 1009 bp, Homo sapiens
ggaaatcactatcctctaagaagttacaaacctgcaaatcctctagagcccatttgggccggcaaacttttgccttgggatttccttagaggagaagagagaggacccagtcaaatgctgacgttgttgtgacagattctaagtcgcctcagggctcaggggaaagagccttggaattgcaggcagtggcgtggatgtacctgcaggggtgggcatggtggcatcttggtggccaggtgttcgtcaccctgcactgagagggcctggtgaatggcaaggtcaggggatgctgtccggacatgtcaggatgggaaactgtcttgtctgtggatctttgaggctgctgaaaaggatctttgagcctgaacttccagggaagcctgaaaccaatctggtatccccagggtttatgttttatttcatttattatagggattcaaggatttccaaataagaaattaaatcctaccattgaaactgtgctggtgaacttctgctaagtcctacatttgaaagtcatcagcggattatgtctgatccagtttgcagcgggctcttttccggctgcgttgaaatggatttctttattctatttaagactccacttccttcctcggcacagaactgacaggctgtggcagccacagcctcctccgatgctcctctcctctgtggatgtaccatctttcttccattgttgttttgttttatatttgggggctttacggctgctttaaactaaaaataaatgctcctccccttttctgtgctaaaaataatagttaaaatccttgtgacgtttaaggttttcaaagaaaattcccaatttctgagataatatgttgtttttaaaatgtcacctgcaatttcaggttcctttttttagccttgtgtataatttcacgagttttgtctggaatgcgtatttgtggttcctggagccaaacagaattgggggctgggctgggggtgaacgtgacacgggagaccatcaagtcattctaatatt

SEQ ID NO: 99332 - DNA, 1145 bp, Homo sapiens
ggggtgtcatcagctgggcccatctccttcccggtgtctgccccccgccccattcctccctgaaggtctctgggctgtctctgcagcacttgcccgtgggagacaaagcgtctctcagtcctagtgctgtctcagaagcctggggttccgcaagactggcctggaaagagccgcctctttctgtcttttgtgtgctttgtcaccgcggcactggcagggtgtcttaagcctattgaagccgtccaggaaatgtgcgttgaatgaatggcacaggcttggcaatgctgttaccaggagattctcagaacaatcccgcagtttccgttacttcctgttaagacagccgctgccactcgggtgctgtgatgggcacggaacagtagtcacggtggtttactggtggtgatggtgtggatacagcgctggctctgtgcgggtcgtgttctaagtgctttacaaaattacttaatcctgacaagtgccccatggggagggataggtacggttatccccatttcacagatgaggaaactgaggctcagagacatgaagaacctgcccaaggagccacagtgagtaagtgggggagctgaggtgtgagcctggagctggtgcttccaccaccgcactgcctgacagaactttctcgacggtaaaaacctcctgcgtctgcactgcccagtgccgtcacggctggcgccatgtggctgttgagtgattgaaacgtggccagtcagtgccatcaaggagctgcattttaagtttgattctagttcatttaaattgaaatagccacacagggccagcggccaccctactgccagcattacagactaactgatcgtcaagtattgaaccacctgacttggcagttcaaggtgttacaggttcagagagggcccacatgatcataccagcccataatcgaggatgcttaccaccaaaaacttgtgctctgccggtattttgaaagcatatgattttctggaatatctgcccagagctgtaggagacagttgcgtttgaggcagcatgggctcctcattctgaaacggactgtcttaaggcttgcttcaatttgctgacaccgtgggcttcgatgctgttggttctacagttctcagaacggtcctgtccctggcctg

SEQ ID NO: 99333 - DNA, 1049 bp, Homo sapiens
tgccacacctcgtaatacaatcaccttggggattaggtttctttgtttaaaattttatttattattttgtttttattttttgagacagagtctcactctgtcgcccaggctggagtgcggtggtgcaatctcagctcactgcaacctctgcctcccgggttcaagtgattctcctgcctcagcctcctgagtagctgggattacaggcatgcaccaccacagctggctaatttttatatttttttagttgagacagggtttcaccatgttggccagtctggtcttgaactcctgacctcaggtgatccacctgcctcggcctcccaaagtgctgggattacaggcgtgagccaccatgcccagccaggggttaggtttcaacatatgagtttggctgggagtgtgggggtaggacggggaagcacaaacattcctaccatatagttgaaggcttgtcagaggaggtgacatctgaactgatagtaagagtaggtttcggggaatgattgatatggaaagctttagttgcctggagacagcaaggcctgttaggatggggcttggtagctgattgactagaaggccaagcagggagcgggcagatgagaggcgggagggttgtaactggggtgtaagaggacaggaccgagcataggttttagaaaggccactctggctgatgagtagagagtgggagcggccaggactgggtgacagagaacatttggatccatgagccatcactcagacagcagaccacggtggcctgtaaatcactgagaaccttttttccacactgtcatgccaaatttgttctcttatatgtttgtttgttttcttttttgttgttgtttttgttttgttttgagacagagtctcgctctgtcacccaggctggagtccagtggtgtatctcggctcactgcaacctccgcctcctgggttcaggcgattctcctgccttagcctcctgagtagctgggactacaggcgtgtgccaccacgccttgttatttttttgtagttttagtagagatgggatttcaccg

SEQ ID NO: 99334 - DNA, 1068 bp, Homo sapiens
ttgatatctggaatagcgcagtagaaccatgaaatactattgaatttatttcttatctaattgttctgtcctttcaaatgtcctttttaatccagtgtccttcttatccattgttgctcctttaaatattgactggacattcctgtgatctggatattgaatttatacataatttgtatgtaatgttacttagtcatagataagagccttccgggataagacgttcagattaccaccaccatatgtttgagtatgtttccccccttatattataaacatttaataatcattttgcatgagagtaagatttttttttttgccattaggcatttgcttcttcagttaacatgtccatattttattttttgccttaaataaaattatgataatggtaggaagcatttagctcccgtgtcccctaacgaaggggtgtagttgacaagcagttttctaaatgaaattttctctccgtgtaactttgttaaatccaactctgagacactgaatttctggttccttctttttcttactggctgttccattctttgcagatatggatgcaggtaactattcattttcttcatggcagcgcttgtcttgttttggagagagaggaaaggcaccactttgtactgtagcgttcccttccctccttgttctgtgtaccatcctgttttgtttcattttatctttttcttcagttgaacattccaccctgttttgtcccttagttgtctttttagcagtagtcccaagcagcttcacctgttccctgtaacacctgtcctagcatttaactcttgtcctgaatactgcggaaccgttcggagaagtataaaagtggcttgaggctctgccaccgttttgcagaattgtgtagtcatgtcatgaacacctcatgcatcaggaagagaccttccatactgaaatgatgatctaggaagattagaggtgataatgaaggcttgtatgtaggggtcaataggagaaagcttgcctgttcactgagaaatgcatacagatgccagaaaatggcatgatttggagaaatgagcaaaggccacattt

SEQ ID NO: 99335 - DNA, 1022 bp, Homo sapiens
cagggctctgtccctgggttttgacggcttttatttgctcctttgtgtcggaatatgaattttagccacggccagctggtgacaccttttagagaatcttttagagatttttcctttgggttttccacttattttcaagggctagctattgtagaggttatacagaggttaactcacctgcaaatgaaatgaccaccttttctaagtaaatctactttcagggccctgcaactctgtggatttcaagctgggaccacaggaagttacatgagtcgggcctggttttgttgctgttgctctggcagtctctggccctggggttcaggtgtctggtggggcagcgctggaggccctgggtttctggagtaagaacaaggaccacgactcactcatggtggcctttctgctatatggctatttggtcatttttgtggcttttcgctgttttccctttgggcattcacagtgtgttccattgtatttgggcccagctgggatgtcttttgcagtgcataattgacccttacatgttgactcacaccaaagcatttctcttgaacgtttatacatcaaaaggaaggattgtggggtgacctaaactgatcactaacatccctgcttctttgatttttcaagtaatgcattttactgcactgaaatttcatagtattgtgtatggtttttaaaaatacattatttttaagagtaggagcgtgggtgagtaccttcctttcttcatctgcaaagtggaagtagctcatcccctccatggggccccatgcccaaggcttcctgggtcaggggaaagatcatgatccctgaccttttctcatgccctgcagcagccctccctgggcatgtggcctctcaccttttgactcgaggtcccagggattgttctgtgggagtgtgaggagctgacagcagcagacacccaggtgcaccccagtgggtgtgtgtctagggcccctgggtgctgaaagaattatgaatacatggctccttgtgcctggaagcttctt

SEQ ID NO: 99336 - DNA, 1115 bp, Homo sapiens
ccagctgctgtgtgggtcttccatgtcccagggacggagagaggagaagtggggttggccaggcagaggcatgataagagtcagagtggctgggctccagggctccagccaggctattagcaggagcactggctttggagggggacctaagaggacagataggggaatccccaggccacctctggaccttgacattgactaatgggatgagctgctggaacccatcaccatgaagccccctgcactaactagggcgtgtgccccttgaggagccgcatccgcttattgggcctaagaaaaactgattcccaggtgtgtttgggccgtctagaaccatgtgacctggcagccacttcaacttgggcagcatctcggctgggagccccagggagcctggcagtacctcagtggcagatgcagctcgttccaagatgttccagaggcaggaggttcctggaagaaccactgggccttgcagggtcagctcagcctgagagccagtgaccccctcccccaggaggatgctgtaggggcagtctcacggcggtctcacctctgccacctgtggatgagaggctggaccgggtcttggtgctttccagctcagggcgttggtccacttggttattcttggggaccaaaatccaagctaggatggggacagaggcctggagacaacctgctggcctccttccattaaagccattacagtgtcaccacaggattgtaagaattacaaatgcgttttccagagtccccagagaaaaaggagtctggcagttagaagagtaaagtgcatctgtcaacaaaagaaataccaaagatgagactacagcagcgacttgtcacctcttccgtgttgctactgcctgagaacagaggtttttagtttctttaaagggttgtaaacataaaaacaaagaaggatacaacatgcaaggcctaaaatgtttactttctggccttttacacaggcagttcgccagccccctaccctacagtatggaaaaaaggcatagaacagtcaaatcacgtaggatttcttagtttctccatgcaggctcatcgaatagcaaccatcctttcttagtttcttgaaacaagtaccttattta

SEQ ID NO: 99337 - DNA, 1040 bp, Homo sapiens
ccgcctctctgcctgtttgatgttggccctgtggatgctgcaaaacgcagcaaacacggaggctgccggctttgtttctgtagggcttgtcttagcagaagttcacatggaagagaggaggcgtaagaagcagtcagaacgtctggattggagtcttggtcctgccgcgtgctggccgtggagctcttgctctgtgtctgaactccttttcctcctgagtggatttgggtgttgccagtgatgtttgcgtcataagatggggtgagggctaacggagatgatgtgggaaaacaagtgctttgtatcctgccgcgcactggccgtggagctcttgctctgtgtctgaactccttttcctcctgagtggatttgggtgttgccaatgatgtttgcgtcataagatggggtgcgggctaacagagatgatgtgggaaaacaagtgctttgtagacgatggcgttggaaggcacactgtcgttgccatagctgtcgcttggaggactgttaatgatacgttgatagctttcagttcaattagccaaaatgacagaaatgccaaacatctgttgcaatgttgactcccaaaagggccctttttttggaatgggaaaattcagttttctctttattttctttttcttaaagcagaaatgacagcatagatgatctccctctccgacttgtctctgtgtagactgcacttgtgttcaagaggctccgctgtagctcaacctcgcgtgagtgcagaaacttgaaggaacccagttgttttacttcccccagcaccccaaatttaaaactggctctcacattgtgagacagcattcagaatagtaatcgtgaaaggctatgaggacttagaaaaaggtatttaaaaaacgaaagagtgtagctgtatccttttcttcctggtgcgctgttcattcacggtgaacgcacccacttcagcatcttggtggaaataactcagttccaccttccatatacttttctctctgcagtgtgggatttagggagaaattaagacctcgactcgctta

SEQ ID NO: 99338 - DNA, 1728 bp, Homo sapiens
tgcgtcattggacaagtgaccacacctagaagaagaatgccagtgtagggagtatgcttagccacctgcgtggtgcacagaagggggcctgcacatagggactgtgtgtgtggtttttcctcctttctaaagtatgtatcctctagacccatatttaagtctttttccttctttctgaacattttaaaattgcagtttcagaagcgctcctgtaaaacaaatatctacgaatgaataactttctcttgtgtttgagtctcttagttgggaggcaaacgatgctctacaattccagattcataaactaattacatttctgctgagtaaggtactggttttccgtgttgtggggagtgtaggaagtatttagagctgtcattgtcactgtgccgttactttttggtcttctgttccagatgccataagttctgctaacccgagggtcatcgatgacgccagggcgaggaagctctccaacgacctgaaacggtgcacgtactacgagacgtgtgctacatacgggctgaatgtggagagggtcttccaggacggtaaatgcgcgtggctgggagtttaatttcagttcatgatagacgggaggcacttcaagaagtcagtcctgcctgcacttgtgcatgtgggtggtggaaatatgtcgttgatgggtgggcattagtatcgagagcagtccattccagaggcaattctcaggtatgtttcatataaacagtgctgtgttcagaagagacaacaaggcatggcttgagaacagcctggtgttgggtctgtgtgtctcctatggggcctttttgtgtacaggatagaacatttcttgagctgttactcatccatgtgctctgtaaaacttgtttgtgagcatttctttattgtaattgcccattcttaatccagtcccgtcctttaaagcagtttaaatatttgatattaggctttgagaagagaactgaaaggaggagagagagagtcaagtttggacctccccccaccaaaaaaataataaaatgacacgataccactcacagcagagggtgaggaccagccttttggaattgtttttaggttattttattcattattgatcacctaccttcaggaacagccacaaatcagacagaaaattctcctaggagagcatgaggttctgcaagagggtcacatacttgtggatgatcatagcgccagacgtcgtctatgagagaggagcctgtgcagatgcgtggggtgggcgggagaggtggcgtcaccctggggataggagggtctggggtaaataaggactgatacttctaaagccagtcttttcaagttggaagcttgggagaggcatggttctggcagagggtccccttgctggtgggagtggtggaagtcacttgtagggtcctctccccttctggtttaaatccatgggggcagagccacctgtccccctgctctggtgcccagggggttgtcgggggcagagcagggcagccacactcgggctctccagagagtgctggagccgcttcaaggtgatggaggactcgccgcgctctgaccttgaagacccacggtgaaagcagtggctgcaggactgttcccgggacttcctccaaatggggcaattttctattacatgtttaaattagtcttcagatgaaattgtagggattctgtacattcactgttcaactcagtttcaaagatgacatcagttctcaaact

SEQ ID NO: 99339 - DNA, 1120 bp, Homo sapiens
ctggtgtgtgcaaagaaccccatctcacattaaatggctgcagctgcctggtcctaattacaggagtgtccagaaccaggggagctatgttaatgagtccgtttgtgcaacctaattgcacgcactagagcatctgtgaatgtaagcagtcttctgggcctcttctcctgggtcctgcatcatcttggaccattttgttttgctcacaccacagtccttgtgctgttaaaggatgtatcagttaagcctattccattctttcctgaaatcagcttaattttcattgtcggggtggcctgttttatgatttgtttttgttgctatttttttctcctttattacagattagattggaactagtgtgtgtgtgcatgcgtgcatgtgtgtgtgtatatgtgtgttagcgagggaatacttcaaaaaataagattttttacacttgaaagcaagccatgtatatgtgtacattaggcacttgatatatgttgaaaaggtggattaatgggtcattaattgtccattttttaatcacttgtagtaatgactaataattatgcaacaatttaacggcttatgatgtaggatagtggatcttattaggcccagtttacagctgggactacattgttggaaatgctgccttcccagaggtacatggtgcagctggtgtcaggcgaggccatcatttcccgtttctacctgtggtcttggctgtgcacctgtactcatcactgtccccgtctctacaccctcaccccctccacacattgaaagtcttatttctaagacttcctgggacagatgggtggtagatgtgtattgggacagtatgaaagaggttcagctgcttaaattacacttcattaagggggttcatatttgaacattttctgagaacaaagatgacatgaagaaagtgacctctgtaaggctctggcagcacttatgcggtaccaatacaaatgggggttgggggctgagcagaaaacattcttcaagagttaaatgatcaagtcacgtaaggcgtgttgtttttgttttgttttgagacaatgtctcactgtcacacaagctggagtgcagtgacacaatcttggttcactgcaacctctgccttctg

SEQ ID NO: 99340 - DNA, 1986 bp, Homo sapiens
agctagcgctactggtgcatgccaccatgcccaggtcatttttcaaaatttttgtagagatgagggtctcgatgtattgccaaatccagtctccagctcctggtctcaagtgatcctcctgtctcagccttccaaagtgtgatgggattataggcgttagccaccactcccagcagcccaacttttaaaggattctctctcagtctatcgcttgatttgcttaacaccagccatttaatatgaaaatgtttaggtgggggagggaatatcttaattatcattgtgctccatacgctacagatggcacctgctggccttagcaatatggggtcaagtatgaaacatgatagagtgacacccaaggaacctataaggaaaggaattttgattctttcagaaataacaggaagaaattatcttaaaatcttaaggttgatgctgcaaacaaccagagacaataaataaattgttatttagtgatgttgcagaatattgtgttaatagagcctgtgatctcttctggcaatttcttaccctaagtctgggatttttcctgctgtgcttctcttactagaaacgttaagtgtgcacagatgctcatacgtgtgcagagaaatgcctgaattaactctcacactgccaacattagatcattaaacacactattagtaaatgttctctattttgattttcatgttaagactcatctcttttgctcatagaattaattttatcaatgacatagaaaatggttattttaatacttctctgcactgcggtatcatagctgtgttttgccccaggacttctctctaatgacttgagccagcttgaattagcgtgatgtatcattaatgcatacaaatggcttttatttttgttcataatctgttcataatgccacggcattctgctctttctaatgtttttaaaatgattaagtagtgatgtactttttgacctagttaaccctccatggaatcgatgatcaaaagaataagagaatattacttaactaggatagtcagaagttgttataatctgtagctgatgttttccagttattttgaagttttttataatttttttttccttagggaatatggacataggccgggcgcacagtggctcatgcctgtaatcccagcactttgggaggccgaggtgggtggatcacctgaggtcgggagttcaagaccagcctggccaacatggtgaaaccccatctctactaaaagcaaaaaattagccgggtgtaatggtgcatgcctgtaatcccacctactcgggaggctgaggcaggagaatcgattgaacccaggagccggaagttccagtgagccgagattgtgccgttgcattccagcctggggggataagaggaaaactccgtctcaaaaaaaaaaaaaaaaaaaattgcagagaatatggacatagccatgtggtccttttttctaagtaaacttcactcatcgaggagctacccacaaaccactgggttagcagcactgaatttgttcacttgatgaaagatgaggaatagtaatcctttttaagttgtgaagttctttaacctcagaaagggtggctttgtctcatggactttgatattttttgcatagtccttgtaggttgagcctggccagacactggctccaagaggatgtgaggaattcaggctccgagcagatcaggggcatccctaaaggttgggttctggaatcgggtgagtttgtgtattgaatgcagagcctcatcgaagcgttgtgacgaggagagcgatgcactgacggccttaggagtctccctgatataagcaaaagtcagctgggaagagtggatttcaactttgttttcctaagagaaaaataggccagatgtggtggctcacacctgtaatcccagcactttgggaggctgaggcaggtggatcccctgaggtcaggagttcaagaccagaccggccaacatggcgaaaccctgtct

SEQ ID NO: 99341 - DNA, 1050 bp, Homo sapiens
gaaataggaggtgacattcctggggggggctgcccctcccacctccacccctacctcctgttttcaccatttcttgatacagtggtgcctaattttatttcaagaagaagatagtttgttgctttttttctttttttacagctttaaaaaataagttgaggaatttaggtttaagaaaattaatagctacaggtaactgcaaaagatatcattggcagatgcagcaaaatatatatatatgtatttccacagaaaattggattctgcccataaaacttagtaatactaataaagacaggtcattaccagttttaagccaagtaagcaaactcaaagagatcttctgtcagtgtgattcttggtggttttttatttttttggagaagtgtaaatcagctttagtgcagcaagcacaccacagatttgctgaaatcattcctgccccttctgacggtgggtagagttgctcggccaagtaatttacagtgctgtggcaaggtatgtttatatttaagctgtgcaacggtgtagctaatgagaaagataagaaatttatagtccttggtgattgataggattactgcctaggcattaattgaaatctgagggatcacagctgtgggtttaagttgggggaaaaattacttcaagtaaaggaaaacttttagatttgcttctgaacattttgaagatagttctcccgctgacagtctggttggtggtagaaacagttgatcctggccgaggctggggtaattatactgagataatgatggtatctgctgtgtagcctcttcaaggtaggtggtttataagtgtgggaaaaaaaattaaatactgtggggtttttaaatggctttaaaattttacatgtataagaataaaattctctgcagccactctttgctaaatattctctggacaattatttaagacattttaaaaaaagaaacccaaactaataatgacagaggcaaacctgtgatattagtcattgccttaaaatttccactgattatatttaatctgggtatgtctaaagtaatctta

SEQ ID NO: 99342 - DNA, 3786 bp, Homo sapiens
cccagtgacacaatgtggttcctttcatgttcactgtttggccatagttgattggaattgttgttttaaggcctagtttaactggacagcaggactaactcttcatttcagaaggaaggcctgcagcccaggagatggagctgggcaggtgccctcctcacgagaggctacaggccagacgcagggcaccaagagcatggcatttgattcaaagccatggttgagtggattttcaatctatttgaaggataactttggctactatatagtatttacactcctgcccattttttttttttgtattttttccatcaaaagagaaatctgttttgaaaacagaggtaatgtctttaccatctttctcatgtatattattttttggaggaaggaaatagccagttttctatactttgacaatgtcaccatttgccatctaaaatttcacaagctgtaatttgccttttacttacatatctcatccacagatgtatttgagtgtccacagtgaaatggttgcattactttcagattacttcctttaattctttagatgggtgctaatggtttgggttattaactggcacagatctgagttctttttgtctatgcttgttgtttttttcccccttcaaaatgaatttgcaaaagcatcactagaaaagcttatgtgtaaacatttatgctagtaatagataaaaggtgctgtgtagcagtaccagtgggagaacgctgaagcccagaaggaaagtctaccttctttggaataactgaataggagtcccagtcacctattcccactttctctttaactatcacccttggatggtattgaggaaaccgtattgcatgcctaattttcacagcgttcagtattaaggtaaacctactgattgtgtttaagttgaagtataccttttccaagtagctgtgtaactggcagtgacagaataggtgttgtatgggaggcagcattttcagctgtaagtgcaataaattgtggtttgtttattttagtttttaaccttttagactactttgtgatcggcaggagattgtgtgtgtgtgtgtgtgtgtgtgtgtgtctaggttgcagagtgaggatctggtcagtgattgacacttgttttcaaagtgttcaccatgaattttttttcttaaataccatttttctcagtgagctttgaaccatgatgtcaccaaagacaaagtgtttctcaggcttttcttagtgaaagatactttcctaaggtagtttatagcaagatttggggattaaaaaaaagagttgaatttatggcctgaagagtcattataaccttttacctatagctaacatttacatacctcaggtcaaataaatttagatgtatgcttaatgttctaaaagctctttgttccttgctcatccttggccggaccagagaagttattgataatcaggtgttgctttctttgtggtaggacatcaccatgttctcatagagtcctgttaggaagcagaggacggactgctgtgtgtcactgtggagagaaaaagaccttgtgacgtccctgtcatcacaggattctagtatcttgttatgccagagatgtggtttgaaaacttgtttttatggacgtacccacaaaacattatgctctgtggaaagaggcacgcacagaaaagaatgattccatttatatgaagttctacaacgggcaaactgattggtgatgaaagaaatcggaagaatggttgccaggaagtgagaaggagggattggttggggttgggggtggcccagaggaactcctcagggggatattttcatcgtggcttgggttacacggcatctgtcaacattcatggaccggtacaactaagatgttttgcatttcacagtatgtacatttaatctcaaaaaaagaacctaatagttaatcacgtgcatgttgaaatgtgtgggagtgaactgatgcctgcaccgtagttgaattgcatcagaaaatgaaatggacggacggacggacggatggacggacggatggatgggtggatagatatataataaagcaagtatgtagcaacatgttacaattataaaatgtagccggagtggaaggaggtgttcgctttcaaattttttttgtatgcttaaaaaatgtgttaataaaatatagggggaaatcaaaaaaattgttactacattaaaaatgtcattgtaggtctcgtacattaagatgggtccagataaacctaatttaatgtgatgtgctttctcacaagtagaagtgtacagtataatgaggagccacaatttttacaaaaatgaatcctgccagaattaaaaggcatacatgattctttgaagaatttcactaatgcatagaaactgcggtaacagaaaagaatactttgacttcctcactattcctaaatcacagcagattacagattcaaaatcaatcagtattctctgctgaactctaattaacacttaacattattagtcacaaatgtgaaatcttgatcggagatggcctcaggtattctaaatgtaaataaaattaggtttagatcccttttaattacctgaggtgctgtgagcgattacaatggcaattgataaacttaatttcttattaaagcaaaaaaaaaaaaaaaaaaccatgaaaagtttctctctgctatatacttaactcttcagtagccatggcctatgcaaaaaaaatttacctggtttatatgttaatcatatagaatttagatcgttttaaaaatgtttatgtggaccctcaaattcatcatgcatctcctaagtttgtgggtaatgttactataacatcacaaagggcaaaacttccccagaggaacttcacgtatcagaaaaggtaggtttctgggaggtaatgctggttaagtaataataatggatgggtgctggggagagtattacaatgacttaatgcacaaagccctgttgaagaccaagtggaaatctgttttgtcatctcatccttcttcctaattgcatcacaatacattgtataattcaacctgtgtgtcactgtcacttcttcccgtgcacagggccaccgctgctggctcattattaacagagcagggaggagacgaataattctctcaggttccaaccaagacatcttctctcccccactttaagaagaaaatgtcttttttatgtagattgttgtaaggataattatttctggaaataggaaaacagcttcagttgtggtagatacatccatttttcttaaaagtgagaagctatccgaaggagagtgtgcctgtgagaaatggaaagattacagaagtttctaaactccttcttctgttggtgttcatatctaaaaataggaagcaaattagacctgataagttgttaagcctatattaatcaaactgtgttaattttttaaaaagaaaaccaattattgcacttaactggatctgtctcaaggttcctgatttcaaaatcgacttttggcctttacgtcttacattttcccttctttagaactcttgcgtctcctgttcctcatttatcttgatcttctcatctttttttctttataattttgtgtagtttcttacctggaataatttagcataatctatttttctttaaaattttgtatagtttctttagctggaataatttagcataatccatttttctttaaaattttgtgtagtttctttagctggaataatttggcataatcagtctggcacgctatcatgttgttggtggtacctttttctctttgtatgttttaaaa

SEQ ID NO: 99343 - DNA, 1047 bp, Homo sapiens
tgtttcattcatctatctgagtttttcctgctttaagtgcctcttctatgtctgtgcaacattcattaatttctcagtatttcccccttgcagattattccttctttgtctgcatcatagacacacgcctctctttatagcactttctatatcccacatgctgccacttatctaacacattgggagagaaaggtgcagacaaggtgtgcaggaggtggatgtgatgttgtggttggttggttgacattttctagatgatgcagctggcagatttgtctggatttcacaatctcccacatctagcaaattgcctggcatatactagttgctcaataaaaacagtcagtaaatgggatgagtgagggatgctataaagcatagtaaagaaaccttccttgacacattaaagggaaaagcagccaactccacatattaaagaatgggcagcaacttgcttggtttctgtgaggacttgcttaattctgcattgaccaagagcaagctgaagagcattctgggatcaagaagatgaccaagtacattgtgggaccaagagcaagatcaagagcgttctagaccatgagcattctgggaccaagagccatgaccatgagcattccgggaccaagagcaagcaaggccaagagcattgtaagaccaagagcatgaccatgaacattctgggaccaagagtttgaccaagtattatacattctgggaccttcctaggccattggcatcaacgctgcagcctctgagtcatgcatgcctcatggggtcatcctgacttaacctgatgggtaggacttacttgagtagggcaggaggttttgaaaggacatgatcatacacagtacttagctcaagtgcacagagaagcagagtgccatactgggaccctacggtacagccagccggagacacagggttccagacacagcttaattccttcacgctggagtatgacttggatgtacaaactcctaatccctaaggataggaaaagacctagaagatttgaggattttaattcaggaaagtccacca

SEQ ID NO: 99344 - DNA, 1096 bp, Homo sapiens
tcagaaggtaaggcatcaaaggattactttgatatacgcaaggtaagtcaacaaaggattaccacccaccgaaccctttctcctgctggcttgcttggggcatggcatgtcctaatgacttactcgagcagttgaatcttggccacagcttctcattaggctttcagtgacaaggaaccaaaaagcaaatgcatagaagagcatttcctatttacacacccctaagttaaatttatgacctgtttagttgcaggatgtcttaccttccttgttagtatttgttctgattggaaaattactctgatggtttagaatttgtcctgttgaaatgtggaagtagctggaccagacttgttcataaatgcagcatccatgtgaaggatgggtgggaatcggtagatttggggtgaatagctaagtgctgattttaaaggtagtggcaaaaaaaatgatgaaagcctcttctagaacaaggataatgaatttctccttgtggggtcgccgtgcttatgggaagatggaacgtacattaaagaaattttcggagtttagctaaaactgtatcactgagcttgtatcaccttatcagaactcattttggtagcttagaatcatcagatgacacataattagcctagaattctgtgtgctgccaaaatactaatccagtaaaagggtagagggacagttttagatatgggagtctcaaaacaaaatatatgtgtgcttctcgggaaaccgctggaaccaggctgctgagttcagcccctgaggctctttcccagcccctccgctccccacacccctgcacactccctttcttgagtgtccaggtagaaatgacctgtatcttctaaccaccccaggtatctttccaaagcatagatctcttcacttctctattcaatttgaataaccccccattgccttaaggacaacttcacacttgccactcttctctgcatatcaggtccttagaaatgcatttctagttgcctgtttcagcatcttctcccactaccttcttataaccttcccaccccagccccactgttgactcatccattcattcatccagttgttgtgtgcccactga

SEQ ID NO: 99345 - DNA, 1053 bp, Homo sapiens
ttcctccactcacatagacacaccaagcttttccctctaggagattacccagcctgctgctgggttgtgtggggaaggactgcggatgtcttggatggcagttgtcatactagttttttgcttccccaaacaattcatttagggatgtctttaagtgaggcgcccagagattccaccccgtccctgggacatcaagcaaatagcagcaacagccgttggcaaatttgtggctatttgcagcattgactctgtagtcagtttgcattttcaagatgggggagacatgggcagacattacaaaggagtcctttccccttcctattcctcatgctcccgctcctcctcctgaagtcagatactttttgttcttcattaaagttttcccttattcgtatgggttaccctgtagttttaaagcattcaagcagtccgtatattttagaacaatatatttataaatcattttctttccttgatttgtgtatggaagcaggaaggacataacaggtagaggggaaataggacaaatatgaaaaaaaaatagtagagtttaaaaactactaccagttaccggatgttgtgacttcattttattttttaattaatgtggtagaatagtaattaaatggacagaagaattttagcagttaacaatgctaaatactcatactttgtacatcctgtctgtagtttgatgagaggctttgttgtagaaatattctctttactcatgaactgactcttcctagactccatagaaaggatagaacattcatttgcatttgaagtttcatacaacagtcgtttccataacatatttgacttatcttaggaagtttctcgcatcttcccttagtttctacaaatgaaaatgtctgcaaagctctcaaagcatgcatcctagtcctatttaattctgacatctgcacatttcttacgaatgtaaagtcagtgtggccatccagctgaatagtaactctgaagctgggagtaaaatcagatttcagtgtaattgataatcaaagccccttattgctatttttcaaaaacaaa

SEQ ID NO: 99346 - DNA, 1066 bp, Homo sapiens
gtccaccagttgcccagaagattgttgccacaaggaagaagcagcagctgtccataggaccctgcaagtcgctacctaattctcccagccattcctccgtctgttccgcgcaggtgtctgccgtgcacatcagccaggtacgttaggtgacatgagaagtcagactcttagaaccaaagacaatatgcaaatagtgttcccagccaatgctaaggttgattttttttttcttttcaactttataagtaacagcatgttgtaattgacttcacattttcttcagaaactgctgtggccaagtgatttttatgggaatcattcttttatgttttctgtcttcatgctgcctgtgttatgaggcatgctggcccgggtggtgatgggaggtgtgtgctgcagtcctcgctggtgatttaaaccacccttctctggtcttggtcctagtctgcttataggttgaacagttgtgagtaaatcttaatggccaatctcgctttatacttaaatttggtagtggcattcaattataattaccatctcccttaggtcccatagaaactgctatctttccataacaacattttgcaaaagtatttacttggaagcaaatgaaataatggtcactttgaagaactcaaccaacaacctcctaaggaaacagttgactttgtttttgtctgtgcttgttttttgattacgtttcttgggcaggtattctattggcactgtttttttaaggacatggtggaagggttcggtgtcgtactttcagtttgcttgggaagccagtaagttatggcatgtattgtcagagcctgtcaaggtacagtcatgaatgttcatgctggctgggctgagtggcagttgcctgtaatcccagcactttgggagctcaaggcaggtggatcgcttgagctcagtagttcaagaccagcctgggcaacgtggcagaaccacacctctgtatctacaaaaaagagaaaaattagctgggcgtggtggcttgtgccttgggaggctgaggtggggggatcacctctgcccagcagaagagctaggctgcagt

SEQ ID NO: 99347 - DNA, 1213 bp, Homo sapiens
ggattctacacagttgagccgcaaactccaggcacagctgctgtcaggtgactgaagcatttggacttgagaagaacgcttttcctccctggatcacgcattacaagtacatgcttttgaaacagtgcttctgaaccagggtggttttgctctccaaggacatttggcaacttctggagaaactttgggctctcacaacaggagtatgggagtgggaaggtaaaggttctgcagacgtctagtcgtgggtagcaaccaggggtgctgcaaagcatcccacagtgcataggtcagcccctcacagcagggaattatccagccccacatgttagtggtgccctgttttaaaccatctgacttccattttggttgattactgctgacccagatgcaaagctctagaggggtggctgggagtcagatttgctgcccctttgtgaatctgatcttgatgttacattgcgattcctgccaagtctgggagatcccccgcccctctgccacatgtctggggcagtctctcattggatgctcatgactgcggaggcggttgccagctgcacacaccccctcgtccccagcctccccttgcttttgctagttgccttgcgccacatcagctcccacagaggccactgctgggcagcagggtgaggactgatcagacagaccaagctcccatcccggcctccgctgctgacggatgtttgaccttaggcaaattacttgacctctctgggctggaaaccatagtacttctgcagtggggcttccgggaagacttcctggaggaggcagaagagatctggtggcattgcttccatggttttctcactccattgatgctataaaatgatttctgatcgtgttaagcatatgtgatagattaggaggtgggtatttaggtttctgtaaaatacaggtgagtatctcacatgcttaaattagtgcatggataacatgttttattgggcagtttcttcacacacaccgagaacagcagcagtcacctaaatagctgcttcccagctccgtctaacacctggagcagcccctgtctacccccaggctggggggctttgggttgaagtgtttcctgctagaacaggctgcacagtgactcggtggcttgagaaaccaatagccaaagatgcagctggattgagagaaggtgggctgtgggcaggcggcctgtgccccgggaggaggggcg

SEQ ID NO: 99348 - DNA, 1052 bp, Homo sapiens
caagaaataagcaaatcctaagtaaaagttgcagctccttccatgtgcctccagaacacgtttctcctgcctgtctgcctagggatcagcattaacctgaatttggtctatattatctgtgtccatgctgtaaacttgttctagtgtgagtcttgaaattatacattacatggccttgtccattttcaagctttataataacgatgttatttatgtgatatttttaaaaagcttaccatataatgttgataccattaaacagagccaagtgcacccaggaaccaaagattgtgaatatacattgcccagctcagaaacttgccataaaaaaataaggcagcaaaattcatagtgcgaagagaactgtttcaatggcatttatttgtttttgcagaggagctcctgggtacctcccctagtgtgttccagcagccgttgacttagccactggttgaaagggggtaaacgggcttctctttgatacagagggctcttggcaatgatgcgcttgttcctgtaggcaggtagttagttgatgggagtgtcctccatggcttctctcaccacggcaggggaagttaaacatttttgtaaagaagcaggtgataattggattaccttaacctttctttcctctgcatcgagtgtttgttggaggctaagcagttactatggtggcttgctgtgcgttgacttaaaatctgcagcccttctgggtgtgatctgctgctgttccatttctggcagtgtgcagcaggctgtatgcagggcagggtcactcctggcagacgccgtgggtgctgagggctgccttgtgtctgatgattcctcggatccattccagcatcacggaaggatgtgccattagtgatgaggtctcccaagttagcagagaaaggaaaccttactgggaatttgtatatgctggggtgtctatgtccattggatttgatttagtctggttgttggatttaaattttatggatacagcctgatgtagacaaactaattgtggggctgaggtacagcaaactcttttgcctaacatcttg

SEQ ID NO: 99349 - DNA, 1837 bp, Homo sapiens
tctcatgccatcgagagaggagactgagacgatggagctccttcagttttacccaagtcaaggtgcgcttttggttggggcttccctgggttaaaggtcaccacccttcctgcccggtggcagccactcgtcgtccgcagcacgtcagcagtgcatcggagataattgactcaggaccttgtcaaataaagctgttcattatttcccaaatactgacctttcgtccaaaggcgattatcaggggttttttttccccttcattattttttgtggtattgtccactagcttaacttcgaatttgccattttccaaccatccagaagcaaaaacggaaaatgttaacagcaccttgatactaatcaagagtgtgccgttaaatcgcacagctgactagtcaacagaattttaaaatcattcaaacattaattaaatacatatgttgatgtagtagattttccaaataaacattgagcagccccttttttcctcggctgtgtgaactgcagctttcaagtgtttttctgttgggcgttactttcccatatggcccattggtttctagtagttgaattttgaactttttaaaaaagaattaaaagataattctgtggtggaaaagtcagggggaaagtttagatgattctctttaaaaatgatgagtcagtggagatgaactactgagctgtctgctcgtcggacgtgtctgtgcgcacacatagatcgcgcatgttttctaaatgtgtattggcaggaattctgcaaacaggggcagagccccgtctgtgaaccacagcccttacccagatgccaactttccttttgctttgcagtctcggaaagggagcgacccagacaaagagaagaaaggcctggagagtcgtgcggacagcattgggagcggccgagccatcccaattaaacaggtgagcagcctccccatccttccctccctgtcgccggagatacacctcaggtcttcctggagatgatgctggctctcgcaccaaggtctgtctgatgtgctctgttgatgaatgtagaagtctctcacttgacatcaattagcagagttcctgtgtgtattcaaatgggatcattagaatgagaagagggaacggagacaacagacctaatgaagtgcgggctgcccgcctgcatatggagtgcgtttccaggctgagagctttcaaaggctgcctttgtagcacggctttgattgggccgcgggccgccgggcaacaggggtaactcagatcgcctacaagagccccttgtgatcacaggaacagcccgacgtggccctaatttgctctcacagacggacatctgaacactgtttcaggctggtttgtaacaacgaggcaattagttgtgataatcatagccggtgtgtcagctgtgcgctcttgtttgtaatttgctaatgaaggaattgtaactttgattaggttcggtttcatttagaccttattatataaaggaacatttacagctgtaatgtggggccttaattaaactttctcattacacaacaggacttgaattcaaccatttgttttggcctatgttgctagcctggaacagggtttcattagcccagaaaccagattctaaatcactttatatctccaataagaaaaaaaaaaaaccctggagtccacgtgtgacgtagattgtggtttgatttccaaggagaataaaaatagagttcaaccccacacagtggcttctgaaatgtcatcttttggtttgttaaagaaagccaattgatttagagtgcatccttcttgagcagaagcctctgtgggcaggagaatggctccgcctctcaggcac

SEQ ID NO: 99350 - DNA, 1066 bp, Homo sapiens
tgcaggtcatcaccaaggccctcaggcatctatgtaagatacatgatcatctactgggccgcaaatatatggattggcccggggcacctttaggagaaattctcttccctccatatattcaaagacaacaacaacagaactttccactttgatgatgggtggtgttttcactataaaacacttcagaggtccgtgcacatagttgcttattctttcttggtgcctttatttataacctaactctgcataagctaatgttactgtgtaatttttatgccactgatacctttttcaactggaattataaaaatcagttataaaaataattctttttcataaactggtaccaggacatttcctttggggaatattaaaacttaataatagactgttttcttaatgcctgtctgtggttgatttgggtgatttgggtgggagcgctcaccagcctggcgggagtccctctgtgcgagccaggtgggcccccggtataattggaaccttcattcaatttgtacctgctcatctgtggagggggctagctttgcaggctagcttttcaatatgtgtgcagattggaactgaccatcaagcgtaaaatgagtattatccagtccttggatgcctttcgattgtgaatgttcaaaggaatctcgttgaaatctaaatcatggtctgatttcccggtgactcctgggcacagggagctccttgtccctcctaattgtccccctcttgcagccacagacagctccctcctcacatccacacctgtcccagcaaagtgcccccgtggccagctctccaggcctcgggtgcctcgtctgtaaaatggggaactggatgatgtctgaagcccttgaagcagttagatgtggaggttccacagagaatttttaaatgttagcaaaactggatttttaaatcggggcacccttgtcaaagcctctctgtgcatcggacggattgatgtgggtttgcagacggttgtatcgatctatctcacatccctgtgtgtacccttgtttctaaaggaacatagatcacttcaggtagcctgaattcc

SEQ ID NO: 99351 - DNA, 1383 bp, Homo sapiens
ttcccatccttaccgtgtttgccgcaaacatgttctctgctcttgtcacttgctgcagagaactgtgtcttaatgctcagcccatgtgaaagactcgggtctgcatgatcgaagcctcacacaccagctaatggacctttgcctaatggcagaggagtcgttttagaaccccagcaacctgcgtggagttgctaatgcagactcttctttcccccagcaggagtcttgtaatggatggtttaggatccaggcaaggcagccttcaacactctctgcaatctaaccccagagtttacagatagtacgtgtcgcagtggcttatgttaaccccctttcacttccatctgatacctcgttcgctgtaagcatccaggctccccccacctcagtgtgggagcttgccaaatcatgatggtcaatgacgttgtctctttcttctttctcccgattaaagattccccatcaagaatatgacttattttctggactataacttcatttcttgtggacctgggtctacttctcctttggtgtcctttctggggtcttggaggaggttggttcagagaattcggtttctttttttttttttttttttttactaataaggtctattcgagtaaaaattaagaagcaaagcaagaaaaagccagaggcccggctcagcggcaagtgggtttgtcacgtattaatttttcattgctgtggagagttgtacatacataatcacttgattgcagtgggagttagggagctcctatggtgccatttgcataaatcttgttaagtcaatggcagttaatgaagtacaaatgagcccggagaaggtgacatgcaaatcgtgggtggcagatgggaggtctgtttgggggacagcagctgtgtgctctcctttctttctttctctttagcattttttaatctctatatttgagtacagatacacagtcatacgccttggcctcctccgtgcccttcgcagagccccggccagagaacctgtccatcccctcctgcctctgatgtccaggctgcataaaccgttcaagacttgccttgtacttggtagcgtacgctagaaggatttgaattttttgaaaatcatgctcagtttatctcatcgtgcttacgcaattgaaagcgtatcatttttacttggtggggacacacagaacctcctcactacatcttttgagacgttgtgttgtctcctgaggtttcagagaataaaaaagaatagaagataccatctttgccttatcatgcttccatttgggagtcttttcttcctttttcagacaggccaactgtatttactgattattccccgtccctggttcgtggttggaccatcaggggattggcattcctagggttagtcag

SEQ ID NO: 99352 - DNA, 1083 bp, Homo sapiens
gctggagtgcaatggtgcgatctcagctcaccgcaacctccgcctcccaggttcaagtgattcttttgcctcagcctcccggctagctgagattacaggcattcaccaccatgcccagctaattttctatttttcatagagatggggtttctccatgttcaggccggtcttcaagtcccaacctcaggtgatctgcctgcctcggcctcccaaagtactgggagtacagccaccatgcgtggctaaaatgtcttttcttcaccaaaacagattttgtttgtttaaaagaatatgttatattggagaagttacagtattcattaaattgtattttcaggaacattataatttttaagtcaacattctttaacttttatgtatctaagatagtatgtttaggttacacagaagtggtcacatttttttaatctgcaaagaagaaagcttttgccagtgacccaaaataatttcagaaaactggtttcttgtacaacttttctacttttgagtatttatccagaagaagatttgtttaaataaatgtcttcacatacaaaattttgtttataaggaattcttcaagattaaacccacaaattttagtaacaccggactgtttttgtaattgccaagtttttaccatattgttcagtctctatcagccacagcctctgtgatttcattcatgctaaaaacaagaatgtttatatttttagtgtacataaaaattaattttatacaaatatataaaacagctacacagaaatactagtggagagacgagtaatgtgccaagtaatgattaggcaatgaggaaccacgagaagcagatagctctggttgggtgtgttggccttcctttgctcatatctaaagtattggagatttaagacaatatgaaatcattgtatactaaaatgtatcattaacaaagaatgataaaatcctactctaagaaaaataaggaagagcagagttgtggaaatgcactgctatagtcctgaaacttgacccagtcttcttgaagggcaatctaacagtcatacatgatggacataagaaatttgattcactttgtcccag

SEQ ID NO: 99353 - DNA, 1078 bp, Homo sapiens
gccaatcaaaaagagatacttgtaaactcatttacagcgtcagtgtgtgttaggaccatcattgagatgcttattgcaggagaaattaaagatacaattttgtgctaagaggcaatgtagaaattagttcccgaattacttgttaattgatttggtgattccctcgggtctgcatgctccttttccccctttttgttgttgcattcagttaacagtgactattcccagagcaataaaaatatattccacatgtagatgagatgtgcccttatatgagacggcctgcattctttcgcggtaccaagaaatgctcaacctaaaacacaactgtgtttttctcaggcatattgttgttttatgtatacccatcaaggtaaccggtgcattcacgggtttggataatttcaggaaaaggaaagcatgtttttatgtctcacgtttacaggcgcttttctgatttttctttccccctaatggaaaccttcctttttttatcaacagtggaggagattcaggagacttgatttatggaagctttttcttatttgcaattcagcaagaataaccatatgaaagaccatttgtagaaaagtgcaaattgctactgaaaatgatattgaaagaaaatgagacctgtttctccttgttgaaattgagtgtggatagaaggagagacagccatcgtgggtcagagggagcctcccaggcttcctggatgcaggctcccgtctccagaccccttccttcttgaccgaggggagaggacactgaaatgatgcacatattggtgctgctaatgtgaaagatgcagaaaccgttatccttttgaatttccagtggaagatccaacgaccctttgaacagctgccaccatggtggctgtggcttcattttgaggaaaacatttttaatatcttgttggccgtgcttatggcctgaaaagcagcattaacgagtttttgaaaactattattattcattttaggccagtccgttatttttttctattgcccttcccgtgatcacttatgcatataaatatcattatgcttttgcttaactggggcaaaaatcatgt

SEQ ID NO: 99354 - DNA, 1048 bp, Homo sapiens
ataactgaaacaaatgttctatgaaatgatcctaagtgcatctcactccaatcctccaatctggtttttttttttttttttttaaagctctggttgcagctcactaaagtaatttcatgacccactaattatctcacatattttgtaaaactcacattttttttgtaaaaaaaaaaaaagccagtagcagcactggctctttgtccagtattgacatgttaactgtcatcctagttgagccagccccctccatgtaggccagtctggcgaaatccagtgctgtgtctctatgcagtccacgggcacactgagttctcatttgcccggttggaacagctgatggttagttctcagcgtgatcaccgtggtcagatgggcgccccatgtggtgccttgtgggagaaaagttccaggttttctttagctacttccacaggtacacagaggtgtgctggccatggggtttgtgtctctgcatgttcttccgcatagtatgaggtgcaggcttttatttcatagggacacaccagtgtcagacagaacatggggacaagatcacactgcagattcagatatgccttctgtcctttcaaagggtgtatcctggttcatcctctgtccctgcctgctggaataactgcttcccccgctgcgtcctgtcctcgtgcacccacccaggccacagagcccggtctgtgagcagcaggagggcagagccctgtcctcctctgcagcataacccataattatggctcttaatttacatattccatgcctgccttgagaaaatattttacctggaatgtcagttttttgggtaccatccactggagttcacattcattttcaccagttgttcacttagcagaccattagaaaggaggtccctgcgaggtccccgtgagaggataggaaaatgccatttaaataaaaggtcagcaagagcgagagtctccgaagttagacaggcatccggagaaaggtggatgtggaaagtgaggttgacttctgggcgcatgtgtggaatatccaggcccttagaggctcg

SEQ ID NO: 99355 - DNA, 1151 bp, Homo sapiens
tgtgcacatgtagtcccagctacttgggacactgaagcaagagaatcacgtgaacccaagaggcggaggttgcagcgagcagagattgtgccactgcactccagcctgggtggcagagtgagactgtgtccccccacccccccaaaaaaagaaaagagggaatgccagggttactttacaaagctgtagtttgtttaacacatttaattgacaatcaagccatctcacaaatgtaagtaaatggcactattgataaataacaggcttgccattggtgaatattttgcctccaaagtgattttgctaaaagtatgtgtatatacagtttctgtaacatttcatatggtaggaggaagaagaggcactgtgctttctgaagcatttattcctccttagaatttttcccaggggtaagtgttcagaaaatctgaagaattcaaaataatttgctccaaaatattatgatgtgattaactacgtattgtaccagccagcatttactgaccatatgtatgtattagccaccatcagtagttataaaaaggaaattgatttagtgagatacagtctacacttttaaaaactcacaacctagcaagaaagtcaggcttgtctcagtaactgctgtgcagatctgactgtactaggtatgcactagaatgtgccaggggaaccccgaagggatcatttgcttcgctttccatgtgttacatccatccccaaccttctagtattttctacagatgacatttagtgaacagaaagcctctctctctgaccctaattgattaaagactttttttttttaagaagcataaattagaagtgaacacaactttttggacttacaagtgaaaaatccagtgcctaagactttctggtgaaatgttgccgctcgggaatttcagttggaaacataaagccattcattaagctaacgcgggtgtacgtgaggtttattcaagagataaattgctggtgtgttggtgtttagaacatcaactctgtcggatatttcatgtgaccgaggtctgagcatcagaatccatgcccatgccactgctctccccaggggcctgagtctgcatttactgtgaagcaatcttttatggaaaaaacttgcaaaaaatagaatgagtttgaaatagaaa

SEQ ID NO: 99356 - DNA, 1039 bp, Homo sapiens
ttcccatttaaaggtgttcatcagaatcacctggagagcttaaaaaagcaaaaagcaagccgggcacagtagctcatgcctctaatctcagcacttcgggaggccaggagctcaaggctgcagtgagctatgatcgcactgctgcactccagcctgggcgacagagcaagaccccatcttaaaaacaaaacgtgatgttggaggagccagactctaggctttgggaaggggctttcctggggagggcagatttgttgagaatccattttcccagcgagttcgtttccacccccttaagaacaaccactttagaagaacattaggcagaggaaaggggctcctacgtgtacctcctttccaggagatgtgggaacaggaggagtacttgccttttcatacatgaaatggttttttatttgcagattatcatttgaaagacattttggtagcctgatttccactcagaaatagatgtcaccaacacaggatgagagactcttataaagaattacgaacttctgttaaaatgagaaagtcaatgaagggaggcagcatacccagaaaaggggaaaattaaaatctgaaataatttatgaggaaaataattttccatctaagagtgtattagctgtttattcaaaacccttgatgggaatgtttgtaatcaggtcatattgtgatcttcccacagcctgtggtttctgtttttcccctcctggccttacagttaggggagttagggcaggttccctccagaggtgacacctgttgacaaccagtctttcatgacagcaagctgctgtccattctgatggcttcagcctctgtgcattctgatggcttcagccgctgtccattctgatggcttcagccgctgtccattctgatggcttcagtggacattgcagtgaccattaaagtaaagtggcttagagacataacacggcgacatttatgtaggggcagagaagacaaggctgttcctctccttgttctcacctttgcccagaaagtgttagaaacagcctcttccttagcc

SEQ ID NO: 99357 - DNA, 1024 bp, Homo sapiens
ctgtaggaggccaaggcgagtggatcccttgaccccaggagttctataccagcctgggcaacatagtgaggccccatctgtacaacaaataaacagattagccaggcatggtggtgtgcacctgtggtcccagctactctggaggctgaggtagaaggatcacctgagcctagggaggttgaggctgcagtgaactgtgatctcgccactgcactccagtgtgagctgtgagagagcaagaccatgtctgaaaaaagaaaaattgtagcttatcatttagcaattcataaataattacctgtatttgtcaaacacttcgtacatgttaggcattgtaatttggctttatgttatgaatgcatttaattttcaccaagggacgattccttccagacagctctgagtttctgttttccttggttgttgctgagagcataagttatattcctgcctataggctcatccaggccgcatttcctcctgatttcctgtttcctcacccgtatcctgctgctctctctcttcccctgaagctctgggaagtcttccctacacgctcattagtgagttaaggaactttgatgtgtctccgtgtttagaagaaatcttgccgtcaccactccatgcagacgctgggatactaaggttttcacctgctgcttcctgcgggatgtcgctcatgtggaggagggcctctcgttggaagcccaggctcactccatggctgcccctctccccagcctgctggcgttgggcttcctccgctcctggtttcttagttctggagcacagactccgtgctctggagcaagagttcttcactgtggttctgtagatagaattcaggggtccgcgaatgtggctggggggaaattcattcgtatttccactgacttcgactgaaagttaacgtttccttcagatatgaatgtaggcaacgatccacagtggtgttttgttagcagaacctgtgactttgccaccctcaaaatcacagacatgttcacagcgcattgccgttgtc

SEQ ID NO: 99358 - DNA, 1140 bp, Homo sapiens
gcaaatgccattcacagcctcctgagtgatacctttttctaggcactgcttggtttctgggtgccctagacagggagtatcccaccggttacactctctgtcactcgccatcatcctgaggatgctgtttccataagccatggctcatacagccgtccccactccaggttaaggtcccttgcctggctcctcacagtgccctgggcatggtcctatcttggcctagctttcactaaactgcatctgtccgtccacctattagagccacctgccagtgttgagcctctttagggattggcctgtgccctcatcactccacccacacccagcacagtacctgggatagagtccatgcaaggtaaatgaataaggaacaaggtcctactcagaggcaaatctcttctttctaacactgggagctattcagctgcctgtaccatatcagaacatgcttaagaaaaagagggaaataattattgtctcaacaaagatttgggtttagcaaaaactggaaataattcacagtgaaactaataatccattgattgtgatgtccatggtgagatcattactctcgagaataatactggtaatttagtttgctcggaaggtactattttcagagtacttttacattttccaaaccctgctgtgtgtgttgaaatgtaaatcacacagcacccagataaccagatgattttcctcgtccttttaacagaaagatcaggtgagaacacacagttgcaccttgatcatttagtgctttaacttttccccccagctagtaagtatttgaggagtttctctcatttgggctctgaatgcttttctgatagtggggaaggttttaggaattgtattcggggctgctttgttgttgctccttcctgcccatctcagtgttaagggttgtcagtatcccaagactgatttccctgtccgtccgtgtgctttggaggtatcctggccatgttgttccttaaagctctaagtagaaatgactttgttccttggcactatgttaaattggctggttaattctggtgttatttaccctgtaattcattagtttcaccccaccattggcagctgacaggctgtaatttcacgccttgcaataaaagatgtctcataatctgc

SEQ ID NO: 99359 - DNA, 1043 bp, Homo sapiens
ttttcatgtgtgactctggagggtttctggagtgagcagaagcccgggcccccttatgcctgtacgctcagagctcagcctctgcagccacgacttctccatgctgcggggatgctaggcctggataagggttgccacctgctgggcatggagtgtccagcctcacccagcccctcgcctggcccttctcccttcctcatggccgctagggcaagccctcacttctccaggacagatggcctttccctgctccaccgtccactctgcttcccgcccctggaggggaggaagacgagcatggtctgggcgcccagtgctcctgtccccatctcacacatgtgtggaacaagccactcacaccctgacatgctcccctctccctctcaccacgactctttcttggtcctgcctttctcacttttccctctcagccttcttcatagcctcttcctcttccatggaggacagggcagaggaaaggtagggaggagcattgatgcctcctgagcaggtctggcctggcacctgcctttcccacccaccccacggtgtcctggccccagggctctgcagcccacagcacctcttaacagtgctgtggacaaattccggcaaaccgtgggttagtaaccggacgacgttagcaaacacagaggctgcagttgagccaaaggaatggagattctggaaggaagatgtgcgtgttccaactctgcagaaaagcagctgaagcagtgggaggtggtctgttatatctaaatgcaatggaaatctccatagccacaagtgactggcctctacctctcttccaatcttgctctactaatgcgtggcctttctgtagttctgaaaggagccatctcccctggggcagtgcctgatgtggtctccttggtccccttggtcctagcacctctgcattatgcaccctggcaggacatcagccggctggctctgccaccccgcattagtgtccatgcaccttggtggagaagtcgctctgagcagctctgatttcagaggcctcacttgggaaatgaggg

SEQ ID NO: 99360 - DNA, 1087 bp, Homo sapiens
aaacggagatgtgcaattatttaatattgttgatggggcccataaaacaaatagtaccaaatctctccctgtgtacggccgtcagcctccaagggctgttctcccactgcagacacccctcctcttaccaccacaatatctgaaccaggcaaggagacaattgttacttgatgactgagcccactaatatgttacaggaaatggggcatgaaatgcaatactttatatatagtatgtactgtgtgagtcttccattgaaacaaggccatttttagcttgctgatacaatatttgcagtggttcatcattcgattgtcctgattaacaatcaacttctataggggaccatttgagtagtttttttaaatgtgatgaatcagaggatttgttcaacatcacttcatcctcttctttaaatggtaattggcacttgggaacttgggagtgaaataaggtgtggtctgttctatgtggtcatttccagaagtgccgttttgaccactgctgtgcctttcatccagatttttgcaactggtaaaggtgtcacaggcaccattgaaatctactccctcatcagggaacacactcttgttgatagcaacagcatgcaatctctgttacagcctctaagttggaacagagaaggctttcgtagaggacatttggtggaaatgaaacacatccaagctgtcccacgttaactgtcacctctgtcacccacatgcactacctatgtttagcagggcagcctctgcctgtgatttgcagggagcgcatgctgacagctctcttccctctccttagttccaggaaggtccaggcagttgaactgactgcttgtctgtagaaagacccactgtgtccctgggggactggtaggtaccctgattcctgcttatcaggggattgattctgggcatgacccttcaccttctctgtgcatatctgtatcttacctccatctggtcactagttccagtaacttggcatttccttaaatgaaacattaacatctgtagaaaagatctctctgacatgttagatgtaacatgagttaaaaagtcccatttgggaggaagagaaccat

SEQ ID NO: 99361 - DNA, 1031 bp, Homo sapiens
ccagcagccattaagtgcagatactgtcgtccctggtgtcgtccctgaaaatcttgtgacagggagagacagagtgaaaggaaagaaaaacgaggcgatcaagagataatattaactagaaaaatcaagaggggatctgtcagtcctggtgggaaaaaaaaacattttgtttttcttagtttccttttccttttcttttctttcctttggatggaggaggtttggtttggtcttagtaccccagcatacagtagcttcattggctttttttctgcccatattcaaaattcctttgattagcatttggttctggttgggacttaataatgctagccagacctaatgtgaaccatacatctcgtcggcattactcatcgtcaacatgggtttttaaaagggaaggagagaaacacaacaaactttttatttctttccctgtcattgttcttggtcttgttattcagtggacgctgtattaaattggattctgtgtccatcattattaaaatgtgaagtgtgtcggtcacaaagcatacatttcggggcagttagctgaataattcttttctttattatcccaaattactgctgagctctggagaggggagcagtttagccaattattgccatttgagctggatttgtgggtgattagctcctggccgaatccagtcccggccggcgctttgaagcctgtgctgtgcgattttctcagcagtgaggtaggaatagacgcggctaatgacaggaaggtcgcgcgggtgagctgacctgtgtgtggcgcagccttgggttccgcaaatagggcacccacagtaacacgtgtggcgccgaccccgccgtgcgcaatcggggctttatacgattgctggagatgctgacagctcaattaaagtgtaaccctttgtgccctgcaacctggcacaacgacagaaatattactcgccggaaaggggagggggtctttggggagctggttaaagatccagaatcggcccctcgcccctttgcccctcccccaactccctcca

SEQ ID NO: 99362 - DNA, 1029 bp, Homo sapiens
cagtgtgggaggatttatttatacagggacaccagtgccacgaagtgtggttcaatgggagccgtctttggagaacagataccacgctggctgtgcatgttgggcaagttacataagcagtctgtttcagtgtccttatccatgaaatgagaatcgtcgtggatatcagttgtgattgcagttgatgaaatatgcagttgtgaatactgagagattggtattcatactctttggaacccagttaaaggtgtcatatcaattcctgtccatgaaatgaggataatcaatgaccatctggttgtcatgcactttcagtgggttaacagttgcaaggcacttagagcagcagcatctggttcagagtgagcccaatattgcatagaaataaaaaaaaaaagttctaaataaatgccgaagccacataggagtcaaagaaagcgttaactgtaattgatgtcttcactgtgacagctggacagcaagaaagaatcttaagcagagatggttttcacatgtacaaaagtggcatctgaaagatggacaaagtatgcatggtgacatgccaccatgccgctggccctgggttatgcagaatcaaaaagacttaggatcacaggggccattggcactcactgacaggaactctcttcctgagcatctcaggcagagccttccggcctctgtcatcttctggccagtaggatcacggcttcatgtcctctaaaagtttcaaatgaactatttttagggttttccattttcttggtccttagagtaggaagtgtgaaagttcggactgattgaacatagaggaggctgtctgcgcgctcagcccagaccagtgggggccaccttagtaccacttcctccctaaggaaagcgacgggccccctgtcttccccgattggtttccatttagctgctgcacatgggggatgctgagtgtgttcagaggggcgtcccatggtcgaactggaacttgctttgggaagagtgtggactaagaaggggcttggcttgtgttgccac

SEQ ID NO: 99363 - DNA, 1016 bp, Homo sapiens
cgtctcaatgtgtttgtgtcgtatttgttgaactaatggcatatcttttagcattcgccagtatcacagagtgaagttctgcacacacacagaacttgaatgtatatgttgcctgtgtacctgccttttcttttttttatttacattagaatttctatttggctctttttcccttgtagggcatgctgttgaagcgaagtggcaaatcgttgaataaagagtggaaaaagaaatatgtcaccctgtgtgacaatggcgtgctgacctatcatcccagtttacatgtgagtatagccccctcggagcaattaacagctgcagacctcaactaaacactgtggggaaggggaacctaccagcagcccagcctcttgtctctgtttgaagtgaaagtcgtatttggtctcctgctcaactgtgagataaataaccctgttcctcacactccactagaccatatgtctttctctctcttcccctccctaccagtcaatctgtggctttccaattctacaaagaattacaataaaaggcacagatgaagtaaaattttagatgagagtaaaaagacaggggcaaggagaaaagagaaaggagagaagagtggtctatctgaaaatcgagaatgaaggaaacaattacatttgaacccaggatttagctttgaaaagctgtgaacaataatcagaagtcaaatgcaattcatgactcagcttttattgtcagataacacattccagtgcattaggcaaaagaaactctcctctttgtgttatatgtaagtttatgttacatataagtttgttatatccgtggtgtataagatagatgtataaacaaaattaactttattcttggggaagaaatgcagacgttctacccattgataaaatataaaaaaatgcagacattctacccttgataaaatttaaagttggggtgttctagtttcatagcaaaccattccataactcttacttgatgcagagaaatgtgtagattagaatatatggtgg

SEQ ID NO: 99364 - DNA, 1066 bp, Homo sapiens
tcaacattgacaatcctggctgtgctctacagattgtggtatgattgagactaacagtactcaccatgtcttacaacatgacctccctaaactgacatagggttgggtgaacacacacacacacacgtaatcactgcctcacgtggcattattacaaatgctgcaaaatctaaacacatcactggaatccaaaaagcaatccatttagaggcatatgaggagattgtacggatattaaagaacaaagatctggaactatggcaacaaaccaacgttgctgttctagcctgagctgcctgttttaggcaaatgggaatgcttttggaaacaatatgaaccgcaacgggtatttctgcaagtttctaagactggcaggagtcagctcgggggaagcaggaagaatccccagttggttggctattcttgggaccgaagagataatccccattgaacagagcctacactcacatccttgagtccgtgatgttcttcgcttccctgggaacagccagagtccagctttccgtgtggattgctttcacagggatatctggcccttcaagccagtggtgtgaatgtcaccccaagaaccttgacgtgtagatactgcctacttcaagtcatactgcagctctgcctcttcccaagataggatttgaagcagcttccaacagaaaatggatgtgaaaatgtattgtgaacacatgcataggaccatacatacatcatacacacacacatacacacacacttaaacatacacatgcacatgtacacacacacacacagctatgggcacaacttcatttcaacttgtagattgtgaagtaaaggcattggaactttgtggcttgcaaatctaaattacctccttccatcttaagatctcttccctcctttattctaaagtgtgattcggctcctctcttagctgatccttctggtgtgcaggtcaaagaacactgagctgggaatcagttgtggtttccgattctgccgttgccccacccgcttccatgttggttccaacgtggctttgtggagtcctgggactcaggcacagtgt

SEQ ID NO: 99365 - DNA, 1049 bp, Homo sapiens
gtgggagtttgtccgtgttaccttaggtctcatggcagaagacatgatgtagcaatcgatattcacctcagaggacagatgtatatgctctgctgtcttaaaactctactgtttggccgggcgcggtggctcgcacctgtaattccagcactttgggaggctgaggcaggcggatcacttgagatcaggcgttcaaggccagcctggccaacatggtgaaatgccgtttctactaaaaatacaaaaattagccaggcatggttgcaggcgcctgtaatcccagctacttgggaggctgaggcaggagaattgcttgaacccaggaggcggaggttgcagtgaaccaagatcatgccactgcactccagcctgggcaacaagagcgaaactgtgtcttaaaaatatatatatactgtttgttttagcgctgcacattttagcaaattcgtccaaagaaatctgaagttttaaagagacccagacaggcagtatcaccatggtgaacatttccttataagtcaaaatttctaggatctaactattgatccagttgtttcaagccatattcaaatattaaaatactaggacagcaaaggaattgtgttggctccttgaagttcattgtaatgagaggcctacagtgactgtgtagagacaagcagctgttttcatatccgaggcatgcatcgtacaggctaggtttgagcaggcatgggttacaactgcgtaatactcaatttaacctagaatgagaaaaatctttcaggcagtgtaaacctcaatacagtaggtcagtcaagacagatacagtcaagaagcaaaaggtgtattcataattcgatttagaattttctgctttttgatttgtagtagaataacttaaccctttggactggtggacttgagcccacgcatgttggacactggcctccgcagcacatgaagcagagaagtctgcttttgccatcatgtagggactctccactgtacatgaagctgccaccactggtccccaacaaggcctcaccagccttctcgtttaccacgtg

SEQ ID NO: 99366 - DNA, 1032 bp, Homo sapiens
tttttccatgtcatacctgagaaaatgaagacatggactcaaaggtcgaaatgtttaaaaatcggtagcacttctttttttaagtgtattcagagcatctgtgagacttttttgtttgtacttaaagagcatgccagtgaataatgtgatgatgactagtacagtttggggctactactttgattcatgttaatcaccagcatgtttgcaccatcaaaacaaatttcaacacagcaataaaaaggcaagtactgtatctgaattgttttgaaaatcttattgatttgtctgaaaagtgatctatcttttcagtattatatattaatataaaatattatatttctcaacatacatgtacagttataaactagaacttaatggagaaaacgaattggaacagattgccactattttccattatttttttccatcatttaactatgtaaatttaaagtcttaatacttttttgaagtatacgtaaaaatggagtatgctgattacattttctatccttgaagaaagttgagcttaagcactgtcagattttcaaagccatatggttatttctgatctaatgttgagatgccaatcatatagtgtatgcatttcagtttagctttaagatcttgttaactgcttttagtacccctgtgaacacatcagcaaaccatcttttcaccagacagccaaaggtaacctccggatgtgaggcagtgagaatcaatatagtaagggtatttttagggactgttgatggattgctgtattttgagcttaacttcaagtgccaaaggccccagagctgactaagatgaactcaccatttactgaggacgggagaggccatcaggcacatagtgggatctgggattgccaagacaagatgtacacacctttccctttgtagttttggggagaattcttgtatattttttagtagcctaatacggtattttgatgaggactttgtaccaccctccttgctggagccaagtgttactcatttggtaacctcccggtcctgggaacac

SEQ ID NO: 99367 - DNA, 1095 bp, Homo sapiens
aacaggattacatgcagaatgttcatggtaaggagattgaccttctgagaaccactgtgaaagtcccagggaagaggccaccccgagccacgtcagcctgcgcacccatctccagccctaaaaccaatggcctatccaaggacatgagcagtttacacatctcacccaattcaggtaagcttacagcaaatgcactaacaaatcaagttcaacagcaacaggtggtccaggctcgaggataatgttggactcctaggttaagtggagacagtaactatcacattacagattaaggtttagaaacctgatcacttctgtggctgatcatttcctttaaactttcagttccgcaaatgccagcgagcaaatggtgctttgagtcacagctgcaaaaaccatgcatctaggcctttccagggctgcatagtggaaagtgaagttaacatgtgaactgggtttttaagatccttctgaaaaacgtgaattaacgttaaagtgtcaaagattaactcatttctgataactgtatgtatgaaagtggaaaaaccattcggagcaagattcagaggaaaccatttgacctatataaaatgtaaattctgtgttgttatattttaattatctgccattctttaatgcaactttagttctctgtattctcttttaaaggagattttttttcattcaggatcagagaaagctgtattttctcaaatgttgatgtgtttagaaattcctggcctctgtgcccagttgcaagccatccaaaatgacattgttcattttatttacgtttttgcaaataattgccctgtgtcatgaaccttcccatgtctgctcatcagagataaggagaagatcctcttgagccctcccataaacacacacacagagtcaggctccttcaacatggggacatcccttcaagaatttgcattttctcctgcagaaagtccagaactttcttctctcccacctacatccagtcttcttaaaacagatttctggctaggcgcagtggctcacacctataatcccagcactttgggaggctgaggcgggtggatcgcctgaggtcaggagttcgagaccagc

SEQ ID NO: 99368 - DNA, 1017 bp, Homo sapiens
gcagaggttgcagtgagccatgattgcgccactgcactccagcctgggtgacagcgagactctatctcaaaaaaaaaaacagatttctctcctatgagagtttctggtctttgatgctgcactttcctcttctgaaacatcaagtgcttttaaagagggatggtgctgactgcctggttctgaggcatgaacgacactggtaggtgagagcaagatggtacagaggagttcaaatttgggtccaccatcctgggctccgctgcatagtgttaggcagtcactgagctggttccttcccaccacattggggtgctcttgcctggcctgcctgtgttgcaggggggcggtgtcagaggagacaacatgaaagtgctgggaaagctggatacaaacacaagctgttgtttctaatcaaagttaaaactggctttatgctaaaggagtctttagtgcctcccaaaaaagtgagaacagtatttttccaggggcttctatgacctgctgacctttcttccaagacatccgtgagatttttcttattagagcggtgtgctaactatggggtgggaagagagaaaagaagggcacaagaaagaaaaaacaatccgtagtgagtaaaatgctgaaggctttattacattagtacgttacataaactcatgcatttattcaaaaaatatctataggccaggtgcagtggctcacgcctgtaaccccagcactttgggaggccaaaatgggtgaatcacctgaggtcagaagttcaagaccagcctgtccaacatggtgaaaccccatctctactaaaaatacaaaattagctgggtgtggagatgtgcgcctgtaattccagctactcaggaggctaaggcaggggaatcgcttaaacccaggaggtggagtgcagtgagccgagatcgcaccactgcactccagcctgcgcgacagagtgagactccgtctcaaaaaaaaaaaaatctatcaagcacctattttgtgccagaagttgtgcgcact

SEQ ID NO: 99369 - DNA, 1428 bp, Homo sapiens
tttggaataactgtccatatatggaatgattcattcggttggtataaccatttacagggttcttgatacacatttccaaattaacttctaaaaggttttacatgaaaactcttcccatccatagccatcaccagtttcacctcacacacttgctaatgctattaatattattgttagaatttatgctaatctgatgagcgataaaaatgcctcatgttttgtttatttggatttctttaatcggtaatgaagttgaacagctcacatgtattaggtgtatgtgtttcttacgttgtaattaattgtttaggtgtatcctttgcccatttttgcactaggttctttttcttattgatatctgagaactccttgtatatttaggatatgaatatattttgcaggtatttccccagtttattatttgccttttaaattttatggtcttctttacataaaaaggttttccctcttttttatttataatcagattatcttttactgttgtgatttctactttaagctatttagaaaacctttcataatcttgaaaccagatcacagtttacatatatatacttctaagttttaattttattgtttttttcccttaaaaaatatatgtatgtgtttatgtgtgtgaatatatgtatatgcatatatatctgtgtgtatgtgtgtgtatacatgtatatgcatgtatttagcccctaatccacctttaatttgtttgtgtctattgtgtgtgatagaaatctaattgaattttttattcaaataaataatcaactgtcgtttttctctttgttgaattttttttctttccctattaattccatatgttgcctttgttgtagaactcaatcacttcatcaaatgggctgtgtttctggcctctcagatgtgttccgagacctggtgtccctgcattgtcttaccttatgtagatttaccacagtgtcttagatgtatgactccgtttgtatctggtagtataacacagttgaatatttctcttttatcttccagtttttcttggctactgctgcctgcttatttttcctcaaatgaactaaagagtaacttgaaaccttctcctccttgataaaaataatcccctcattggtgcacatgacatcaggacctcccgaggctgtgatacgggcacgtaaataaaataataaaaataattctatcatggcttttaactggcattgcttttaagctatgaattgtggaggaagtggcatctttactgtgtggagttccttatcgtggaacactgttctttcccagtttattcaaatttgtattatagcctccagcaaagttcagcattttttttttttatttagctgctggacatgtcttgttaatctattctgtttataatttttggtgcattgtgaagctaatcctttttagagaggc

SEQ ID NO: 99370 - DNA, 1960 bp, Homo sapiens
ggctcagtcatttttcctttgagtgacagacgcacagaagtaattggctgtgcagaatggcagctcattggcggtacttaaggatacattatccccgttgtgtggcccgcagaggctgtttatcaaaactgctcacactgcagacgcggagtcgcgaagctgctgtttcagtggtaatagctattaaaaaaaaataacgtgacatcaaaactagacccgttgttgtctcatggaaagaaagtttttctttgtttagtttcaaacggtctagaaaacattataataactctggagtccggagtctgttgtgggccctggatgagcagtgtcagtccacacctgtcccctgccggcatgcggtgtggccaaggcttggtggaacacagatccttgcttcccactcatgtcgaccaaggtcactcgggagttttccacacattggatcttggttacaacatataaattggaagcttctgctaagtacccttctagcaccttggtagaccatttgcaaatggaagccttactggtcgagaattatttttctgaaataaaacctcaatatcagtagcatgtgatatctgctttcataaaccaggttttgttggaattggttttaatgtctatttgacaatttttagggaaaatgttaatgttttgtgaggcttctcagacatcagaaagttagctaaatctgacattagaggacactaaagttcatcttagttctttttaagaattgcagcatcttcagcttttatgagcaatgcgttctcactattagttgtttccgtgtttatacattgctcccactgaggtttaggcaaattcgtgtggtattgtttccatcattaaattgtaaactctttgaggcatacactgttacttctctttctttgttatcctctcttagttttgtgacctagcaattattttctcattaggtatatattcctgcatgttacccatcatgttaaatgtaagtgatggatgttgaggagattagttgctttcctgcagataatgttcccctgtagtagctctctgtggtcctgagcattggtgtgtaattcagaagtaagtattgtacttcctaaattaaggatagcttcaattatttgaactctaagtggagtgttcttttctgaaagaaccaactaaagcaacttgattcctgatgatttcagctgagacatatcaggggatggccaggaccttgagttggatgtggtaacaggtgtgcctacaagtaaataaaaggtgcttcaaacactttttttctctcaaaaatgtgtgtgggcagggaggaatagtgtttcagctgctgaactgatgcttccgagaccagcgaagtggtctgcagggtcagctgtgggaaagaggaggtgcccggaagagcctctgtgaattacccgcgccccctccaccagggagccagctgccagccccgggggccagtgagaaccgaggccttgggaaagggcttctggttcttccaggctagagttgagtccgtggcttccctgcttcctgcagtcctttcccacactggcagaggagagtttttcgaagtaatcgtgacatttttccatctcgaaaccttgtggcccattgttttgagttaccactcatatagtgaacgtttgcgtttctggagtatttctagggagtggtcaaaccccgtaacatcccaaccagcaaacctgtaaaacccgcctcatgttatcagacttgtgagcccggggtactccttggtgctttgtcttccctgtgtcattgctggattcagttgtgagatcattttgtaagaactggaaagcagagaaagaagtagtagtgaatacttctcaggatagagctgtggggccacctgctcctggaaggggactgtaaaattcagagatgaccggggaacgctcccctcaaaacagtgttgtcaaatgaaaatgaatttcatgtt

SEQ ID NO: 99371 - DNA, 1042 bp, Homo sapiens
caacaaaataggcccccattatttttttccttgacatcataatttagaacagggagaaagcagcatacaatgagctgtttctacgttgtaggaaagagctgtgtaattccaggatgtggaatcctaagcctggccacgttgctgtatttagtagtaattacatctgtcattgtgactaggtctgaactctgtactctgtcttgataaacataacatggaaaatctcttaactaaacaaaaggtatcaagaaacaccagatttgtgtcttcctagtagatatgttgaattgtactcttttacaaaacaagtatcacaggatgcagagtcccgaatgcctacatcttataagatactgaatgtgtccttggaaaaaaaatcctctcagcctgaaattccacttgccaaaagcaaggcagatctccaatgcaaatacaggagcgaatgggccccattcacaggccttaaatcgtgtgtctcactttttatggtagtgttgtgaattctgttctttttgggtttgtaattagaggacagaacagatggcgaaggcctagtttgaagtgatgtgactgttaacgtcgcctccttcatccagttgtgattccagggaacccggttttcccacacatgcgcacaacgggcgtggtgcagctgtagggtttgcaaggtagccgctcacgctgagtttttacagcatttgaagctgcctgtgaatgagattggaccgaagaaagccgtccctggatgtttctaagggtgaaggctccataggggaagggtgaattcttgtcaatcatattcctgtaattaggatttgttaaaatagaaggtatacaattctgcagtgggaataaacgtctgttttacactcaagtgctcatagaatcctttttggctttttccccgccctctttctatgtacatgaaagttcctatcgccatcaccaagagttgctcctcttttcaggcttacttaaccaataagtcaaatgccagctattattttcctagttaaatgctttggtgaagttaagtcctatt

SEQ ID NO: 99372 - DNA, 1016 bp, Homo sapiens
gggatataagtacagctaaaattattctttggaaagaatctggcgcttttgacacatggaagcttgcactaatcaaggcagctcagtaagcacacacacatatccatatcaaggaagtggcgcagcgaggacatggattagcatggtaatgcagtcaccccctgctaatcggggcgagtaccagctgatccgtagatggggtatttgaggaaacactctttctgagttcagaatgggccatgtcgtcagtcatgtatttcatggtaacgcaaataatatttgggggacgatgccgaaaaggtccttttatgactgccttcctgtggaagccagcatcctatactgtttggggctgggccactttttaaggacttattgctggtacagctgtttccttgtacaaccctgttctgtctcttacacttcctgacctgacctctgcattcacaagccattccaatgacattttctaggtttttggataagtgttactggtacaacatacacataagacgcacagaatcataagtcatagccacgtttacaggggccgccactcacatccagaagcagcaggtagccagccctcatggaccccttcctgtcccgtgcacccccaccccaccccaccccactcacaagggtgaccaccatctgatttctcactccgtagatgggtttcgcctgtccttggacgggatcctaacagttggcactctcgtgcttgtctccggctctgtgttctgtgtgtgatgtcaccgcagttgtggcccgtgtcagtagttccttgttgtcattgggtaatgttccgttgtgccgtgatgtacctacagtgatggacagtgccgtcattcccagcgtggggctgttatgagcagtgctgctctgaacattctagcacctactttttggtggccatgtttatgtgcatctgtatgatttaaatctgaaagatgtgaaaggagaagagaaatcttaaaggaggaaaaaaaaagaagtggacttgaaatgtttta

SEQ ID NO: 99373 - DNA, 1016 bp, Homo sapiens
atagtttctgtctggcgcttccgtttgccatgcaggcaggacaggggctgctctcggtggtaaggtgcactatgtgccagcgtgtgggtcccatagactaactcgcgctggtttctgtggtctgcagtccgcggtggtgttcacctgacttgtttattcctagggaatgtcactagtgcatctgggtctcagatggcaagcggcatcagcctggtctccttcaacagccgacccgacggcatgcaccagcgctcctactcagtctccagtgccgaccagtggagtgaggctacggtcattgcaaactcggccatcagcagtggtaagagggggctcagccccacggacccgcagccacctcaaggtccttcgttgtaagccaggggctggacaggacgccctaagctctcatgctcctctgggagcgcagcaccctgtggggcggctgcatcagagactcacatcttgcctttcatctgtggaacgttttgtccttgctaggctgtcttgcccctgtcatctcatctgttcctctttggcacagggaggaggtagtcatcccatttggtcagtttggaaactgaggcggcagacagggcaactggcttacccagggtcacgtgacagaagtggcagcgctgagaaataagatctgattttatctccccaatcacactgccctacgtggcgtggcccacactcttccaccactagtgcacattttatatcattagggtgaattcagtctccttgtctgttttccagaattcctggtgtaccctctaaattctggagtcccctttgtaatccttcagttttcaaattcctttggcattattattattattattattttgacaagtgtatccagctttttggggaataagcatgcacgttggaaacgatctcgccgtctgtgtggagcgtgaatgacgcagcaccgagggcaccctggtggctgcagcagggtttgcctgtggcgttttgtctctggcctgttcaccggtatttaaagg

SEQ ID NO: 99374 - DNA, 1053 bp, Homo sapiens
catttcttcacgtgactcttccatgtggctcttgagcctcacttccctcggcctcccccaggccaccacgcagcctcgtcaccatcgagcacaaacaccatgtccatcttccacatggaaggagtgtatcacatgtgtgtgtgtacgggtgtatgctctggtccctgtttccttctggccacgtaatcattatatctttccagtagactctgtggttataaagcagccgatcctcaatggaaagcatttgagtttttgccagcttttaaatgtcttttctcattataaaaatgttttgcacgtcgattttgatgatgggggttcgaaacatgagtttcagcttcggaagctgtctgtcccacacttactttcggagccaatgcatttgaaccacactttccagcaagcatgtccacaccattcatcaattttaatcattatagttggagcattttttttctcttcttggatattatactgacaattttagtgtatgaccagcaggcggcggtaatgtgatactgccggtctctgacctggaagcttctttgatgggagggtatcagtgaagcgtggtggggaggaaatacatgtgttgacagcctccgctgttgtgaccttcatgcctaacactcgtttccctggggatcatcatctctgataactgagcttccaaaaggctgagaaaccaagaccatacttatcattattagccaaaattcaaacccagatctttctgatttcaaagcttgtaatcattcccctctgcttttttttttttaaggagaaacgcatgcttagtactaaaacattgtatcataaaaattgtttgtcttttgatagcgcttgcttttcaaggaaatatgttctaagatggatagacattttgtcttctctcactgatgctgaagtttcctttatcaattcttcccaaatcttggctggcattcaaaagcgttccctgggggttgtcatcaaccttcagcttagctcagtgttaaaggcccctgggctctcatctctcaaagctgggcactccctgcctcaccgccg

SEQ ID NO: 99375 - DNA, 1054 bp, Homo sapiens
tttctgtggtttgctcagttccacaacctaggaacccaacaggttaagaaccgtcaatcatactgcctccctggtgactttgtcaactgttagaataacattggtcaaatctttttcatttcctccctcacttccttttgtagattttataaacacatgcaaaaaggcaaagacctaaaggacttaatttttttttttttttttttgacacagagtttcactcgtcacccaggctggagtgcagtggcacgatcttggctcactctgaggttcaagtaattctcctgcctcagcctccctagtagctgggattacagccgcatgccactatgcctggctaatttttgtatttttagtagagacggggtttcgccatgttggccaggctggtcccgaactcctgacctaaggtgatccacctgcctcggcctcccaaagtgctgggattacaggcatgagtcaccatgcctggccacttaaaattttggggggtatcgagaagaaagaaaggcatggaagaaatgagtgttggagaagagtggtgtttaaaatgaacaagttgttacaagatggttataacatggctaggtcgagagacagccagagatgggtgacagagggtggggtgtggctgagcaagcccactgtccagcttctccgttaggatttgtatgttactttggttttgcattcttaaacttctttcaatgaatatatcatgttacatcttggctttattatgtgacagataaggttattaacagaaagtgatattaatattaattatacaatgatactaaaaattttatatcacacagaagcagatggttatttttaatgacttaaaattttactcttttatatgagaagaaacattttaaacatatttagttataaatgctattttaattgctacattatttctgcagcgggatttttaaaatcttactatagttgcagggaaatatttctatgtatatttcagatcctcttaaattatatacttatttacaggaaacaattataattacattgagaaaacagaatggggggc

SEQ ID NO: 99376 - DNA, 1033 bp, Homo sapiens
cctgtgtctgtaagtcagtctgtatcagtatagaattaggattggattagtgtgaagtgtttgcactgtaaattttatctgtgtttttttttaaaaaaaactggaaatattctgttttgttccactactatttccccagggccttaaacagtgcctccccctgagtggccctgggtagttgttgatcatatctgtaaatatctggagtttccgcacacacagacttcgagtgtgccatcaagatggtgtccctcggtgctgagcctcaccatcctggtggtcctgagcagttgcatcccctccttcagctcagccccagggccttctgttcagggtcactgtggataaattaccagtggaacccaagccctcaaagctgccctatgggctgggcggctccaagagccagagtattgctctgtgacctccagccggttgactggggcaattgttagagccaggtgtggcggaaggacccatacagcctctttcaagtggctgggccttctgtacgaggcacctgacaccacgatgctatcaccatcctcgctgactgggacatgccacccacctccaataaaggcttgggagtcgcaaggatcccttttcataatgaaacttcctgtccacagtttaggagagagtcttgaaatcacctggaacaagaagtttttcaaatattttaggtgtttacaaaatatttctatgaggacagataagggggaatgaattttgcaaattagcatttgatttaacccccaaaaaagtaccccgatggttcccacagttgccttctaacataacaaaaggttacatgtgatggccaagggaaaagaaaacgtaatttatcgttataagatgttaattttttattctccaaaatgttcagactgcaaggatatttcatacagatttgttagctggtatttaaataatattcaacactcctaagccttaaataggcaattagaagtatactgcatttttttccctccagcatttcaaagacattactcaaattttgtttgttctt

SEQ ID NO: 99377 - DNA, 1902 bp, Homo sapiens
gatcaagtgcacctacgcccagcacctcccccagcggacacatttagagaccctcgggagcgcgagggatatgagaatcacaagcacagagactcatctcttgaatatcacccgggatatcaaaaacctatcagcacacctggcgaggaccctcaccaaggcgagctccctgcaatggttcatcaaaaattgcccagctaatgatcggctgggcagataatcggaggagagttaattgtaaggttcgatatggcatcttgtcagcagagataagttgtcacgttttccacttgagctgaaactaaatgattgtaaaataagttatgagtgtccttgggcctgtctgccggaatgatagctaagaatacattcctggcccatcagtctcaagcaggctgcttgatatttatgcggacggaatgttattttattccccctctagtcatgcttgtcagctctccgagtgaaaagtgaaactgcttctttgactcatacttcacgttccgaagctcggagagactgcagattgtgatcattattgctcgtattatatattttttggggtgtgcgttgaacattgatgcccgattgggaagaactaatggctgacattgaatgtgcgggatggtgccggcccatcccggctcagcgccgcgcagctcgggaccccagtccctccgtcagagccggtttagatgtggagtaatgaggcgctcgcttttttaatttggcatggcttttttctcttagcctctcccctcccatacttaacgccgtcgacagtagtcgtctgtcccggtgcccggtaattgatacaaaataaaatgcattctttgtatgcagccaggaggagcggatggcgctccgtgggccggctggagctcatttacagtgtctcaggcggggctttcggggcctcttcaatttgaggaataccttgtcaggcgaggggagtagttggaatggaaaagcacagcgtggaagcctagtgcgttgtgattgctcatattttaaaccaggggaatgttaaacaactccttgaaagcgagctctcgacacctagaagccaggggcattcatattcccgtggccgagctcagcgcccagtggacgggaacccggtccttcttgccatgagaacacccagcccaggagaggtcagggcctggcctccaggtgggtcctctctggtcgctcctcactggtcttgagtcccaggtgacacttcctgcccgacttctgtctcctgccacggcccccctcaattcacatcctaattcaccccgccatcaccttctcagcaccatgatggccactccctcgtgtagccggttcccctgctgctgcagccgggccctcccacaggcaagcatctggaactagcaccagagcttcctcctgtcaaagctgtgccactttccccactggctgcctgtccgctcctgccaaacctgctcccacccgccccagcccagagcatgtggcttctctaagggcttgagtgcctcccttttgggccaccgtagacaccccacctctgagtggtcaggcgccactggttgtctccttccagcaagaaagttggagtaaaatgtccagggcctgggctatggagtgttggagcattgccgtggcaggagaacgcagtgggcagagacgcaccctgccctgcctgcagcatggcctggaaagtcactgcctcaactccatgcctccaaatgggggcggggagggtgcttgcggacccaccctggaggacctcggccctgtaagcagcagatcagagcgtgggctggtgctgcttccaggatcacaggtgctttgcacacgtcagttactcgagtcatagcctcctgaggacgactgcaaggagctcatgaatgctggcctggctttctgttt

SEQ ID NO: 99378 - DNA, 1194 bp, Homo sapiens
ggcatagaatttttcactgataataaaacaagatgaagttatagtcatctgtaatattgaggccggaagaaaggatcaggaatcccttatcctgtgcacccacaggagtcaaacccacttaagatgatatttccaaatgtattcttaaatgcatcgttttcatttctaatatatcaaggtaattttaagaagagaaagataactaaaaagcataaactcacccctttccttttgcagagctccagtcatgcagaggagagaaggagaatgcatccatagcatgctgctgatagaaaaagaaatgcttgtgttttaatagcgggaggcacagtagagcaagggggactgagcccatctcataccagaggctctaggcctccaactcagcaatacagtaatgggatgttatttgcagggcctgtgtggtatgagaggagcgtggctgtgctgtttctgcgcattctgctttgtaagtgctcactctgcatttttttttttttttttgccttttccggtccaatggcagacacagggctgggtgactccgtatgctccagccccagtatctccagcaccaccagccccaagctcgacccgcccccctcccctcacgccaacagaaagaagcaccgaaggaagaaaagcactagcaacttcaaagccgacggcctgtccggcactgctgaaggtaagggttccgcggtgccccgggagagagtctccactgcggaaaattctctgttatttttcaaatgcgtgaaattagacacccttagcacaacaaatgcacagtaatgctggtcaccgtatgtgctttctgtttgcaaggtggcacgagagggcccttgggaccttttcatcactgtctgattctcatattacgcaaccaaatctgctgtcatcactcttggccgccgtcgctggtagcgggtaggagtgctggtctcccagccaccagcctgatccagttctgaggtctcgccccaccctggcagcctgggcgagtgtcctctccagccaaggtgggccatgctgcgtgactctgctggggacagtgcccacttctagtttaggaatcatctctgatattggttactcttaactaaccagacacctgccttgatttcagcttttagcaacgtgttatgataaacacttcttctgttaatgtccatcagctctttctggtatgtg

SEQ ID NO: 99379 - DNA, 1062 bp, Homo sapiens
ctaatttccctgtttccccagtgaaaaggctgaagtagagagaggttaagtggctttcttgtccagggtcaggttgctggtaggtgacagaactgtctcttgattctctgcctcaaactctttccaccaggcaaaaagcaagtctttgaggtatgtggagctgcttttgaatctgggagtggggcacactgaatagcttccttgatatttctcagattccatgtaaagacactgacttttatatggctcataacatctagaagttgtgtagcaaagatctttctttaaaaatgcaggaccagactggatttacccaatcttattatacaagagggtatgcagaaatcctggtgttatcccccccttgggttcacagcgctttgttctgaaggtctcagaagggaatttattttatccttctcatcttgttcctttggttgttcattctggtctttatcgcaccattgtgtggttgatcctggatggatattgaaagattctcctgtagagggtaagtcacaaacgggcctctcactgttatggtagaaaatgaattgctcatcacagctgcactcactgagcaatgaaatgttgacaaatttcattaactccagagttgcagaggtcacccaggacttagtttcccttcactctttcaaaggagaacctgaaattgtagatcattttattctttcatcaaatatgaagcaaccaccacagggaaagcactgtgtgcttgcctccatgggagacgttgagaaataaaactcggttcctctctctctccaaggagtttagagcctgattatggagataagacatgcaagaaactgtaacgaggatgtcaggcagaatattcgagaaaggcatgggaattcagaagaagcacaaatacacactgagttgtaaaagttagggaaggctaacctgttgtagagcttaatttttattgtgcagatttagcacataatggttatcttatttaataaaactgcagaaatcattactttttcattaaatgttgcctacttacaactttaaacaccagtggtggtgatttaa

SEQ ID NO: 99380 - DNA, 1039 bp, Homo sapiens
tccctcccaagtcttggatttgttgtcaggagacatcatccagtgcaaaggaagaacaccatggatttactgcctgcttgtgcgctacctcattgcatccttaaaacaaccctgtgtggtgttggcaggtgggtggtggcatttctgttgtcacaaatgaggaagagggttgaataaagttgagtaatttgcccaaggccagtagatgagtggcctctgggacttggaagtctgtattttgctttgcatttcatctgttaacctggaaaaggcttcagggggttggagtgggaggagagccttctgcaggcctcttactctcaatcctgtggctctcagagttgcttctccctctgtgcatgtccatttctgcagcacagcagggccatgcccacggctccccaccactgcccttgagaactgggaagcagtcattcctttgctggttttctcaggaggcctgttgtgttgtggtatggcttccttgcaaacaagtgcatgcacactctgatacgtttttaaaaaaaaaagatgcaaatcactgcttcagctgctttgcagacagttagaacctacaggattagatgggctctgttataaggggacatctctcttgaaatttttttggacttacggacatttaattcagatgcagtgaacccagtttttctgttcattttaagattgatatgctttttctttttttggatgacagaagtgtatttgtggggtttttttgttgttgtttttgtttttttttttttgggatatgatctcactgtgttgtccgggctagtctcaaatccctggtctcaagagatcctcccatgtcagcttcctgagttgctgggatttacaagcatgtatcaccacagccagctagagtgcacatttttaagggcagtttgaggttggagggaggagggtggtgattgattaagcccccctgtcgttcatttgaatcctgcatcgctgatttaagtgttaatcaaatgcctgtctcgcctggctgcggggtccgatcatagttactgactcg

SEQ ID NO: 99381 - DNA, 1042 bp, Homo sapiens
cataggcaccaaggtgtggagccagtgaaagaacaggcgcagcgaacgttccggcaggcattgccgtgcacggacacacaacttcacaagggcctcttgtgcacgtgggacatggagaaaattggccatttgtctgtggggtaatgggctttgctgcaatatgaaaatctatcaaatgggtaaaatcaatgacattgtatcagagttcatgaaaagtgcctactgcacacagtttaattctatttaatttttttaagtggaaaaaagcaaaggaaaaatgttttagttttctcttaagctgatttcgctctgctttttcttaaaagtgcctttctagttgccacacagtgatgtgatcattatctgccacctcgtcgccttgctgcctctgcatgcagtaaaatacaaaaaaaagagagatagagaaagcaggggagcttgtgaagtatgactccctatcccaagactcattgcctgcgattcgtaccgcttgacagtaatgatcttattacagtactgtggaccttgaagagatttcatgaggagagtgaaaggacgaccctccgtgtaatcaagtggcgctgaatattccacgcgtttttgatcacacactgattgggcacagttttagcccatcttctagtcaattatgcatggcccctgtgctcctcgaatagtcggaaacattgatggctgttgtctgggttttggcaggcagccaggggtttgaagtgccttgtacatcgtcatcccaggataagtgctttttagttggaattgattacctttctttgggttttgcttaatagcaaaactgcatttggagagggcttcaggtgaaaaatggacatattagccattgagagcatccgaactcctagtcaatttttaggcttcccttgtttccgtctaatttctgtttaatgatacagtgtttgataatatttaagatatctcaccgcatttgccgctgagcacacatgttgagcgtcgaggacaggttcaattatgtggccactgtgttcaggttcccggattgatc

SEQ ID NO: 99382 - DNA, 1186 bp, Homo sapiens
agtgctcgccgcctctaacacatctccacggtgaccttcccttcccttggaagggggcgcttgtcttttcagcggtcttgcctccgaatcttggcttgtctaggattcttcctacagaagaagttcatataaaataaggggttttattatgggttatctgaagagtgtttcttaattttaataagttaatattccaaccataaaaacttctgacattttacccgaggctgtgcttcagcagattgacagaatgcatttttacagcacttagaaaataccagatccacgaagaacaaatgatcaaagtttcaaaggctgtaattttggaaagctggcatatataatgatgatctcttcgcagcctggtaattttacctggacaagtaaatccatttctcacatttaaagagaatcaaagagtcagtaaacatgcagaaacacttttagctgtgaatgcagagtaactcttacaattaacatataattacctcaacgggccaattaattaagcaatttaagatctataactattttcatgattttcccccaaaatattactttattctgcacaccgtggggacatcagctgggagggtcatagctaggaggtcagaaggaaggggggacgattcatgcaatgaggcactgctgttgtggggtgttggtttgaagaactcataaatggtaaaagtaacctgtattatcattggttctaggggactactgaagataagaattttcaaccttcctcttcgttgtctgctctcccaggctcattgaaggaacatagagaaggtttaggccctgtttcttttcgagcagcacagaaatacttgcccagtccgttcgtggaaggaaagaaccgaagccagcccttggctgccattctttccagacttccaccattgtgccctgagtggttccagaatgtcattgatgggaaattggttttctttccttctggacattcaaagattaatatgttactgtcatcagtgacttgttaccttctgtttctgattgccagctcatcagcttagtttgcccaggagagccactttttcccacgttcttttacttgagttctgagacaagatttgatacccattcatttataggccaaatccagttcttattttaattttttttcccaacccctaaaaagcatttgcaaacactcctccac

SEQ ID NO: 99383 - DNA, 1099 bp, Homo sapiens
aggccaaactcgcctcctactgccccttggccgattggagattcgtatctgacaggtgtcttctaatttttttaacttacgctctgacacatagttaagttgtgctgtagttaagagaatagtaaacaggtgagcattattctattaccacctactgatccttttatgaaaatattcttgccttttaatttaaatgccaaccatcttgattagagaaatagtgttattccttcctgcacccaagccctgacgtcagcatgacctggcggtagagccagcccctgccagctggctgcccccggggaccttctgttcaccatcaagcggcagttcatctggagtaaggagagaggctggagcacagctcccagcctgcaggaacagacctctggagatgccaagggcctgaaatctgtgtgtaggtttatgtagacagaagtaaccatatattgaaattgtggttaatggaaagcaaagtcgttttagaatgttgccaaattgtgctcatcaaaagacgcctgcatactttttaaaaattgggaaccactgaaagagattaatccttgccaattttttcactttttcactcaagtctaatttatcagaaaaaataattccaccactagctaagtgtaggagaagaaaaaaatcactgaatgtatgtatcattgagacctatttaattattctaccagtgttctggctttacccataatgaagacaggagtgtgtgtgcatgcataggtacatagatacatgcatattgcctttaatgaagatcttttttgttgttgttgttacggagtttcactcttgttgcccagactgtagtgccacggcgcaatctcggctcactgcaacttctgcctcccaggttcaagtgattctcctgactcagcctcccgagcaactgggattacaggcgtgcaccaccacgcctagctaattttgtatttttagtagagatggggtttctccatgttggtcaggctggtctcgaactcctgacctcaggtgatccgcccacctcggcctcccaaagtggggattacaggcatgagccaccgtgcccagcctaatgaagatcttttaaaatata

SEQ ID NO: 99384 - DNA, 1627 bp, Homo sapiens
ctaactcctcactcaatgtcattcatcaataggttcttaaaacttcgacttgaagcgaaaggacttataatgaagccagtttttttccttatcagcatcataatgaaacaacgtgggaggaaacaaagttatttgaggacctgctgtacacagttttgcttaaagtcacacatttccaagaacctgtcaatggcattgaggactttctgtacaaaaatcactacgcgtgacagctcaaataataaacagttgttcagagacagtggtactgcgtccccctcctccagtccagtcccccaccctgagcgttgatggtggggtgtgcatcccccaccccccaagcctgttcctagaaggccatggcgcacctgctctgtgcagaggctgggcgaacaccagcccgagcctgacttaagcaggatgggcatggacatcgttggcactcacttccctgcagggaggtgcacagtgaagaataaaacacaggtgatttcagatagtggcacatgcctgaggcaatcagccccgatggtgtggcggggcaggtactagagattgtgtttgcagtgagggccactaaggggggcggagaagacccctgacagcaagaaggagccccacttgtgctgttctgtaaggagggtcttccaggcacagagagtggctgatgagaaagggcctgtgtggaaggaaccagggccaagcgagggaggcagatgccgcgtggcgtgaggagggtgagagtccatgccataaaggactgtcatccatctgtcattggctgaattgtgacctccagaaagagatgagttgtcctaacccccactacctcagaatgtggcctcatatggaactagggtcatggcagatgtcattagctatacaggaggggaggggatggaccctcagaggcgagacggacgtacaggaaacaccacatggagactctggcggtggctggggcagcgcggctgtggggcagagaatgctgagataaacgccaccatcagaaaccaagagaaaggaaagggacaggtcctccggggagccttcatggggagccctggcatggccttcaggcctccgaggaacccagaggaggaaacgcatttttgtggtttcacgccacccagcgtgcggtgcattgtggcaggtgcaggccgctagtgccccccacccagtctctgtgtcctctgcacagtagggagctggggaaggtgtgtggctactaacgtgagcctgttaacgttgaaaatttccctctggcggctgggcagagtgggctgcaggggctgaagtaggcagtggtgacagtggcttccccaggcatcagcgccacaggaggagagacacagactgtggcttgcaagcagagctggcaggacttgctgaaagagttaatatgggaagtgagaggacacagaggccagggccgggagaccaggaggccgagagcggtagaacgtcacatcctggaggggcggggatttccccttttgttttgtttctgtataagatcataccatgtatattctggaattttacttttctaatttaacaccccgtgggtctccagttcttccacaagctgtttgaaaggccacagggcactgcgtggaatgcgtgg

SEQ ID NO: 99385 - DNA, 1062 bp, Homo sapiens
cctcagcctcccaaatagctgggactacaggagtgtgccaccggctaattttttttatttttggtagaaacgttgtttcaccatgttgcccaggctggtctcaaactcctgacctcaaatgatccacccacctcagcctcccaaagtgctgggattacaggtgtgagccaccatgcccaccctctcccctgttaatttacctctttcattagtatggtacatttcttagagttcatgagtcaatattgatatgtttttattaaagtccacactttatttgcatctctttagctttaacctcatgccgtgtctctgttccaggatccaaatcctattccattgtcatgcctccttagccttctcttggctgggacattttctcagacttttcctgtctttgatgaccttgaaggtcttgaggcatgctgggccaggtgtatgataggaatccctctactggaatttgtgcaatgcttttctcaggtttcatcttgagttacaagttttgtggagaaggaccacagggtgaagtgctatttccatcctatcctgtcaagggtatataccatcaactttatttatggctgctgatgttgaccttgatcctttgacttgaggtagtgtctgtcaagttattctgctgtaaagtcattgtgcccctccacagcccatactgaacttttggaaggaagtcactgtgcacttaaggagttgggcgttagaccccctgtccttgagggtggggtgtctatgtaaattttttagaattcttttgcaggggagatctgtttctctcccccatttatgactatattcagttgtctatttgtattcatgtggacttgtgaatatttattttgtattctaggctgctatccaatactgctgtggcccagattattccacccgtggctcctgggggctcctctggctgctcccacaccctttgccctacaccccatctctgtggggtttcttttgtttgagcactttccttcctttctgtcagtacaaggtgcattttgtatctttcctgccacaatcttagaatcggctgtttcc

SEQ ID NO: 99386 - DNA, 1052 bp, Homo sapiens
tccaaaaaagcctttcctttgcaaaatgaacaggtactccgtgaaaacagggagagaaatttctgtttttcaccgatgcatttctcacgttcatctgacaatgtgcaaaacaaaaagtctacattagaaatttatcatgaagttatactctacttcaactcacttcttttcagtccctgtgaaaacttaatactcttggtgttgtactgaaatacccagtggatttggggtgcacctgtacccttgatctccacttctgcgtgtttctaggccaaagggaaaaccaactctctacctaattggaacttctggttttattgcatatcctggaggtcttgcttcgtttttattttcccgggttgatggtctttcccatgtgcacctacgttagcccactatgtagaacgccttggcagttttcacagagtaagaggttgaaggaagccaccaatgtgaaaatcatatttgctgtaaagaaagaaccattgtgagttgttggaaaccagattaaaattccataattggagattgatgacttttatttcatgagttttacttagttaggtgttttatcttctgtgttttgtggctccaaattacgaagactgttggccttgcaagaaactgatcacggcaaagttattttccttactgaacacgtgtcctatatatttgcttggcctcgggttttgtttaatcccttcaaaggccctttgaactgatgtttcaacatgactccttctctgtgagctctccgctaggaagcggccatcatgtcaagccccttcacagctaaagtagtgagttcacatagtcgaagaatcttctgggttgcatcttatgaaaaaaagaaatccactgcctttttataagagaacagaacatttacaccgtcttgttgagcaaatgaacgttcaaatggccagcacaaaagaaatccccaatctctaacctcacaatgaaatcgccacggacaaaagatcacgggataccgggagcactaaactggaagtgacacaaaaccacagcagaatccgctcacacctgccgag

SEQ ID NO: 99387 - DNA, 1040 bp, Homo sapiens
gttccatttaatttgcagactaaagtgagaagagatcagtctcgttgtctacactggagctgacagtcagtttgtaccacatctgaaattatacttgtgggatttcatgtccattgagattcgcgtatgtgtttttaaacatgtaagacagtgctgagacatcctgccgcatacatagctatgggaggcattgtgaaactctgtttaccaaagagacttttgcttacgcagcaagcaaaatagcagaatggaaaacactaacggaatgctcacaccctgctgcctttttgtttaataacaggtgaaattttgatactagaataatagattttgtgagaaataacattagtaacaaaatcaaaataagttagcctgtgtttaagaggaagaaactgtattcctgaaagtagaacaggaattttactaaaaattttaattaaaataaagacccggaaagttttagtctattgctagtccccctgaagtccccgagaatcgccttttattccaaaggcctgagaccagagggaggctgccagtggtgggcagtggctgggtggcaccaaacatcagctcggagcctcctggttccatttggcacagtgtctccgtagcccctcaaagtgattccaggcagcagcatccgacataacccaaggtgttattgatgataataggattgtattttcttgttgagaagcttctaaacaagggaacttagagcaatcaatgcccccggagaccgatgcacatatcaggaccttggtatcagctagaaaacatccatttgtttaaggggaagaaacaggcacgacattttgcacattaaaatggattatttcatcaataggttaatagaaagccgggctgcaagttcacttcctgcttatacatcctgtggtaatgggagagcagagtgtgaaaaatggaaggcataaagcgggcgaggaaagaggctttctgcactcgggcacccctcccctcccgaggggtgcccagcctccattctgcctatttatatgtaaatattgctgcaagag

SEQ ID NO: 99388 - DNA, 1032 bp, Homo sapiens
gggagctgaccgttggccagctcatgctttgggaaccagagggccagcctggctgcctgctttgcgggcttaagacctgcctctggaagggtaagggcctgcccgtccagataagtgctgctcacctgcattaaacaaacggccacacagagcccagtgggagcctgcactggtttctcttcctgcctgtggcagttgagagagacagacggtcctgtgagaccccttcttcagaaggtgaatgacagtgaccgccactaaacattccattccacctgcctgcacggcagtccaagccctctagccctgtgacctggggctgtgcctttgcttgcatttgcctgaagagttgagccaccctgtttaactcttgggtttttataaaatgtctcctgaagggcggagagaatgcctcaagtcgatgtcttccctgccacagatgtcagcatttctgagttgatagttgggagggtaagggcctggtggggtggagaatgtgtctctggagggtgggggccccatctcagtgagccagccaggcactgcacacagcctgagtggtgggcctgctgcgcccttgttaaattggttctcttccgaacccagcgtcccactgtcggtgacttggcgttttgtcctttctcctgagaacctgaggtggcatttgctcttctggttcctaggagctccatttagagccgtaactcccccgagtgtcaaagagaatagactcctccctccaggacagcagaatggcactagggggttttgctgctgtaggtattgcctgaatcaaaatctgtctcgggaagacaacttcacttttaacagctcttggttttaaaacctaccttctccaacacataggcatgaactgctcataaccagggtctcttgatttgacatgctcctaatatttggccgaatcaaagggcttgtggcgactggcatcatagctccttcaaagggtgtcatcatttcccaaggcagaggccagtttttgtgctgttttgagtagccacgtgtgaaacc

SEQ ID NO: 99389 - DNA, 1745 bp, Homo sapiens
tcctgagttcctctgttcaccgcaggggagttggagggctcagcccagggagctccatggcacccacccgcttcgcgcagacagctcggaggcaacgtcacgtgctactttgacctttttttttctccccttttcatttgttttcttttcctttttgttttctctctttttcccctctcccctttctgctctcgggatgcagccaaacgcaaagcatggaaactaaaccgtgttggtagcctgcgaaatatatacagcagcagcaccaacactgaaggtaacgcctccgcacctccacccgcccacacctccacctgcctcttcccctctcatcccctgcccgccccttcctttccaacacaggcatggaaatgcaatttgcccaaagccgcatgctcccttattgtgtttgcagagtcattcctgtggtcttttcatctttttgtttgtgtgttttattttaccattcgtgttcctttcagcttacttaaattttgacctttcccttcagtcgtagagtagtgatgtttaaattacttcagaaacctattttctcctcttttttcttttcctttatacatgtgggcactcagtgtaatatttcccaagttattacagtttttaaaagtgttagtatcaggtgtaatgatctgtagccaaatacaatagtgtgccgtgacatttaagtaacagtcttaatttgttttgtggaagcattctccataatgctctctgcagctctaatccacaggcaggcaggcccgggccatttgcatgggctgctatttgcttgtaaagtcagtattttgttgtgtttctaaaggtcgtctggtgccaaagttcacaaattgacttgcgttgcttttttcaccgaagacagccgtcattgcttttgtataatagcagattgaatttttcccccaccttcatttgaacaacataattataaattgcctttttttttatgattacaaatgtcaagggtcggaattactttgatgccaggcaagggaaaaccaccaccatcagcccaagcgcacataagggaggcgggggcatcgggcgtgtgatgcaaagcaggtcacaatccagcgatcttggtataatagggggacattttttttcacttaagtgcaagccaaatgggtcaagtaatcgcaagctcgtgccctaacactaattgacttatttggggattattataactgtaatatttttcttaatgtcactgttttctgggctgttgattttagcgattgccaagcaatggcattaaatctcttgtaaattttaaattgcacgttatttctgtaaacaagtccctctcttcacatcctggtcattaacctttgccgatttatatcaccatcctctttttttctttctttcacaattactcctgtcttgccgctgaacgccctgctctcagccaggaaaaaaaagaaaaagaaatctggaaaacaaatctacattttcactatggcttgttaaagagccattttttaatcataattttttttttcatttctcaagggaaaattgttgtctgttaagataccagtggagcttggcctcattggtatcttctttcaaagcactcaagaaataaccaaatgaaagagggaaaagaatagaagttaagaaacggtcattcattatcatttttgttgcattttaaagggtattagtatactcttttcaccgttttttaaatgtttttcaacttagcgtgcatatcatttctc

SEQ ID NO: 99390 - DNA, 1718 bp, Homo sapiens
ggagaaagaggcgataccaagcacgcatttgctaaatgtgtggtctgtgtcagcccggtgccaaaccctcccatgcgctgtcttttcattctgcaaccctagtagttggtgcccctgtgggccccacttaaaggggaggaattgaggagcctgaagggtcaagtcatttgtctgaggtcacagaaatagcaagtcccaaagcaggattcaaacccatctgttgtccagcctgctgtattttctcaagaatggaaaggctcagaagatgtagcacattggcaaggatttgttaagtaaaaatacccaattttggttaaagtaccgggataggtacagtgcccacactgatgatgaactgtaaacacctccatggggcctttcgacaatgtatataaaaagcttttgaagagtggatgcccttgactccagctgtatactccaggaactaaaccaatgggattgagtaaggcgggtgcagagatctgtctttccagatgttcatcacagtgctttacatggcaaaaaatcagaagcatcccaaatgtctaacaattgaagagcagttcatggtgatgtcttgtctttgctacctttaaaaatcatggaaaaagacttaattgagcctgggcacggtggctcacgcctgtaatcccagcactttgggaggccaaggtgggcggatcacctgaggtcaggagttcgagaccagcctggccagcgtggtgaaaccccatctctactaaaaatacaaaaattagccgggcatggtggcatatgcctgtaatcccggctacttgggaggctgaggcaggacttgaactcgagaggcggagtttgcagtgagccaagatcacgtcattgcactccatcctgggcgacagagtgagatttcgtctcaagggaaaaaaaaaaagtggggggggtgcttaattgagataaagaaacttcataatgtgttgtaaaatgaaaaaggggtatgacaatgagtctagatgaacctaacgagtatttacaggtatttagaggggaaagatctgtaaggctgcactctggaaggttagcaccagttgtgtctgagtggtagggtcttttgaggcttggggattttcatgcagcgtggaatttggaattgtggtaacagctccctgacccccagttcttgcagagaatgctctagaccgccaggagccccctctgtctgctcactgggcacatcccagagcactgtttccagagtggacgctgagcctctggagctttgggggtgcctgtctataaagggattctgagagccagtgaatttgggaaactcttaacaacgtccgactcccaggaagttgcagccttcggacacctgtgcttccggggagtactgctctgaagctacctgttcagcatggcccaacccagcatgtcccaggcccatcggacagtggggcctttgtttagggtgcctgttgcctgccttctgccaggaacatgccaaggaaagtccacacctgagggcccctgagaatcctagggcttgggaccctcagtggctctcaccagcaggtctgaccttcatggacaggccctgagaggcagctcaccgtttctgctgctttctctctgcccatccatgtcgcccatgaagccctggttggagctgaccgtgcgctggtccctcccaccctgctgcgtggacctcacaggtgcccctctctcctgggcctttc

SEQ ID NO: 99391 - DNA, 2512 bp, Homo sapiens
gactgagcactggctagggagcattttttctcgccatggatgtggttctgtcgttgtgaagtttgactgattcgtcgccttgtgtttctaagaacggttggaatgatgcatgatggtctgattgcgtttagcgttctgttcctcttcccgtagatcccaactgggccagtttgaacttgggagccctcatgtgcatcgaatgctcagggatccaccggaatcttggcacccacctttcccgagtccgatctctggacctggatgactggccagtcgagctcatcaaggtgatgtcatccatcgggaacgagctagccaacagcgtctgggaagagagcagccaggggcggacgaaaccatcggtagactccacaaggtaggaactttggaagatgcctggctcccgacacgtttgccaacagttaggcaactggaagtgatcataatgacagccacggttgggaaggccctgataacctgtaggaattcgggaattccgattcatccggcataggaatgtctgtgtttaaagttggtcttgagcagacgtggataattcacactccttaattttttatgtttgtttttaggcctggggatttctctcccccctcttagaaatgtattaagcttctaaccttatgaatatattactttaattaatacatttctaataggcataagctgtgccgttaacactaattatgaatttttgatcctttaattttgttattcttatagcttggataagcatctgctctgtcgatcccccccccgcaccatcacacaaaagttatttttatggtaacaaaatctattttattttctaaaatatatctcaacacatttagtcaaccaagttcagcataatgtatgatgtaactcctcattaatgttaattgttatccagtgtaaaaaacgcatttattttgaggccatttagtttctcatttttcatttacagctattataaactgtttttgagtacacatgcatatttaatgttcctaaggggtgataaaatggagtgtcttctgagaaggcgtatggcatggaggcagaatagagcatttcatctccgtacttgtctaaagcaagtggcttccagggttgctcattttcacccacaataggaagtgggaggttgaggtttgctgtccgtgtttgcctctcaggtgtctgaagagatgaagggagaggagaggtctcccatcactggtactttttaggttcctctgatttgttttgctgctgatcagataaaatgaaagttcaagtggtaatctgtggttacgccacagaaaccggtttctactgcagagcagtaagaacgtgagaagcgttcgtggacttcagttcattaacactgaaaaatgaatttgtggtgccacctttggctcactggagagaatgaagctggtgtgttactcatctggctctccgtatgagggattctttggtagtggggaggacaggaaaggtgcaaagaacatatttgtttaaaattgcatggttttgatacgcgacctctttatgagttatgctctatagtgtagacaggggtaagtttcttacaaaccgaagaaattatgcactttaaaaagtatttatcttgatttgtttaatgctaccatagaaatcagctgggtcatcaactgtgaacaagcttaaaagatgaattcatgttttaatatctattttttcacagataatgataacattggaggaaacttgggtctgaaaatgaaaaatgattggaaattagattgagcttaatatatgaatgcagaaaacattgaaataagctggaaaaatctatgcatcttactgtttatatgtaaaagaagcacattcactatttttaatatcatgaattattagaaaagtttgtttatccatccattaaaatttagaaaccatttggaattattcgaagcaaagatacgggttcatgttttacctgataaatgttttataatttcatcttcattcataaatgaagattgtgtgtgcacaggtattttgtagttctaatttgcatccttgaattaagttcttgagtgcagagccctgtcttttttccagtgttacatacatcacatcattatattttagagacctattgcagagacttgcttactcccaagtgcagtggttgcagttaagtcccatcttttctttagtcacactggctttcctaaagagcaggccgagttgtaattcctctccaagactgtggtgttggtgatgtggttctgtgctgttgctgaaggtaactgtggaatttctaagttccctttgcacctaagaagataaacacatacgagaactgaatatttctttgtgcctgtagtaattttcctggggagttttgttttcagtgaaaatcagcaaataatcattgcacactttctcgtagaaaagcaacggtgagtgatgattgcagttccctggtgattggtgaaggctctcagggctgcctgaggatgccagggctcgggagggtgcattc

SEQ ID NO: 99392 - DNA, 1042 bp, Homo sapiens
gttcaagtgattctcctacctcaacctcccaggtatctgggattacaggcacgtgccaacacacccaattaatttttgtatttttagtagagacagggtttcaacgtgttagccaggctggtctcaaactcctgacctcaggtgatttgcctgccttggccccccaaagtgctgggattacaggcatgagccactgtgcctggccaaaactcgaccttacaagtcacacagccatgattctaaagtcttaattctcttccatcagtgctaatcctaagagcttccacagaaaacagcactgagaactgtaaaatgttgagatccacccacacaagtgcagggttagagcccccccctcaacccccgtgtttcacgtaaccacatcctgctcatgtccctgacccaacactgcgttttgggaatataaagcctgtattgcagagacctcacaatcatatttattatctgcatggtacaatatggagccatgtctcaggccatagagttcctggttctggtttcatggccagcatcttctgccattttaattttaaaaacagggtaattcctcatttctaagaagagactagtcatttttccacccacttaattatgtagagttagtgctaaaagaaaataatatttatgaagtttcctgggcttcctttttatccagaagatacaatcagctttgaggcctgggtcatgcatactagcagtgagagggacaggtggtccatgccctccccgggggttgtggagggcctgctgatatagaagatgtggcccatgtttattttgctttgtatgtatataatggtttattgcagcatcagtatcacatggaaaggtatattcttgagccccacccaagcctacccagtcagcatccctagggggtagggtccagtggtgtgttttaactctctaggtaattcttatgcacattaaagtttgagacactctggtctgcactaagtagtaaaaataaaagtccacaatcttgcctgtgaactcactgtgttaatccaagtccctggac

SEQ ID NO: 99393 - DNA, 1033 bp, Homo sapiens
acattttgagtatacaatcaattcagttggttttgataactgcataggtctatcaataatattcctatcaccccaggaacttcccctgtcccccctcctgtttattctccctgttcagaagcagccatgaatctgacatctgtcaggataggttagttttgcctcttagaaaattcatggaaatggaattatatggtatatacgtttttgtgcctggctactatcactcaaaaatgtaattgaaaagaattgtttatctaccaatgatacattttccccatgtaagggaatatctgaaaatgtcttcttcaccaaccaattttttttttttttatcactgagacctaagagtttactgtaagtcagatgtactctgtgtagatctgcttctggagttggggttcagagttccaactcaggtcagactggcagcatccaacctggtctttaccactggcttgctgtgtgacccgggctggatgttcaccctcactgtgcctcagtttcccattctgccaagtgaggggtaagtgtagtacctgcctcatcaggatgatttcaagaattaaatgaacaatatatataacacaatgctgaacacctaatcttctcaatagagggctaagttctaaatagaagtcatctattagtttttttaaggaaaaatcactacgcttttaaaggagaaaaacttgtaagagtgagacactctgagcaagttcagaaacatcgttaaaaattataatgaaaaatactatgtctacctgtcatatttgctataatgctaaatcaggtgggcaggacaagtcttcagtatctacagaaatgcctagtattgagctagcccatttgagaaagtaaagatgtttctggaaagacaatctgattattttcttaggaagtagtgtgaaataatctatgttactatgcgctagatgatgtggccaagactgggagtaacacgtattggaagaagagaatggggtcctgtcttttctctgttctggggaagaaacctcatctcttaacagac

SEQ ID NO: 99394 - DNA, 1945 bp, Homo sapiens
acagtgggcacaaagcacatttgccctgtgctctggagggagatgctatctccatcatccaaggctgtttcctgtgcatgttcttggaaagatagttgggaaaaaaggcaggcagagcctctgctggaaagacacagggaaaggagagagaagaattgttacccggcaaagatcagactgcctcctccaccaagtctctggtctagattctgtgagtccagaaacctccatctcagtctaggagggacagctaggaggaaataaggacgtcagtttgcaaccagacaagtttagaggcctgtggaattcccaggccaagggaagagttgttacggagactctatggccaagagggacagatcacactagacatcaagctcaatggatgccaccaagggcagccacctgctgtatcttgtacacgtttcatccatccagcttttagcctctcaatccttctcttcctaatagggtaggtataagattcccattgctgctgtaacaaattaccacccacttagtggtttaaagtaacacggaagtattccattacagttctggaggtcagaagtccaagctgggtctgcatggtttcattccttctagaggctgtgagagagtccatgcccctgtctgttccagcttctagaagctgctactcatcttggtggccttgcatcccctctgacctgtttctgtcctcacatcttctgactctgattctcctatttatatgaccctcttataaggacccttgtatattgggcccacctggataatccaagatactctcccctctcaagggccttgtcttaaccgtatctgcagttaggttgccatgtaaggtcacatagtcacaggtcctggggattaggacgttgacatctttgggagccatttcccttctaccacattattctgacctctgtagatactgtggcccatgtcatcaaacccccatgacagtcacagccctgcctatttctttccatccagacaggtggtgcctgtgggtacatctcagcgtagggtgcagacagagttgtctgttggaaggaaaaccacatcgaatcgggaagggagggtcctggctagagtaaggacagtgggcaggaggccggggtcctgtcctgccacaacactgaccacctagaacctcaactttcttctttaaaaataaaaagagagtaactacacttgccatactgaccccccaggttgtatggaagctcagtggagaaaatggccggggtgcgtgtctgaaccgcgctgcatttggacggacactttgtgtgtcacatgttagtagctgcagtgtgtcctccacccgactgagagtctgtgtatcaagataggggtaaatcctttctgaccacttgcagacagaagtcacgcctcgtggtccaaagccaccaagtcattacttttcaaagcttttccagtagagacacatgactccttccttaaaacaacttacagtgaaaatatgtggatggttgaaaaagtaatgtttccagtctgctgaaagttctgtgggttttttttttttttttgcagggcaattatctgtataaaatactttttttcttttaagtagaatcctattgctaatgaaaccatattttgaacatgaaaattgttacaaagaagaaaaaatgtcattatccagaaaagctgcaatagctcatgcatttgatggtctaaatagaacatttttcttctcagggggatgaaagcggtcccctcctattagcctatgaaattattttagaattgggttttaatccctggaacgagaaagggggatggaaccctaacataggttccatgcatgggaagtcaaacctgaaatttagagacaggaaatatagcacgcctagtcactaatccaaaaggaatgtgaaaaaagagttgttttaatgttggaaaaaggcagcatgaaagg

SEQ ID NO: 99395 - DNA, 1038 bp, Homo sapiens
gggcacaatggctcacgcctgtaatcccagcactctgggaggccgaggtggccggatcacctgaggtcaggaattcaagaccagcctgaccaacatggagaaaccctgtctctactaaaaatacaaaattaggcaggcgtggtggtgcacgcctgtaatcccagctacttaggaggctgaggcaggagaatcacttgaacctgggaggcataggttgcagtgagccgagatcacgccattgcactccagcctaggcaacgagcgaaattccatctcaaaaaaaaagaaaaagaaaagaggcctcgccttccatttagactggctcatgaacttgccaaagaaagggctgttgtcagtcgccgaggcttcggtctcaggtttttcaggtcagtgtgtgcctaataatgcagatgtcatgtgatgagctcggtttgttgcaaggaagcgtcgtcctcctcacgggctctttacgttgacattgtggctttggaggctgatattttctctaaaggaaagattaaaggattgttttcattttattataaggaagagacatttttggtataagcccatcaaagttggtgcctaaatgctgcaactgattcttctattattttgaagagcctgtttattttccagcagttaccagcttaactaagacattgtcactggaattccgtataaatgtgtgcatgctcacacccatgcctacattagaaagagaagtaccccaaatttgggaggctttcttatgatcattcttaaatagtttattgtcttataataatgtgggcttttttgttttacttaatatataggaagatttttttttaataccttaaaaatactgcacattaagtctgtttttttacagaaggataaatggatgaacaggtgttttaggagccacaataaaccatcgcagagcaaggagtgcctcttctgagatcccattcgatgctctgccctcaattaaatgaatccgagataaatgggcatgtgcgtgtgtatgcacacacacgtgcacacatacacaca

SEQ ID NO: 99396 - DNA, 1076 bp, Homo sapiens
tgattgacaggccttctcattatggagcccatcaggggacagggcattccagtgttatttaggggtcgaggtgggaatgagaggaagccagagcccggggtgggggcgggagcgggggctagctgtgggtgttcattgaaagagtccaggtccccgacagccctgctccaaggacagacaacctcgtcttgcaggatcatttaccttttatattatgacctagccacttctcatggctctaccacaccatcttcccgagagagcctgtgcccgccccacagtcccggctgaaatggcaaatgcggtgtaggactgtggtgcacactgcccatgacgggctacttggacggctcatgcccacctctgactagtttgatgttctgaatcaggccccttggttaagcgtgataacatgatcacctggtgttttaaagcttttctctgtttccatgtggtgccgtgaatagtctcataagccatgtaagtggccttattggttaagtgacaaccggggacatacccattttctttgtccatgaagcaccaaataagaagttggcgtccattaaactagattgattatttaatatcacaaggcttttgaatgggctatggggaggaatagaccagaggtctttgccaggaggagacgttacagcaggtcctctctggttgggacctgcttaaagatgtgtaaagaccttgaacatcagcatctggcacagccaggggagggacagggaggacgagagacctgcttggtatccttggccccggggtccaggttattcagtttgttgatggctatctggcaggactccctcctgagcaagaaagaccctcagtctccacgatggttatttccagaaaagtggggaccttcaccaatgtgcctttcattgtgaaccttacccagctgggctccaggacacctaggcacatccccgtctctgggtccccagccttatcatgtgtctgagtgtcctcagacagtggaatccttccttcaccttactgagagaggccagcgctgttttcattttggaattggcaaaaggcaagttttctcctacaat

SEQ ID NO: 99397 - DNA, 1036 bp, Homo sapiens
tccttgcaaatgaactgcatgctggagataaagcgcctactaggctgccgggtactggcagaagagagtgagcgtagcaactgggaggtggcctgatggcctgcgcctgttgccgttgatgagacccaaagtctggaacgaatctggttccatatagagttcatgctcaccccgaagtccttctttggcactggagaacaaagaagagtttgcacagaagaaaagggaggttgtttaaccagaaaggccctctgcaaatttctgattcctgtacagtcagcattaatatgctgcttttcagacatccaaatgggggattgaactgtgagagtgcaggcaataaagagtgcatttgtggaatgataacctgactggcatccctgcctcttgaatggctgacgaggtctaattggcatgtaacgccctataaatttattagcatgcctcatttctcattggtggactttctactgttaaccaccaagaaatgaccaattttcaggagttagtcactcaagtcgtacttataactaggttggaaaaaaaaaaactcacactgctcctattataaatcaaccttatgcctgtacagcagctccctggctgcaaatgaatccatcggatacagaagttttgaggtgagtggagttgcagggaggagcacgtgtttaccaggaaacccactgctctcctcaccttgccctgcgcgcctgagcccttcacagagaccggccgtgtcctcacccctctgtcaccattgtgggctccagctgcacaggctggggatgggctgggtagaaatggcagttttgtggtcgttcgcacccaggactttgatgttcctactgatatattcaaccctcaggcgtaccatgcaaagaggacatagccaccctcttatttcaagagcatgatagaaatattcagaagcagacataattatttcaattacttctctctggtttttgagacgcacactcaagagtcacaaattagaaaataatattcacatgtttcttctaattggtaacagatt

SEQ ID NO: 99398 - DNA, 1181 bp, Homo sapiens
gggtgatttggcaatgactattaaagtcaatcggagcggaatcaaatagttgtgggattttaatgtctaccaaaaaatgagagttagcaaattggaactggaaaatctggacgcatccttcaccgtcatcccttttcatttaattgacgttttgctccttctcttttgtgatttatgaaatgcatcaacaaacgtttaatacattttaaataaggcctttaaaatagtatcagaactgcttctttttgtctgtctcctgaacccgtatttcccagacattgtcagtgcttttgtgcttgtgtttttgcccgagtggggtgcaggggctgcctccgctgcatttgtgggggccggtgtcagttctcagctgtagccaagtgtttgtcctggaaatctccaaatgaaaagagtcgggggtcactctggggtcactcacatgtaccaggaagtgaagcaaaactaatccagatttactcctggaagaatttgtttgccttagtatttaaaaacagattagggctaacccgacactagatcactaggtgcaatgtaaacacgggtaaaaggtgtaaacaaggcctttcctctgtacttcggaagcagaaatgtcatgggtaatgagttttctttctagactttcgcggaagccctgagtgatttctccgtgtcatttgtaactgtgtactctgattattcccctggagaaacctgaattttggagagggcgattgtgaatcagtgcgttattaaagtctctatgggtaactgcagtcccttcttacatgtagggcttttctttcttttctttttctttttttttttttttttttcgagatggagtctcattctgttacccaggctggagtgcagtggcgcaatctcagctcactgcaacctctgcctcccgggttcaagccattctcctacctcggcttcccgagtagctgggattacaggcgcctgccaccacaccggctaatttttgtatttttagtagagacagggtttcaccatgttggccaagctggtctcgaactcctgacctcaggtgatccacccacctcggcctcccaaagtgctgggattacaggcatgagccactgcgcccagcctcttttctttgtcatcctcatcaaaaaggcaggcagggagcacttccctggctgggcttggctcctggg

SEQ ID NO: 99399 - DNA, 1018 bp, Homo sapiens
caggacaagggtcctgcgccatgtgctatcatcaaagggccgaggcccgtcgctctctcctgtgtgtggtttaggggagtttatgaaaaggagccacttctgcagtctcccggccgcctcttcgccccttgagggatgtccaggttttgtgattttgtttggggtgagagtgggtgggcgggagggaggtggccaccaggaagagggaggggatgcgacgggactcacgtgctgcgacttctgagcgagaatgcggcgaggctgccgcgtcccaggtgcggcgagcaggcgggcacggctgttcctcagatgatggtgggcaccctcccactgctgttgttccggttattgtttctcctggacaggttaggggtggccatgagcacgaagcgctcgtcggggcagccgtactgcagcagcacgtcgatgcactcctggctggaggcctgccgggcgtaggccagagctgtgttcccgtgggcatctcgggccgtgacgtccactccgtactgcggaggtaagggagcccacattagtatcatgggggatgtgatggagggagggggcagggaagctttctctcagcccttgcatgtggcttgtgcttggacagcggggccagctacacaactggctggggtgccaggaccatccagtgctggtggcacagcctgcacccgtggccagcggattcttttaaggaaagaacatgtctttttttttcaactgaaagcccctcctttgtgcaacattaaggaatcaaagataactttagttttgctgtttctattttgactttccaattgcacaaagaaaatcattgttttgatctcagaattttcattataggaaatacacaaataacacataacagctcaagaagaaaaaaaatcacccataatcttactacttagagataacctttgtgaattagtgtatttcctttcaatgagttttctttgaatctacatgtatatgtacataattgagataagactgtacaaataatttgtatttt

SEQ ID NO: 99400 - DNA, 1044 bp, Homo sapiens
gagcacctgagcgctggggaggcccttattgagctcagcctggagaggggagggtcgcacgggtcccgggggcaggtctcctgcactggctcttcccttctgccagcttggaatttggttctcatcttgccacaggggtgcgtttcctaaagggcagccggagcagctcaaaggtgacaactgagatgcatttctaggcaggggcagggaaggccaacccaccttgcagccagttttctgtttctgtaaatagcagtgtatagagatggaagggcagcgtgggtgtatccacagatgggtttaggttttttttttggatgttttctattacctcattcagcaactttatgtttcacaatgactcaatgatgctttatttatattgtttgtactgtaattaaaaccattgacagacatttcactttgcttgttatttcatatgatcttgttttgattaaatatgccagtttgtattttcctgccttgggatttttttgtgtccgctgtacagtattctaagggaaaaagaaaaagaaagatgtgtaaagtaacagagagaggtggctatggtgtagagacctctttctaataaagaaatgaaaatatgtctacaccgcttccgtggagttgttgttttttgttttttgttttttttttttttggtggcgttggtcatttgtcacaactaattgtgtttctaagcccaggaaaggtaaatcagagagaaaaggggctctgtctgctgcgggcagggattgccccaggcccaggctgccccaggcccgagggactcagcacacgagttcacagacggaatgaagaaagagaccaggagtgtctcttctgacttcttcctttacaaggacagaaactccaagagaatgttctttgcccagccagggttgactgggcccagaacttccagatgcttctgtatctttgcactgtgccacactgccccaggtgtgtcgtaagaactattcccagcaggtggctagcagtagaaccatcccaggactctattattaagaccgttattatcat

SEQ ID NO: 99401 - DNA, 1053 bp, Homo sapiens
gtagacagaggaagaaatacaaaggagagattgaaggctaaaaccgagctagagagatggggcgccgggtattgagaagcaagaggattttgccaaatacgggggtgactgggaaatggggtcagttaaaagctgtccaagcagggtgcacggtaggcgaatttaagtgaggaattcacgtgttccaggccctgagttagggcagcttgaaagaggaaagtgggttgtggaattttcccgaatccagcactcccttagctgagctccaaacttgtccctttatcattaagaagagacaacagacaaaacaaactgacccacacatcaccaaggttgttcaagaaaaggactcagagaaagtttagctctcttgcaagtggctgagttttcagaagcacactttgatgtggtggtccacattcagcacaatcctggtttgtttctttgcgctttttaggggtgtgtgtgtgtgtgtgtgtagggttgctctttcttgagggatgaatggagcaggtgctatacatttttacttctctgaaaactttggcactttcaaaaagcccgtggaaggttgttagcggccaggagcgctcgtggaaatgggggatgtagtccctggtgaatacacatcaaggggcaggatttcacatggcaggaaggccttctgataatgatggaagaatcgatactgtggctgtaatgagccgcagaggagacccttttcacaggccacctccttcccaggacccatgctgagcagccttgaaagtccattcattaattacctacccgcatgtggtgccgagttccagccgccctgagtccccaaggcccagcctggagcttgttgtgcactcagtgggggaaggggggcctgtgggactggcatggaatggtggtggccagaggccccagggacatggacctgcatgggtttgagctgcccttcccagtgaagaccaggtcggatctggagggggtgatggatgtagtctatctacattgttatccccgtgataacaataacctacattcctgcaggtgccagctctt

SEQ ID NO: 99402 - DNA, 1006 bp, Homo sapiens
tgcagttctccttggcaagcaaaataggatcctttcagagagaacctccaaaacgtccaggggtcatctgggcagagcatcttcataacccatgcatgccgaaacacaaacaggttttaattgagccattatcccctgagaatctaattctgatggtgaatgtttgacagtgtttctttggaaaatacaaaagatcaagcccataaaatgcatgtggatagagacgtctttagttgtttgctagaacttcctagaatttgaaaaggcacacggtggaaatttgtctttatttcataattgacacacaacaaaaaccctctagtgatatttgatagtagcgaagagccctctactggcaggtgacgtgaactacccgacagaactctggaaagttcaattacgaattaattaatgtaattgtccgtgacctcaaactatctgtgggtaatttaaatgaagccttttcatagctaaatgaaaattagaaaagcaaaggataccatttttcattagcaaattggcagagagttttttactattaatacttgtcgaggagaagagtgtagagagccagagccctcatttattcctggggagagtgtaaacagatggaacccctgggggggcagtgtgacagtacgcataaaaacgacacgcacagaatgtccaggcccctccacctggaagcctctcctggcagtcattctaaggaaattctcagccaggtgccctaaataagtactatttggggtagtaaaagatggaaaccatctatacattcaaaaccaggggattaattagaaccgtaatgctggtgcttcctgttaaaatgataacggagaaataactttcatatgacatgaacaaggcagcccgtaaagcagtatgtgttgaacaagatcccattttcgtaaaggatctgtaaggacaggaagtgttcaacggttgattctaggtggagggagaagaggtgttgtttatgccattcagtatattctgagatttt

SEQ ID NO: 99403 - DNA, 1056 bp, Homo sapiens
aggaagaaagcatcagggaaaaaaatccagacatggtgattcgttcattgaatatttttactccagattcagatacagatcaagagagaatcatatgaacctataaaggtccgtcctcatgacaaatggagacagccaaactaattttcttggtgaccttatctaaattagttagaaaataacacttcagatttatgactagttacaattaagccctttgatatcttctaattaaacctgtaaagatttatttctgcattattcctttggtactctcttaaaaatgataaaaatgtaaatgaatattaccctcaaaaggagatgtttctatttatcctaaattagactcatacccttcctttcaaatgactgcattttacactcagatttacactgctccaatacaaattctacatcgatcttaaataacttatttataaagtttgcacaaatgttatacataatctattggaatataaataaagcagagccccctatatttcagccttttttgtgtgtccttctttttagcactttgtcccatttcacataactctatattcaaatgttgttttagaaagtattaggaggctaatataatagtcaacatcattcccagtttactctagctagtagagcagggctttcttgcctggatagcttttcttcaaacctttatctgagaaaagatgtgttcttcataatgactctcctaataggattctctttgctctgaaatgttcaatttgtattctccgatcgttttgcagatgccaaaattatgcagctcagaccagcgctgttttccatttattgttcctctgtttcttttctctccaggtgagtacagctacctggggactactcttcgccaggtgtccatagaacccatgccctccctcctggatgtcagacagctcatcacattgtacggaatctggccattaggtaaagactcggcgtgcgcggatgtgccttttccaaagcagcttgcaccgcttgctggtttggacagtgtgttcctgtttgtcatcaaaagtacagtgctccttaact

SEQ ID NO: 99404 - DNA, 1101 bp, Homo sapiens
ggaaagctgcccaggatgggggtgggaaagcgaaggaagatggagaaatggctgcagtttgctgcccatcagcttttctcttttaaggggcagacattgcagacgtagttttaaaaaagttccataaagcatcgccaaggcagcatgcctgtgcgacacacgcagggctttgggggtgtgttttccccgtattaacagcaagtcgttgaagcgttgagaaggtattatgatttctaatcaggcccagaacaggccaagtataggctttctgaatgaaaaaaaaaaaaaaaaaaaaaaaacccaaaacaaaaaaccctgcttaatcaggaacagtggctttttgtgtgatcattttagggcgagagctcctgttttcaagtcgacgtgagggaaattggttgaagtcactcaaacctgaggctgaagggcagtcactttataaaccttaagagtaaccgaggggaaagaaaaagacctcaaagattgcaaaactttagattttttttttgtgattttgtagaacatgaggggaatctggggccagaaggcatttgtacctttaaaccaggcaatcaaataacttagttttattattagaagcaagaatagtattaaaacgccttcaattggattgcacgtgtgtaggcataattcaggaagaaactaaagatcgtgtcatgtcaagtgttactaaagttcaggaaggaaaagacaaagctccaggacacgtattttctgttgaaataaaagaaagcaagccagaaatagacagatcaggacagggaggcgtgcaggcggtggccctgattttgaatatttgatggtttccttcagggaatgtttgatgcttttatcgactaatttggaattgaaaaaaacaaaacaaaacactattgcttcaatattaaagtgatcagggaattgcataattttatggtgacaattttaaagagccacaggtagttttggaagcagactgtgttttgttccaggcactgaaaaagtggatgggggccgagactatctcaggtggccttgaaccactgttggcaaagggacagataacgagcccagggcagtgtgggggactttgcgttttga

SEQ ID NO: 99405 - DNA, 1006 bp, Homo sapiens
aagcaggacacttgtaatacagcagtgccaggagaggacaaccctgccattctttggggacctagataaaatggctccactgtcccctgctgagagtgagcaggccatcagcatcgcggtggccggggctcagctgcctgacgtttctttggcccctgtactgtgttgatttcacacactgggcacagccatgctggcggtgtcttgagaacacagccatgaaaagatggagaaagcaaacacagtttctgtcttggagcaccacatggatttagattcagagtatgatttattttgttttggagagttttattatgaattttttttctcccttctttgcaaagacattacagagctaaacccaaacagctgagcctatcagggccttggaaaagcatttttgcctgaaacttgagtttttcctaatgaagtgactttcctcttccatcttttttgtttgcttggttttctcataggtcatttgattgcccgcctcagaacgatggatctgcatctcttcgactactcagagccagggaacttctcggacatcagctggccatgcaacagcagcgactgcatcgtggtggacacggtgatgtgtcccaacatgcccaacaaaagcgtcctgctctacacgctctccttcatttacattttcatcttcgtcatcggcatgattgccaactccgtggtggtctgggtgaatatccaggccaagaccacaggctatgacacgcactgctacatcttgaacctggccattgccgacctgtgggttgtcctcaccatcccagtctgggtggtcagtctcgtgcagcacaaccagtggcccatgggcgagctcacgtgcaaagtcacacacctcatcttctccatcaacctcttcggcagcattttcttcctcacgtgcatgagcgtggaccgctacctctccatcacctacttcaccaacacccccagcagcaggaagaagatggtacgccgtgtcgtctgcatcctggtg

SEQ ID NO: 99406 - DNA, 1131 bp, Homo sapiens
gtggagaccccagctggaggcagaacagagaacggctggggccatgaagtctccctacctctcaggggatggcagaggtttccagagagccacgtgggagagccaccaaggcagggagctctgccaagacagagggtgtgttcagcttgagcctggggccctggagttgggtgagagcttcacagagctgatgtttattgatgccgttttctgttaactaagttaaacctctctctgaagcagtgctggcaggcagagctgcctgggggggcaagggggttgagagggggcgtctattttcccaggtgctgggtggggttcaagccaagggaagtgaaatacaatccccccaagtgtgaaactcccctaaaagtaaccttgcccttcatgccagaggcctccctctctgtcaccagggctgcacttggatttcagcacacgtgcttccattcagtgctttgtccatgaaattccacacagaaaaacaaaaccaagccataatgattttgattggaaattactgctctctaacataaagcatatttaatgtcattaaattttgtggattataactccctagtgaagaacacagcagtcaggctgcacagcagccccgtgttcagaaaatggcaatttagtgattttagagccacatgatttatctaggagatcagaaatgtaatcaaaatgacatcaacgaaaacctgatttgctggtttttaattacagttggccctttttagttgggatcacatatttacgaattcaccttctctctaaaatcaacacctgaggtgcttttgaggttattctcccatgcaccaaaagcagcaagaactttgggtcacccccagcgtgcgcgttgttccccccgagatcgggcaggcagcactctgccttctttgatggccctcaatactgaaaacgtgtccttttggcagtgccatttttgttgttgttgttgcatttttgtgcttttttggtgattccactgctttaaatggcccctgagtgtcatactgacaagctcccaggtgttcctaagtgcaaggcaaggcgcccacagggaacatgcattgttaggcaagctgtgcgcaggcagggctgcagtgcccttggtgccagagacac

SEQ ID NO: 99407 - DNA, 2252 bp, Homo sapiens
acgctgcccaacaagcaggtttgcggagactcacaccttagattctgagtttttaagcttgtttcctcagagcagggaactcacgaacgtttcgtgagcacctacggtatgcagggtacggtgcggagccctagcgtcactgacgaccgggacagccgagcagctgcaggatccgtcgtgttccccagcaattttaatatttaaaaattcgttactgttgctgttacttgttttctatgtattggatgtcttcgtgaagaaccctcaaaagtgcaacgaactcctccctgccagagggcggccgcgcgctctgagtacagcttcccgcggagccggccaggtcctccagggcaccgagaaagccggccagaacggcggcgccctatcccggccgcagcgatgtctgacggcgccccggaactgacggtctggtacgcaggggcgctcggcggcaacggcggctttaaacgtcatcgcgggcgcgacgcctgagggacagtctggggtttggctgtccggacggtgcagcggcgaggccggccgcgaagatgccagtggcggtgatggcggaaagcgcctttagtttcaaaaagttgctggatcagtgcgagaaccaggagctcgaggtaaccctttgcgtcgcgctgggagaaactgcggagtagtcttaggccctggggcggcaccagtttccagggtaacggggtctgaggctagcgggctttgggagctcacggggcgggcgtgggaggtggacgtgtggatccctgaccgccgcaacctgctccgaccgggcccggtctccccgaactcgccgggacctttttgttatgtgtcttcagcttgtgagcccgaaaaccctgtgcgtctttgctccagcacctaccgatgagctcatattaattaggcatctttccttcccagtatcgggttgggagagggtagtaaagtgggttttattaaagatcttggtatacacacacacactaacacacacaccgcaactcacacgcacaccaagaaaaatgtgaccattgtaacctttttttaactcacaaagcctttctcgtaatgttgtcaagttagcttgccattttgtcttcagtaagacagatgaaagttatgcagctgttaaagttaatgtttttcttagacacttaaaaagggtttatatcattagttttaaaattaaataaaggagacaacatccagaagcagcagctcactaatagataatagatactttccagttgagttaaaatggaaagaattgtctttgcaacgcagctgtggtgattttctgtctcttattcaggacgcttgatgtaatgggcagaatcagaatgcttcaggaatctgtcgaatttgtttcttataatagtaagatcatttaaatgggaatttgagaactggggaaggggatccacttacatattcttgaatgtataaagaaactgaagcccaaagggagataaatcaaagctgatgacgaatataaacttaatactcagaattttcgtgtttgatacttctctaagctgtttctaaatctataataggactataagattacttatagtcttagactaaaaaggcttacttttaaaattagcatttataaaatattattttaaaaatgaaagttaaagggtaaatgaggtttttaaaattttgtgttgttttgttttgttttcatttttggccttctaggcccctggaggaattgctacacccccagtgtatggtcagcttctagctttatatttgctccataatgacatgtaagtatgtttaacctaaagctaagagcaacaggtttctcaaagttatatggaaatatttctgcactgaagtagcaccactaaacataggcacaacgagctaccttttttattacagtaattgttaacgtctatttcctattgaatcataggttaatgaattatgattaggtcgtcattgtcttacatatactttctagaaaacatttcaatttattatgacaaattacgtcagtaaattcatttaacctttttgtctttttaagaaacttttatgacctctatttacttaacttcatatataatcaataaaacaaaagaagtgaaaagagaagattgcagccaagaggaattcgttacaaacatgtatgagattttttaagttttttttgtttttaattattcctatttcacgttcacatggaaaagtcagaaagcataactactctaggccgggcgccgtggcacacg

SEQ ID NO: 99408 - DNA, 1006 bp, Homo sapiens
cccagaaagtcaaggctgcagtgagctaagattgcgcgactgcactctagcctgagcaaccaaagtgagaccctgtctcaaaaggaaagcataactgcaaaaaaaaaaaaaaaaagtctcctatagttctgtgactcactgatgattcctgataacattttattttaaactcttccaaaacctttcttttatatctttttaaaaactaaattgaaatttttattacacatatgtaaggtttttgtttttgttttgtaaaactgtcattatatgtttgttgtagttcaagcctccaaacccataaaaactcctgcctcagaagctgtgtcccactggtaggaggggctgtaatcgggagagaagtgttgtgtaccaggcttattgtcagggaatgctacagccttgatagtacataaatttgtttacttttatatcctaataaataatttgggccgtctataaatcctcgtgtttttagtgtgctgttgcctaaatttaggatatggattattatttttaaaaaattcactagaaatggcaaaatattactttggtaaaaatatttcatgtcctttttatctggaaaaccactattgtttccccaaaacaaattcatataaaactaaattttactttgtgttatgtgaagtatacttctgtatgtttggcttgggacctggtagtttttaacatttcctgagatgattatgtttttaattgattattcttctttgtggtggcgtaaattaggaataatgcaagatatctttggaaaagaataccacctgctataaaatctgtaagtatcctttaaacctattttactgctttaatgtaatgacattcccttaaatggcaaccttttataagcttatgttttctatctgacgtcctagtaatagtcatcagattggtattaaggattcgaaataaatcttcagagtcctctaatcagaaatttgaattttgctgggatggtgtagaatttctgctcagttcctactga

SEQ ID NO: 99409 - DNA, 1281 bp, Homo sapiens
ttctttggctaaataaagaagtactataaatcatgcacataagtttcaatggcgttagtggaaactcaatccttagagaggctacaatgtatgacatcttagattgagagtctctattgttaaccattttgctattacttttgacctaaatatatattcataatatatctatgaaatacaaatacaacatctttaaaaacaatccttaagctaattagtccccaggcttaattctgaaatgttttttgactactttctcatgccttaatttgctattgtaataaatttatatcagccctacagataaattttaccttactgctcatagtgtttaaaaaccttttgatagtgattgggctgaaaaagtaattgcatcttttaaaataaatgttgaattaggttttaatgatgtagctaacaagtttttatatcatttctggtattttgttttaagatacaatcattggtgcatttacagagtgaataccctctaaggcaataatatttattgcaggcaaattctgaacttgggggaatttggtcagtaggacaaagaatctggcagagagatttccctgggatctatacaaccatcaacgctcaccagtggtctgagacggtccagccaattatggaagcacttagaggtagtgtttctttgtggttaaaaatgaaattagatgagacttagtccctaagtgctgcagtgttgaagtaataaatcagtggtgtgtgtttaagtagatatttttgataggtgaaaagagcagttttcagaattttttagatttgccctaatcatgcttcttcattttttgttgcttgagattacattggctgctgtgcttttgttgtttcttaattctagacagaaattgctcgtcagttttaagagttttttttgctattaaaacgagatcttgtaatattctaataagtttaaggtatgggtttgtagagatgtgaaaatagagactgctctttgaattttgtcagcctcagcctttgataggtgttgtcttaagcttctggattttataatttatcagtttaatacatagatgctcaaatgtgtttttaattgctttgaaagattacaagcctggtgtgacagagcactgatcccacaataaaatctcattccctgcctctctacagtctctcacccctagcatttgcttccagtcctcctggttcactctttataaaattatataatcttgttttatgttgtcatgtactgttatttcttattgttacccttacttccatagttaatat

SEQ ID NO: 99410 - DNA, 1100 bp, Homo sapiens
ggatgggagtgactagttcatcttcccttctgtctccagcactggcagtgatggatgagcagcacttgagtatttgttgaacaactgagtttgcattctgttagcatttgttttcaccaaaaatgtgttccatcaactactgccacagatattaggtgctggctcaatttattccaccttccagcgtgtcattctagggcctgaggttacagatttcacaacttgaggatcacagagtgactagtcggaatgtagatgtgattcgtgccaagtggatattgcagcttctgagacagagaacacttagcctttatttttgctttgtcaactcacttctcccatcacatgtttttctttccttttccagtgatatctttttacttttctctcccttttatctcctccattcttactgtattcctgttttattccccactctgaaaatatggccagaatatttgaactgaagtaaatgtttttgaaatacagttgacttaccaaatgaatatagttttatggtgtatacttttacttctctaaaaaaaaaaagtatactttccattgttggctcttttccattgttggctcagttcttttccattgaatgtatgcagccttaatagaaaacgtttcttggtattgcaaagtctgttaggttacaggctggttgaaggaaggaaggaacctacaataataagtgtaaagccacagaaggaagagcagacagtggctgagtgaaagctggagaggatgtcgggctcagatgaggggaagggatgggagtgtcggcagtttttaaggaatctgagaaaacaaagcctaagtgttggagtcgtgccccattttggtcctcgtgatgccatcaacaagcatgtatttggcatatatttcactggagatgctaggtgtttgggggactttgaggataagagataccccttcctgtcgagaagtttggaatataattgaaaagaaggggataggtggaacagtgtctgccgtagtggaaagttgcttgttaaagtagaagtgtaaacaatactgctgagtttagagaagggcagagatcgtaatgaattataaacagacttaggaatggt

SEQ ID NO: 99411 - DNA, 1046 bp, Homo sapiens
tcgtgagccctacctaagtacacgagacgtttaggtgcacatgtgtgtgcttcagatattttacttaaccgagtgtgtgttgtgtttggccgggatcacttggagaacctgggactcccttccattataattaatgtatttcatgacttctcagtacagttgggaaggtggaagaaaaatagacaggttgacattcccttttcacattcctcatttgaaactggctgggatcgtgcagccaaaaggagtcattattttgcttggcaggtctgcagtaattctcaaaacttccattgggtgattaacaggagcagcaaggaagcaaaacttcacccggatgagggtggaggaagggtgtctgtgtgtgcgagtttccccagggctgatgaggtgtggtttctggttcttggcacgatgtgggtgcttgggaagattcccctgagtaaccgcagaataagagggtgaagtctgaaagagctctaggccccatgcccagcgtcccatgctccccctcacagtttgtgggactttttcttccacagggtggctttggccgaaggggaccccccggagctaaggtgagcctcatgcagtgccccctggagactctcttcaaacagcccagatgccgcccagcccaggagtgaaaaacactctctcctgtgaacccaaagcttcggagacagataccaatcaatttagaaagttgatttcgccaaggttaaagacatgcccgtgacacagcctcagaaggccctgatgacacctgcccaaggtgttcggggcacagcttggttttacacattttagggagacatgagacatcaatcaatatgtgtgagatgtacattggttcggtccagaaaggtgggacaactcgaggcaggggaggaggcttccaggtcataggtagataagagacaaaaggttgcattcttttgagtctctgattagcctttcactgaatacacagtttaccagaacagtcacctatgccttagttaggcttagtgaaaaacagggcgaaggaagcaattggatatgcc

SEQ ID NO: 99412 - DNA, 1030 bp, Homo sapiens
gacagcatacaaaacaggtggctactaaaactaaatttgtttttgtgcaactattttgtaaaaagtactgactgggcagggtggaaggtgagccagctttcctccagcaggtggggaggcaaccataacttatgtgttcattaggacaaattccctttggggtggccctgtggtcacgttggccacagtaaatgagggtgtcctttaaatggagttagctttgttgaaagtcattgttgattgtgcttggtaaggccattctaattgccttataatgttgccacctacagtcattgaagtcaacaagagagacatagtcttcctggtggatggctcatctgcactgggactggccaacttcaatgccatccgagacttcattgctaaagtcatccagaggctggaaatcggacaggatcttatccaggtggcagtggcccagtatgcagacactgtgaggcctgaattttatttcaatacccatccaacaaaaagggaagtcataaccgctgtgcggaaaatgaagcccctggacggctcggccctgtacacgggctctgctctagactttgttcgtaacaacctattcacgagttcagccggctaccgggctgccgaggggattcctaagcttttggtgctgatcacaggtggtaagtccctagatgaaatcagccagcctgcccaggagctgaagagaagcagcataatggcctttgccattgggaacaagggtgccgatcaggctgagctggaagagatcgctttcgactcctccctggtgttcatcccagctgagttccgagccgccccattgcaaggcatgctgcctggcttgctggcacctctcaggaccctctctggaacccctgaaggtatggtggtgatggcttcagacacacaatggggtggtctccaggcagggcctttaagaacaaaacaaaatgaagtgtgtttgtgtttagctaagagacaacaaatgatgaaaacagcagcaacgaacatgatttattccaggtttccttttgca

SEQ ID NO: 99413 - DNA, 1087 bp, Homo sapiens
atccatcgatgtcactcaaggtgcagctcagagatgaacttggggatcactgtgatttttctttcaggactgagcctggaaacgggtccaggcacactgaaacgtcttcattaaagtttcctggacagagtttattgtaactaagatcatgtttggtgatgaactttacctgtgacaaattgaaggcgcactagaatgggtatttgtacaaatgcctttttttttttccttccgcaaggattctaccttaaggctaaagaatgtacatgacatccagaaagccgtacagggacagagagcagcagcttgggaaaaggggagccaataggttgcggccccagggggacaaaggaagcttaatttttgactgtgttccctttgtaccatttgaactgtgtgccaggtgggtgtatgaatgcaaagaaagtctctgccttgtaacccgccttacaggttcttttccgtgttggcttttccacatgtgattcttcccacaggaaacacctccaagccatttggactgtggtgtctggctgtatccgtcagatattctgggggatctactctgtaaccaatccttaggtgtttgtagttgtaaatacctgattttgctcttacggacatgtggcagtcactcagtatttgttgactactgagtgaataaagacttctgtttttctctgtatgatacagaaaagggctttccaggcaaacccttattcattcctggaagcccactgtgacctccaggagaccttccagactcagccctctcacatcgcaccaggcctaagtctccctggctccacggccctccatggcatgcccgcgcctggcatggcagtcaggataccttatcattatttgtccacctgtagaaggtgacacccagacaggaaatatcttacttttgtatcccaagagctcagcacagagccaggcacatactaggtgtttgtctatgtctgttacattaattaataaacaaaagaagtacaaggcatttaaaggacctttggctaaatatagacatttgctaaatatagtagcttgagtataactccctcctgtgaagacagtcacttat

SEQ ID NO: 99414 - DNA, 1006 bp, Homo sapiens
ggacagcgctgggagggcccgcaggcagcaggatgccagggcctcgccaggaagccatggtaggcgcccggggggagtctggacgtcaccccattctcaaggtgaagcctcgccagggtctcgccaagagagctgaggggtcagattcaccttctccctgcacctctgcacttccctctgggtttcctgtctgtacatccagtgccgcgcgtggcgtggggcgtggcgtggggtggttcctcacagttaccctcgctgggtgtgcggttgtctgacatcagtcctccccagaaagtgcggctgcccccggtcggtcgttctgtctgtagctggcgtggtatctggcacggcggaggccctgggtccgtgtttgtggatggaatgaatcaatgtgtgaatgaaggaagtcacattggcagcagtggcggggagggtaccgtttggggacaattcagatcattctgaggagacatgctgaggcctgctctaagacagcagctgtgggagggcacggagtggcattaagagaggaagctgactcgatgacgggcggagaggtgggcggaggctgtctcaggagcgccagcagctggcagtgagtggtgggcgtttcctgacactaaggctctgtgcagagcgcgtctacaaacactgtctattgtctcgtttcatcctcacaacaaccacccctatgaagttgtcactattattgtctctcctttacacatgagtctgggcacagggacttcaagtgaagcctgctaggaggcactgctgctgcccccgcgggaaggaaatgcagggaagggactcagggggcagcaggaattctgctttggatctgtcacatttgaggtgcctttggggcttccaggaagaggtgtccagacggcaggggctgaggcttggaggagtcaggattggaaatatgaactgggtgcccatcaacatctaggtcgtggtcaaagtgggtggtggggtattacaggaaagagctctgcagccc

SEQ ID NO: 99415 - DNA, 1059 bp, Homo sapiens
ctgtaagactgagaaatacataatggattttagctgtcgtgtttttagaaggtaattggtagatatttgcagtgcattgtcttcatgaaaaacaaaattgggcctggtgcggtggctcagacctgtaattccaacactttgggaggccaaggttagtggattgcttgagcccaggagttcaagatcaccctgggcaacatgctgaaaccctgtctctgaaaaaaaaaaaaaaattagccaggcgtggtggtgcacacctgcaggcctagctacttgggaggctgagttgggaggatagcttgagacaaggttgcagtgagccaaggttgtatgtagtgagccaagattgtgccattgcactccaacctgacactcaacagtgtgagaccttgtctccctaccctcccccccccacacaaaaaaaccccaaaaatcagaagtggttttcttagagatgctttactggaggtgtttgtggccatttccttggctactgtgtatagaggaggttactgtggtcactctggtatggacttaaaaagcatcaattctgtggaacacactgggaaagcggatacatttaggattgctatagacttattcctagacactttttgagatgagtttaattccagagtaaaatacattagaaattattttaagtatgcctcagagtgtatcacaaaacaacatttaatggtgtaatgtaacgccatggaagggctctgagctcaggtacagtgcaccttgactgggacacatacagctctgaggcaggtccttcaatattgggtcctcctgctccttatcctccctcaactctgccatccactcttcctgcacaggaagctctgcatctagttatctgccctctcctggccactttggtgtcctcattcccatggagctcacaatcggatcaaatcctgagtcagtacaagatgccagtgcctgcagctcccctccccgctccccacacccagcctttggtcggcagcccctcaggccttgccccacccactccatcttttctcactgtcctttcagcctccagacagg

SEQ ID NO: 99416 - DNA, 1068 bp, Homo sapiens
acaaaccatgaataaatctcccccatgcaaagccttttccttggtcccgccttccttcaaggctgccgtctaccatttattacacatgcacaaatcacagaaaatgtttaattgccaaattttaatggcagaatgtaatgaccagtgtttttctagttgcaaattaaagtctttcctgaccttgctctcttcactctgtggcttccaggagatgtctctattttctgactctctaactaccccttctctgtcttgacttgttcttacacacctcttatccttcccatgtaagtgtctcaaggttccttccttcaggctcctttctgttctgtgcatgctgcctgattttatcatcacctttaactaatcggtagtgtgtgctgaggtgcctgttagactcctccactgaggctttctgcctccaattcaaattcagttcaatcaataatcaaacccatcaccttccttagaaaatctaaagagatttaaaaagcaaaaacaataaaagacctattagatgaaaaataagtgtgatgaattgctgggtgctaggtagttatgaaaaaatatcctaaagacatgtcatttttaaaagagtttctattcccaattgctacagaagtataaaatactgaagatcaatgagaattaatgacaattcatcaaagtcctccattttgttaggaaaaccattcatccatctatccatctacccacccatcatttataaggcacctaccatgttccaagcagtgagaacatgcttttaatcgggagagcccattcataacctgggggtgggggctgagggaggtggtgggagaggttcagtacccaggtcacagggcagctgtgggaaggctgcatgctgccatatgtaagcccggcactggagctgttgtggatgctggagacaagctcactgttgctttccagacgctcttgctcttctgtccaccggaggcagtcaggaccctggcctgagggccaagaatactttgtgcctgagctggaccagctggccgtggggtaccaccttctttgcagacagcaggcagggtctggatc

SEQ ID NO: 99417 - DNA, 2254 bp, Homo sapiens
aggatttgggaaggtgcactgacgacacctccctcacgctcttctttgcatatcacatctctgggcctggctattattagaaccagctaacataatttgaggttatacaatctggtagcttggggcactggcattttaagttgttgattaaggggaaatgaatacgttttggaagaccagtgtttaaagggtagggttgatactttggtgtaaaaattgagaaacctgatccctgttttcatcggggtcacaagccatcccacctgcatgcaggcgtttctgagcaggctcagggttttcttgagggggccgctctgagaacaccgagaagggcaggaagctgaccggggttggtatcccccaaggaaagcatggagcgtgtacggagaggggaggtggcgaggagacaccagtgtcgggggcagccctgtccccacagcattatcagactccaggccagctctagcccaccctgagctctctttcttgaatggttcttttcagcacacagacggcgagaacccactacagcttactctagctgcgttccggggtctgtttaaaaggatatgagctcttttttaatggatttgttaggggagaataatgtacatattcttgggaaattcaagtgaaccttgaacttcttagggagaacctacactgatagaagaaaatggtgatcatttctcttttcttgctgctgacttgataaacattttggttagagatgctttgtttcttacagtcatattgttggatgtagtcacatgtgttcccccatataagactagaaatgccaacttcttggtctcgcagttttggcagtgccttcaataatgcctgatatgacaaatgtcttaatgaatgaatgaatgaatgaatgaaaatgagtagctatctcagttttatctagtgattactacaaaattaaaagaaacctctgaagcaaacgaatatgtcaatgtatgataataacctcttttaggaatatttctgttatattctaatgatcactccatttagctggaattttcctgttattctgtgtgtgtctgtgtgaatcagaacatcaaagcctctttcttcattatttgtgaatttgaccagttaactttccaattaagtttctgtactttttgattaaacttttattaccgcaaaaagaaattctgaattaaagatgaaggaagtactttttctcattgatggcaataggttatacagacttctgtattagaataatagcagtatttttggtaagattcgtgtggctatgcccctatttccccaatgtatctaaaatgaaatgtaaagtaagtgataaaattacaaactcttgtcagtgggacctcacctgttttcttattcacattttactgtattcgttgtgacttgattcatatgtctagttacttacagaacctttcattctgatgttactgcttctttaattggattttacatttcttttttcttctgtccttctctatagatctatcaggtccaaaaggtaggctcttctttctttattttctaacttgcatgtactgttttttccttgccaagggcctggtcacctttcagaaataacaccttgcactgaagatacatagaagttcttactgtttattttactactttgtgtatgaatttgtttgaacaagaatgcctagatcctcatcttgccccactcaaagcaacagtcagacacatttctgtgtactgaatgcttttgtcatctgcattttcctcaagaaatgtaaaaattgtttctttgagaagaaaagtaattctaaggcaaaattatatttcagaatgtggatagccttctgaaattatgtatggaaagaaaaagatgattttattagaaaacttaaaaaattccatacaaattaccacacattgagagattattagatattgagttaaaaatctgagtaaaaggacagtgatgatataaaatgaacctgccattcatccctaatgctcagagatcataaaatgacgtgcctctctgtttcctagtattttgtagaagcagctgaggtttagaagtaaatacactgggcaggccagatacagaaaataaagacaagcaagtcagtgattcaagatctagcaaaaatgaagtcagaagtgagcgagttccttgagaatttatagaatttgtatacacgggagtctttcccataaatgaatttagtttgatacttaaaacatctgtgatagtttccttttataaatttagttt

SEQ ID NO: 99418 - DNA, 1076 bp, Homo sapiens
gtccttgtcagtgtccttgcagtgccaaaagcagatccgtagtgattttgccaaaaaactgtggttcaaatgtgaggccccgtgagggcttccttgctgtttgaaaccttctcctgagatgtagcctcagggatgctgttgtaaccgttacctcgggaccgtctgaccccactcaccccagaagagggaagatttatggatccaaaatagaataaatgcaaagctcaattgacaaagtctgtagacaaggcccagacatcacagctgttgagcaggcccaggagaagcttgagtccttgaaaccagtgaagaaaatgctgtttcagggatgagggggagcgaccgagagaggaggaaactcagacttagcggtatagaggatgtcagtcactttggcaggagaacttttaacggaaatattgagggcaaaacctggttaatatgggttcaagagagaataggaggagagaggcacagaatcccaaactgtctctctcaaaatgcatcattttcagagccacaccctcctgaaattgtaggcacaatttcagatgtaagatgtgtgcacttacattttcctgggaaaagaatgttcagtttcttcagattctcagagggtctcctgaccctgaagagttgaaaaccattgcaatatgaacgagtattacggtgttatgtaacagcattcatttcattttcaatgatttttaaccagaaataagttgcatctttctgctggacaccactctttgccgagatatcaagtatatttgttttaagagctgaaatttcctataggatgttcaccattaggacagtacataagatggggaggaagtggatgggattttcattttcagccacatgacactttcccatcaggtacttgatctgaagaaatatattcctcagaacttaagaacttggatcctggagatgagagtcaaacctcctaatgtttataggcaccaaacaagcccagagtggtgaagaggcctgcgtggggtcacagttcttaggaacaaggccagtgcctgctgctcagggccctggtgggctgtgtgtcctccgtgcgc

SEQ ID NO: 99419 - DNA, 1090 bp, Homo sapiens
attttaatattatgaactttttacatttttgattgtaagatcgtatcttttatttattgactctgaaaacacaggccttcttcatttagctagaaaaaatgataaaccctaaaaaaggtggggaggtgatttatactactctggaatttgtatggatgcctcctcagaaagtctagattttggattttctagaatttctcgagtttagattttctggaaaatctagatttttaattttcctttttgaaaattgatgacagtgcatctgttaacctttgcccttttgtaactaaaatggattatgtagaagaggaaataagatttatcaaactgtttcagactttgtgaattatagcagcctttgccatggaagtttattgaatgctactggattctgtggtagctaccattctgacataattctttttgtaaatacatattagatcctagaaattatggaaaaatgcatttttgttaagattttaaagattgcttgtatttatgttttacttagcttttaaatttacttttggcaactctctttgctgttgttttttttttctgccatctttcttctgacagtcgcagcctgacttggagtatgggggtccttacgcctgggtgagatggtcggatatactttgctgtgtgaccttaactgtgtggtgtgaccataataacctgtggtatttccacgaatctcatgggtgctttgtctccagtttttgcctggggggctatgaggccaggagggcaggcttaccctgcagagtgagcagtcttcctcctggggcctccagggtgcagccctgatcctgccggaggggaggagcccaggcatctgtgcatgaacactccctcaccagatggcctttgagcaccagctgtttgccacgccttgtgttagcagctgtgcataccaagatgaaaaagatagtgtctgccttcaaggaactcaaatcagatcaagaattcccaaggcctctacatttgctttaaaagattaaatgtaaagccattttacctaatgaaaaatccattattttccagtctatatccattcaaattaaatgtacaatctgactttttt

SEQ ID NO: 99420 - DNA, 1031 bp, Homo sapiens
aggaaaattacccttaaaatgggtgttttctgagcagtgtttgctgtttgtttgtgtctcaagaaggacctcgcaaggatgttgcttcggtgatccctttttccatccaagtctggtgttgcctggctgggtgttgaggacaggttccttttgtacctgggcccttgagtagggtctctctgggtacgtgaacaggtgccacatattctttctttaggaaaatggcaggcagctggaacatggaaaacttagcgttttagcctcaccaggcatcgtgtgtacaggagcctagatagcaaactcctttagacacagtgttagaaagttggaattaataaaatatttaatgtgctccttgaagcatttgtttttgaaaggaaacttgacgtaaactaaacttccacagacgtgttttagaagtgactgtttccagtagattttcaatgatgtctgtatacactcagctgtggctgtaaaatacaacacacatactttgtaaacctgttagtgtgacgttttcaccctgacctgaaatgtttagtatcactcagaatacgagagtcatgaagctaacaggctgcaatgtgttcggcgctgtcgcccttcccgtgcaggaggccactgtctgcggggtccggtgctttcccgtcctgggctaaggtgggtgggcagagcagcctggaccgtctgcagccaccatgtcctctggacccctctctgcaccatgcccacctcctccaggcccccacaccatgccatgcagtggccgtgacagtgtttagaatcctttcttgtcttccatttcttcatcattttagggaggaagtgctgtgctttatgtcaagatgaaacacaacatctgattccttacctggctctgctagggcttaggaaagggggcttggttaaggtggactctgctgcctgcggcttctgtccgggcccggcccctgcagctgtgacacactgccatctggtggacacgagtggggctgcgtggctttccacggggctgaatagccttcctgtgt

SEQ ID NO: 99421 - DNA, 1115 bp, Homo sapiens
gagacactgtttcaaaaaagaaaaaatgctgctggggagccactgaaccaaccggagacccgctggtcccacgtgaagcagctgtcctggtgtggaggtacagagctagaccagcactggtccctccagccccctggtagcctctgctgcacctgaactggcagctcttgccgctgcctttagctctgcatgtatgcgccctgaaggttctgcctctctgttttggaatcgccttcccctcctcatgtttggggacctgcaagggtgtgaggcacgtgagggcatcgccatgcgtattttacaggcctctttctctggactgtccttcaaagggaatgacctttgtctttccaggacctacccagtgagatctgcctgccattttcctatgagtcaaaaatctgaactcactactgctcctttcctggttcataagccagagtagggctggttggcagtcactggcttgtggccctatgtaattatctcagccatcacacactggctctttcacaagggctggtcacacgcctcgagtgattcttcagaaatctgttgaacagcctgacacccagccctaggacgccgtgctggggggattccccagctactgagtggggccagagactctactgcctctgtgaccacatccctttccatactggtatctcgtttgttctaatgagtgtgtccattgcttttaatagtgaattttctgagcaatgagaatttgaccaaattgaaaagggggatttccatgcatttgaaattgccatgtgtttcttcttctgatccatttgctctaagaaatatagtctaagtttaggactgagggtttttttttaacagaatactgaatgattctttgttttgatttttttattgcaatttcaaaaatatgacctgctttccacaggactctctagcagaagttgaagagaaatataagaaggctatggtttccaatgctcagctagacaatgaaaagacaaacttcatgtaccaggttgataccctaaaagatatgttgctggagcttgaagaacagctggctgaatctaggcggcagtacgaagagaaaaacaaagtaagcattagtatgatacagaatgtta

SEQ ID NO: 99422 - DNA, 1479 bp, Homo sapiens
ggttcaggtgaggcctctcttcctggcctgcagacagccaccttcttgctatatccttcctccaacggtggagaaaaagcaatgtctctgatgtctcttcatataaggacactaatcctatttgatcaggaccccactcttatgacctcatttaaccttaattacttcgtaaaaaccctatctccaaatacagtcacattgggcattagggcttcaacagatgaatttagagggacacaattcattccatggcaattactaaagttttcagttttcttaaatctgagagtttaggctaactctccatccctagatttacgaaacagtccctctcattggtgaacattcctattctttggtgatcttgtatttgtttggggaggtgtggtagacagaataatggtcccccgaagttgcctacatccagatccctggaaactgtaaatatgatgccttacatggttaaagggcccctgcagttgtgatgagagaccttgagagaagggattatcctggattatttgatggaacaagcatccttctaagaggaaggcaactcaaaggcagaagtagaagatgtgacacaggaagctgaggttggagcgatgcgagagaggggccatgagccaaggaaagcagctcagtcttagaagctgaaaaaggcagggaaacagattctccctagagccttccagaaaggcttgattttagcccataagactcattttggacttctgacctctagaattgcaagagaataaatttgtgttttaagctgctgaatttatgacgattcattacaatggcaataagaaactaatacagggttggtttttaattttttgacttaatcggttctttaactgctgccttgaagtgagaatttcacccaaagcaggttttcttcctgcacttcttgaagccggaagtaggacaaggaaaaaaatcctagaatgctgacaatgagttcagggttgatgaggtgaaagagtgcttgcggcctcactcactgtcccagctctcaggttctctctcgggctggggtttttcttcctctttaaccctttatctgctttctgtctgttcctttcctcaggaaatccgacagctacagcagaaacaggcgagttctatcagggagatttctgatcttcaggaaacaatagagtggaaagacaaaaagataggggtaggattcccaagtcttgaaaatctactcaaatgggcagcctgcttagcaaatagagttttttcagagtctttagtttgcaaaaccgcttgtctgagtatgcatgcaactcccacgtgacacaaagtcgtattaatttatttaattttattaagtagtgaatacactaacttatccaaattgatatgaacttggattgtgacacggactctccatggagggtcttgtgaatgcgtagctgtgcgctctgcctgccccgtggctgggccgggccggtggttgttgaaaca

SEQ ID NO: 99423 - DNA, 1053 bp, Homo sapiens
ggaataatcctaaattcagaaatagctaccaatggagagacttccgacaccctcaataatgttggataccaaggtcctaccaagatgacaaaagaagagttaaatgccctcaagtcgacaggggatgggaccctaggtaagtatttgctttccttcggctcctcacacctttccactcagcattggttcaccctccatgcactgctggggttggagccaccgtcgctgatgggttaacagtcaccagcatgccatttgtttcatcacttcatggtaatttccttgcccacccggtgtggtcacccacgtgttgtctggcatgcatctctgtgtagtgcaccatcaatggctcaagtgaaccttttcttttgctgctcaaagctaccaagcaagactgtgaaggcaaaaggaaaacagtctcaaaattaagtaacaatgtggagagtactatttggttttcctcagacacatatatatctgtacctataaagtgtggctttttaaaccgattctatgacagaattatcaaaagatcagaatggttgaggccgtcaagtcagttggccatatttgcaagccaacatcgacatcctgggcagcattcagcgctttgagggtacggggtgcctgtggacagcaggtccgtctgtgttgcctttttcaagccaccgctcgaggtgggcaggcggccgtggtagtgggtgtggcggtgctgagagtctgagtatgcccacctttgtcagaggggatcctcctttgtatgccacgtgtttgcttctgaaagaatataaaactggggaatccagtagatcagaggaatattttataccattttcaatgatctgatttgtcataatttgtcataagagttggctttgggagaaaccttcagattctggcgtgcagcctgaagttgcagcgtgcaagtgaggcctcatctgtcactggtcaccctctgcgttccagtgttttacaaagaggctggaataaggtcagggtccgtgacttttcattttaatgtagaagctttcatcttatttctttttatttatg

SEQ ID NO: 99424 - DNA, 2063 bp, Homo sapiens
aaaatgtacgttataaaatatatgcaaagatatgcaaagaagttttagagtaaaactctaaatagaattcctaatatttcccccattttccctgggatatgggcaccccaccatggagatcactgggctataaaattatctagctttgactttcagtaacatagtaccatatctaatctgctggggttttgtttggagagtccaaaaattccaaaacagtttgatgttctttagacgatgaataatttatcatttaatttagtggtcatcttgatcttgaacatttgcctcctgctggtcctctctccctagtcccttagggaatggagcagaggtatcagggcatggacacagggtgttttctcaggaaaacaatagttgagtggcagaagatagatttcctttcatatgagctatttcaaaagcatcttccttgagactgaccttgaggctgcatttctaaaagtgcactgaatattctttttaaaaattacttgaaagctgcttttagggctgtgtgacatggagtgcagtttgacagctgcaaaagtacaagttgtcaagttgttcattgagaagtgagagtggggaattgaaccttcagtctgttcctaaacccatcattgtggattgtttggctgcctgatccagagttctttctatttgttgaaacttaacgtcacctttaaaaatctgtccacacaagatggcaccagcagccactctggcctttgatgtggtggcagtggccctcactgacccaaaatttactaatgcaactgctgctttgccgcacagaactggcaaaggcttgtttctcatgactctttgatgactctgtctttaggaataggggtgggtgggatttggaacgtgtgtttacattctaatgtagattatgtggccgccacatcatggggtcccttcaattttctcaatggtcttttaggaagagccagtgaagtggaggtgaaaaatgaaatcgtggcgaatgtggggaaaagagaaatcttgcacaatactgagaaagaacaacacacagaggacacagtgaaggactgtgtggacatagaggtattccctgctggtgagaataccgaggaccagaaatcctctgaagacactgccccattcctaggaaccttagcaggtgctacctatgaggaacaggttcaaagccaaattcttgagagcagttctctccctgaaaacacagtacaggttgagtcaaatgaggtcatgggtgcaccagatgacaggaccagaactccccttgagccatccaactgttggagtgacttagatggtgggaaccacacagagaatgtgggagaggcagcagtgactcaggttgaagagcaggcaggcacagtggcctcgtgtcctttagggcatagtgatgacacagtttatcatgatgacaaatgtatggtagaggtcccccaagagttagagacaagcacagggcatagtttagagaaagaattcaccaaccaggaagcagctgagcccaaggaggttccagcgcacagtacagaagtaggtagggatcacaacgaagaagagggtgaagaaacaggattaagggacgagaaaccaatcaagacagaagttcctggttctccagcaggaactgagggcaactgtcaggaagcgacaggtccaagtacagtagacactcaaaatgaacccttagatatgaaagagcccgatgaagaaaagagtgaccaacagggagaggcattggactcatcgcagaagaagacaaagaacaagaaaaagaaaaacaagaagaaaaaatccccagtacccgtagaaacccttaaagatgttaaaaaagagttaacgtatcagaacacagatttaagtgaaattaaggaagaagagcaggtaaagtctactgacagaaagtcagcagtggaagcccaaaacgaggtgactgaaaatccaaaacagaaaattgcagcagaaagcagtgaaaatgttgattgtccggagaatcctaaaattaagttggatggaaaacttgaccaagaaggtgatgatgtacaaacagcagctga

SEQ ID NO: 99425 - DNA, 1015 bp, Homo sapiens
aatgttttcacgcctgtaaacctagcacattgggaagccaaggtgggaggattgcttgaggccaggagttcaaggctgcagtgagctatgattgcacactgtactctagcctgggagacagagtgagacactgtctctaaaaaaaaaaaaaaaaaaaaaaaaagtttttgaaccttaaaatactttgtttgaatttctaatcatcattcaaaagagcagtaaaaaatggttacttgttcttgtacaagctactaattagactatagtaggatattttaaagagctgaatcacttttggtattttggtataaatattttcatttgttatgtcccagtatattcttactggaaaattcttgttttgatctgcctgaagaaaatatctgttttctatataaaaaaattttttaaaataattgtaaagttagatttaaaattgtaaaatataaaatcacaaaggaatgtaccttatgaatgttgttgacattttatgaaattatgtggattcatattactgttacaagatagaattgaatgcaaaaagaccaaaacctcaataaaatttgaggaaaacgtgttattatgtaattgaaataaaaacattttataattgtgcaagcctgtggttccactctttgggctgcttgaagtctgagtctgactactgttgtatgtaataccacctttgagtaatatctgcttgggggttgctgattcctattggggttccgtggaagacccacgcctgatgccctccctcagtaaggaatgcacttccctcctggcatcgagcctggggctagcatgggcattactgggagaactgagacgattgtcacgcaccatcccctgtgatctgtggttctgatgtgcagcctcagctgaaaacggtcttcacctgtggctgtgcttacctgcgccactacttacagtgttttgaagagcaggatgaaaacggcaaaaaccttgactgtttctgctcaagtgtcctgaagtagaggatggtggggatgat

SEQ ID NO: 99426 - DNA, 1144 bp, Homo sapiens
tcccccgcagtctgaagactctaatacttgacactcgttcagagagatgtttggggaatttatagacacttaacatttatgcatccttatatatcgggtccaggaggaattacagacacttaaaccattactgccttcttcctcaaaagaataacagctttggtaactgggttagcagaggtgttagtggacttagggttgtaaacagatactcatggcactgacatcgatgagtctatgagggaaattagaaagataaatacatctgggatgtaaactcggaaaggcgaggctgttcaaaatgttggtgctattgaattgtgattctcggtgtttgtacattgctaataatgttaaaccatgaagcctgtgagatcttgtgttgcagcgtggtttggccctagcgttcttgcatgctaacctaaggtagaagattagcagcctgtttgcatgcagccggatgctgcccctgacgtgaagcatgttctgggaggttgacccaacctcctttggctgtggcctcattcaccccgtcctgtctgtggcctcattcaccgtggtacgtgtataactacttccatcattcatttcactaacctgaacgatcattcttcagtttagcaatgtgctgaaaggcgcggcacgcggattcacctaaacctgtgtctttgtgatttctttagatattaggttgaaaaagctggttgatgaacgggaatgcttattggaacaggtaacaatctttttattactttaccggttcatgaacagggcacctgaaaccacctgcccatccttccttcttgcttactcagaaaacccctaagttaatcatgtctgaaagtctttatcaagccaactggtgttcttaagattgctatccaaatagaacatcaaagttaatattttcatccaaagagaacatcctgagtcatatgaggtttaataaggatgtctcaaagacccaaagccatggaattgaatttggtacattttactgaattgctgcttaaaataaatataaatgttgattattaataatattaatgattaactgttgagagacaagagcattactgagtcattccaaatagcacttctcttgtccatatgggttgtttgtccataaaagtcagttttgtac

SEQ ID NO: 99427 - DNA, 1022 bp, Homo sapiens
gagaccaactccctgaaagctggcaaaccgcctctgaacacacctgcagctggcctggacgctgagaaagcactcgacttttgggggacttaattacaatatattggagcccagaaggctccaagtggccctttctggtttcttagtaaataaagagaaagtgaatagcatggtgacttactgagtcttaaacattgcaggtatttcatgtacagtctcctcctgagtcctagaagaatttcactttagaaatgacttttctctcagagttacagtgtaattcatttttcattcattgtacattgaattgtgtttctgagaagagtactgatggacacaaagtgccttctgtcatttgacatgctgcttcctttctgatgggctctaacttcagcttttcggtctcattcagagtagagaaattaacagattttactggcgggtgttttcagattaagaaactcaaagggcagctggaggagagacagaagattggcaaactagacaatcttcgatctgaagatgatgtcttggaaaacgggacagacatgcatgtaatggacctacaaagtaaatgtcaattcttgtgtagaagtaaatgctttcacatgtgctgttttagtatacttgtgctggcagagaaaactgtcacggcaaagaatgccctcattccctcacatccccacaaaagcccttaaaaataaaagcacaaggaggggtaggtagacagaacaatggtgtttctctctgagcctatgaaatagaacaggtacccaaaaacgtgcaccaagataccaccacatgttgtgccgatggaaaccacatttactttgctggatacagcaatctttcgatctgttgattgtatgaaaaaaaaaaaatgaaaggcttttttcatgctaataaactagaaacagtcttaagggagataaaattatgcccagtctctctccgcccttttccctaccccctaccatctctttgtcttcttcactcataggcactctcttgcctgaggtttc

SEQ ID NO: 99428 - DNA, 1005 bp, Homo sapiens
cttgtagatggctgccttcttgctgtgtcctcacatgagagaagggggaggcaagctcttttggtcttttcttgaaaggacactaatcctataattagggtcttgccctcatgacctcatgtaaacctaattacctctccaagtccccatttccaacatatgggtctggccttcaaggcatcatttgggaggacatggttcagtttttagctgctactgaaagggatatttttcatggatgatgtaaattgtaatcccgcattgggaagagcttaaaccagatcatgtctaaggtttttctagtgtctagattctgtaatgttgctgttaatgtttttatcctttttttaatcagataaaccttcaaatccaaagaaagaaaatttgttattatcctccaatggttgtgatgaagtcaaattgacttttcctgatgatgactggaattcttcgacactagagcaaagagctaataataaagaaatcagcaatattgacaaaatggatttattagagccatttttttcagtgagtcaagatactaacacagagagtactcagtttcagtcaagtgaacttgaagacagtactgactatgctttcttgaataaaacatattctataccttattcagagtcaaaactaaagaaggaaagtcttactcctttaagttcagaattagatcctgaagtgcagaaaaaagaggaggttttttttaatattttggaacatcaagataagactgttggcttggaaagaatctacaatatttcagatgctaattatagagaaagtgctgaagatacacaaaagcatgatacagatgaagactcacagcaggaatatcacagtgcagaagaacaagaatacataagtaaccatttatcttttgaccaaacaaaagcattagatatatctaatccagaagttgttgaattaggaaattcgggttatgaagttaaatgtgctagcaatgtagaagataatcgtgttaactcgggaagt

SEQ ID NO: 99429 - DNA, 1050 bp, Homo sapiens
gagtttttgcatgacatgctaccacacgttctctggcttatgtgtcaagagttgtttgtactgcctttagaaaaacatatttactgtggttcatttttttcttttactcagcatttaaaagaaaatatttagagttctagtaaaattagaaccaagtggggttgggcaaggtggcttgtgcctgtaatcccagcactttgggaagctgaggcaggagaatcacttaaggccaagagttcaagaccaatgtgggcaacataataggacccccgtctctacaatacatttttttacaaattagctgggcattgtggcacacatgtagtcctagcaacttgcgaggctgagacaggaggattgcttgagcccaggagttcaagaaccaagtgtataatataatattagtgttaaatggatgacttaggcctaaataatttagttttgtgcactcaacttttgaacaggaatttatcaagtaattctgctaagaaggaattgggatcagcactactgtctcttttgggggacttaaaagttagatatgtgactttgaaagaaaaaatacacaaaggcataccactggaagagctgcccccactgtcactagaatcaaaattattatctaccttctctacttttgcttccagggtatgtatatatgttttagaaataaaaaattttacttcatttagacaaaacattttaaacaaagattttttttccttttctctccttccagctaatgaaaaaagaaacacatgtgtgagttatggtttcatttgatttataattcattagatcctaaaaattgcttaattcagttaactttaaactttgttttgttccctatttagaacattgataaatgttttaatgaagtgtttatcttttttcttgacatttaatattgtacaaatgtatggggtacatgtaatattttttgcatgcataggatgtgtactaatcaagttgatattcaggatatccatcaccttgtgtatttgtcatttctatgtgttaggaacatttcaagtcctctcttttagctac

SEQ ID NO: 99430 - DNA, 1050 bp, Homo sapiens
gggaaaaaatcaaaatacaaaagcacttatacatttttctcagtgtctaattagtctctggagacctggtccttaaccctgctttcattgctgtctttcagggtaaaggcagcagtaatgctaacgctagcaagtaaactgaagcgtgacgatggtctcaaagggtcccggacggcagccacagcgtccgactcgactcggagggtttctgtgagagacaaattgcttgttaaaggtaatgatcattcgtgtgaactgtttttatatcctataacaaaaggaagtttgactggagagtctttggggatataaagcaacctactgctgaatagaaatacctgtttaaaagattttaaaatataattgcttatctcttatagtgaaggacattgtaccacgcaggtgatatgagcacactgttgcaaggagatggtattagaaactgcagtgtgtcttatacacttgggatgttctttgtcacgtctgccaaaatgctagcagaaagaataaggtgctgagagtcagcaaagcctaagactggtttcagagctgccattatcttcctttctttctgattctcagcaccatagtttctgctctgtaaaggggaaggagtcaaattttgtaatctcttaggatcttttcctgttttattcaggtcaaagcctacggcgaatcttgtgaaaaattagttctcttcacggaattaataacatatagtgttctagagttttcgtgacttctgctatccatgttggtgaggagaaactttatccttggagaagggttggtaaaatgtatgagagtatgcgtgcatgcagatatgcattcatttgtatgtttgagcataaattttgcatttattcatttagcaaactcttaaaattttcaagtgctttgaagtcggtttcttgggggtcataagacctataaaagatgaagaaacagttgcaacctttaaggagattataatttgcttatttataataaagttaactttgtattttatttatttatttttttgagacagagtctcactctcacccaggc

SEQ ID NO: 99431 - DNA, 1007 bp, Homo sapiens
agcttctctcccaggggaacactttgtcctgattcaggcctcttatgatttggaccagtgggcacagaacattgccatctgggtcagtagagcattattttaccaataaagcaagctgatttaccacttaggtagtaaaggtattttttaaaaagacaaaagattatggtaaactctggctgggtgggagctaagtcctgggcgcactcttcttcttcttcttcttcttttttttttttttttttgaggcagagtttcactcttgttgcccaagctggagtgcaatggcgcgatcttggctcactgcaacctccatctcctgggttcaagtgattctcctgcctcagcctcccaagtagctgggattacaggcgtaagccaccatgcctggccagcacccttctttataaagaacttccatttaccatggtgactgaatgtctgtggtgctagggcaacagagttgacctgggctctttcctggttttttcgtgtttagttagcctttgcctgcatgtattaatctccctgagatatggtttcttcttgtcaaagtacagtagcataattcttgaaataaatggtttagtgaccacttaaaggttgaaggaaaacatctctatttggaattaactagtaaaacactgtaaggagaaaagcacatgacaaaaaccactggtttgcaattttagagtattggcacgattattatcagacaaatagggagggagatctaccaactttccataaaccatacgaatccctgtagcaccgctaactttacacgtgttcaaaggttagcgtcaacatatggactgctgctcactgccagaccttcctgatgtgctgtttcttttgcaggtacatgtaaagtgcattttcctgatccaaacaagcttcattgttttcagctaacagtaaccccaggtaatattcttacataagtattaaagtgatttcaaacagcgaattataaaggctgcccaaacctgtaatctttgctttgg

SEQ ID NO: 99432 - DNA, 1373 bp, Homo sapiens
aaacgttatgccagatgataaaaggggacgattgcaggcccatggactgtgttacagtttgtctctaacatgaaacagcaagaggtagccccctctcccgtcctcatgctccctctcagtcccctggattgccccagtcctgtgaccatgttgccctgaagaagaccatcttcatgactgctcattgtagatggagaattcaacataaatacagcaagaaaatgtgtttgggcttctgaagagttgtctgcttaccttaacatgtttacttttttgaacttgtactgtataggctgttggtgaaattcttaagaagttgtaatgaactcaaaattgaggccagagcttgctttcccttttcccaaacaaaattggttttctgcacaagcgatgctaatgatgtgttcagtgtaactcgcagattggcaataagatacccgctacaaactgtgattggatgcaaaatctcttagcttctttcacgaatgttggccctgcctagatgttgtgaagcctcccagaatgcatagagtcattcactgtagatctcttattgaaatgcgtattttatttaatgtaagtatattttggaacagatttgtaatttgtacaattcaatgctttaattattttttctattctcatttagtttgtattttcattgtatagagcagacagaaagatgttgggtcaagcaactattgaagagaaatacaaagaaaatatgaaaggcacattattcattttgtccaaatgcaatgagaatctcactcttaaaaatcagctcttgctttcgggtccggatgtggtgagcacattttggagccctttgaagctagatttggatgatcaaaacaaaaaggcagggagcccattctaacatgctgcccagaggaaactggctggagcctggaccagctggggttgatgcttttgcagtggtcatgtgattgtgacctggtagctacttatcagagagccagaccctgctgtcctgggagacaggagcgatgcctcaggaatcagcccaatgtctgatgtcactgagactgtacctgtggccttcttctgagtttgctatggctccaggccctgccggtggggtgagcctcctaggccttggaggaccaggagtcaacagtggcatatgccatcctcggccaggttaatatactgcagaggaaaagccctgaagagaggcaagtggatttactccagcatgtagacatttgaaccagtgaaatcaaacacaaaataaatgtctgtctagtttcatttgctgcctgcctaacactctcaaacttaactgccagcttccttagacctctggattcccccatctgccatctactgggtttagtttgtttttctta

SEQ ID NO: 99433 - DNA, 1056 bp, Homo sapiens
gtgctgtggctcacacctgtaatcccagcactttgggaggccgaggtgagcggatcacaaggtcaggagatcgagaccatcctggctaacacggtgaaaccccatctctactgaaaaaaaaaaatacacaaaaaattagccgggcttggtggcacacgcctatagtcccagctacccgggaggctgaggcaggagaatcccttgaacctaggaggcagaggttgcagtgagccgagatcgtgccactccagcctgggcaacagagcgggactctgtctcaaaaaaataaaaagaatggggtttaaaatagagcttcagggacctatgagacgataacaaatgatataacattcgtttcattgaaatccctgaaacagagaaagatgacagcctgaaaaagtgcttgaagaaataatggctaaaaaatttcctgaatttggcaagagacataaacatacagaatcaagaaactgagtaaaccccaaatagcataaacgcaaagaaatctatgccagagacatatgattagacttctaaaaatgaaagacagaattctctaaagcagtcagagaaagatgacacttcaccagtatgggaaaaagaatttggatgactgaatttctcatcagaaaccagaaagaccagaagaaagggacacaattatttttcttcaagtgctcagagaaaaccgtcaagctagaatcctgtacccagtgaatatatctttcaggaatgaagaagtaatcaaaacattctcagatgaagaaaaactaagaatttatcaccaaatacaataggctttccttcttctttagagttttctgaattacgtttgatagcagaagcaaaaatcttagcaatatctgatgtggttcaaaatgtacataaaggacatatttaagataattatagaaaggcaaaggtaaaggaacataataggagatgaggtctgtgcttcactggaactggcaaagtgacaacaacacaggctgacacgatggctcacacctataatccccctgctttgggaggccaaggcaggaggattgcttgagg

SEQ ID NO: 99434 - DNA, 1056 bp, Homo sapiens; identical to SEQ ID NO: 99433

SEQ ID NO: 99435 - DNA, 1073 bp, Homo sapiens
accttctccgtgctcctgcagctgcatctgcacctgtaatggcacaagtgccacagctgggtcccagccacagcaccacacccccactggttcttcagcttcgcccagcccagaccccaatgccaccagcgctctagacagcccccctccgccacccagcctagactccatcctgcacacgccctccccagcgtgctttccctcacccattcctttctgccttggttgcgtgctggcagccctgcacctgagcccttgtgggtccgtctgtcctgtcactgtgatgctagcttgtgctcctgcctttaaacttgacatctcagctaggccctggcccatgtcctgagagatccattcctctgagttcaaaacctgtcccgactgctctcctccaaccctcttcccaccctgggcacctcttgctatccaggttctcacctctgaagtccgggggatgccctcagtccctccttgtcatcgtcccctgcctccaatgcagcaccttcctgtctgtctggattccagaatacacccactaccggcctcatgtccattttcatggccaccaaccctagaccaagggtctggatgcctgccatggcctcctgggggcctgctgctgccattttccacacggccacagaatgaccaacagacaggccagtcagaccatcgcatccctccctcagcctcactgcgtctgccccgtggccgggcctgcagggcctgtcgatctgtccctgcgccttcaccccctccacactctccacccgccacgccaggcccctctgttctagagacagaatgtctgtctgtcccctgcaaagcccttgctgggacgccattccctgcccttgtacagccatctctgtcaccaccccaccttgggcctgcgaggtgccttcacagcgccaactggtgggtaggagtctgttcccctcttcccctgcttttgtccgtctgcctctctgggatgctggctcctcgagggagccctttcagggctgctttgctgaggcatctccagtgcctggtgctgtcaggaggtacctggtgaagtcagtttctggggc

SEQ ID NO: 99436 - DNA, 1073 bp, Homo sapiens; identical to SEQ ID NO: 99435

SEQ ID NO: 99437 - DNA, 1123 bp, Homo sapiens
ctgaggatggacaggaggcggccggacaaggagtggggcccaaagcaacttcctgaggggggcacaggtcattcagaggcggggagagcctggcccatggggcccgggggcgggcaggaaaggcagacagaggcgctgggaggaccggggctctttcctgagggtcctggggagccacggaaggctcggagccaggagcagtaggatctgactggcatattggaaggtcactgtggctgctgatggagaagtgagagctgcctgcccccagacctcccatgcttgcctggggcctcctgtctcctggctcccacccactcagtccagctccttctccagcaagccaggctggctctgcccccggggcctttgcatgcactgcaccctgtgcctggcacacagctccccagctgcccctggggccttccctgcccagctggtttatggggggagccgcctgccccgaccatcctcactcctgctttcctccccaccggcgcaccagcaccaggcacacggcgtgtctgactcctggccttggtggtggtttccaccagccggcgtgtaggcgccaggagctccgtgggtgcaggacttcaccacctgctacgttccccgcacctggcacgcagtcaggctcgggagatgtttactgaagcaatgggtgggcaagtgaaggaacagggggcctggtcccttaggatggcgcctgctgctcaccatggccctgaggcccttgggacgggtcccgcctgctcaccgtgtccccgggcgctcgggatggcgctggcctgctccccgtggccccaagatcctcaggctgctgcctgcctgcccactttgtccccaaggccgcctgaattggcctctagcctcccttcgtggagactgcagcccctcccggtgcctcgcctgcaagtgcgcccctccccaccccggggctgcctctccagctcctcctgctggagcagcctaccccaaaggaagctctctggacctgggtcccaccctggccatcctccctttgcccctccagcagttctgacccattcactccagacctcagcctcccaaactatgcctggctcctgggatgagcggcggctgcacacagtgggcagag

SEQ ID NO: 99438 - DNA, 1383 bp, Homo sapiens
tgcttcttcctgagcacctatgggtgctccagtggtcggatcctcctggtgactggaggacggtgtgatcactgcagctcctctggaggaaggaggcccagcagtacggggattcaccccgatatccaagccctgcaccccattttccctccaggcatcttgggtctgcctctcccatgagtgccaagtccaggccgaggtgtggcccgttccctaggagtcatcctccacgggccgggggagaagctgtgaggggttggggcccctttgggagctgcctttgagggcaccacaggtgacaaggaccagggtcccagagtacagaaggccacacagtcacctcctgcaaagtgtcccacctgcttggtaggagcccagtgaggccaaccgccctgctgggctggctgtgttccaggagcccaccgctgagcgtgcacacagcgtcgacccccgggacgcctggatgctcttcgtcaggcagagtgacaagggtgtcaatggcaagaagaggagcaggggcaaggccaagaagctgaaggtgaggccggcatcccgtcagtgccaggccgtggggggttccgcctcctcgctcctcatccactcccactcctacatcctgaacatttccaatagcacacccctcacgcctcggcctggggacagagaacagagagaacccaggcagccccagggggagccccgagttaggggcctggtcccaaccatttccccacacccctaaaatgccaggctctccctcttttctcctccctctgcatccaggccagggaggctgggctagcccaggctgtggtgagaaccttgtccacactggaggggcctgcaggagtgcctggctcccagggactaggggcacagggtccctctcaccctcactcagccttaggtcttggcctgggcagaaacttggtgcttggtcctggtgctgcctcctgcttggagcccccaaaatggaaaatacggggtgtgggcttctctgtcccctgggggccagtatcacctgcctgggatctgaacacacgatggaaggccagctcggagtgcatgaggcaggtgcacaggccgcgctgtcctcgtggcctggccttctacctctgcccagcctcctggccctgccctaagcttctccccacagggggctcactggcttctggttcgggtcccaacccagcctagtggggacctgctgatggtggactcgggcccagtgcagaccctgagatgcaagtccccaaaagcagcctagagtcttcttccctccacgaggcctggccgcaggagcgggcttcagccctctgcctccccactcagagcagagtccttccctgccaaagccccgccccgagggcccccacctccagc

SEQ ID NO: 99439 - DNA, 1055 bp, Homo sapiens
ccgagttagcccaagttcacacagcagagccagaaatggaggccaggctgtctggcccagagtctgtgcttgctgaaaggcatttagaggtcccttctgggtgccacacagcatgcttggtgaactcagatggtctctgccccacctggatcttaagatgcagatcctgaggcaggtctgggtggatcccagattctgcatttctgggagttcccagggaatgtgacactgctggtgcatgaccacgctgctggtgcatgaccacgtttggagcagccaggctagagtgctggtttcacggaaggctctgccaaatgactgcctgtggggaagggccaccctcccacctgacttggagcccttgcaggctctgagaagccctgcagctgagaaacctgttggactcttgaatcccactctggccttgagcaggggcccactcccacacacgcgaactgtagggcgctgcagggaaagcagaagaggtgctgggtggggcccaacccgtgcgggcccttgctctgtgaccttggcggccacattcttctctgggcctgagcccttcccaaaagcggggctgagtgggcaggagggagtgtggctggctggcccttgggtcacctctgcaggctgttggggtggcccagtgcctcaaaggcaccctccttgcagatggggcagtggacctccgtgttcttggacaacgccagcggctgctccctcacagtgcgcagtggctcccacttcagtgctgtcctcctgggcgtgtgagcggccaccacaggcccttcctctcaggggcaaatggagcacagatctagacaatgtgtggacagtgtcagagtagcagtggccacatggaggaggaggcccacccggaactctgcccacactggccactgcagttcagcccacagagccactgcaggcaggcctacggacgtgacacgcacgctggtggtcccggagccagggttgattcaggacaccatcttgggctcttatccaggaaagaaagagtcggcgtgcctgggggcacctgctagtctccagct

SEQ ID NO: 99440 - DNA, 2764 bp, Homo sapiens
tgtctgtactgtgttgtgcagtaccagaagttgctggtagctacttggtcttctgggacctgccattgcagacgtggtgattgtaatcttaatcttgttgaaacaggatggatttatgactgggatggccggaagccacaccagacacccagtcacctggtcatgggagaggtactttgttggcttttcatagtacttacactgtgagctgcttcctgaagtggcactcttaaggccaggtgcccccacccatcttcagtcctcagctcttcccctgtgcactgtttcctcttgctatttaacagtttgtatcctagaagatcgctaggctttttgcagataccagcagaagtctttgaagaagaaaaaacatgtttgttacggatactgacctgtgagccactgagagggtaactggggcccagagaagggccaggctgaattctgcctttaggacagcagcccaggaagcatttcctaccatgtgcagccatctgcaccgcatctcctgaacttgcttggtccatgatttgggagccccgtggtgatcttaaacgcccatgcgcagccgtggcatttgcggagtgctctctcacacgttgagtatggttctctgccttgcctttacaaacaagggcctgaaggggagagagcttgcagctgcctaaggtgacagtgctgcagcctagaccagaattgttctttggggcagtaggcttccccaaatggtttttccttggcaataggactgtcccttagatgtctcttcccatttgtagatcactgccccatctcctccatatcccctcacctaaaatagaatgggtgaaactatgatgctatgcaggatactgtcatttacattaacattaaaccgtacctgtacttgatgcaaaggacatgtgctccacaatccaggaatagccactttcagggattttccaaatctaattagattgaaatgcaaaatatccctctgttctagctattgttaaccctggctgcatgtgggaaacactcaaggagctttaagatacaaaacactgccaggctcccttacccagtcagtcaaatccgattctggagttgggacctaggtgtgtgatgagaactgctgagtcctgtcgaaggttaagctgggcagcactgcttggcagccactggaggtgctgttcccacccatgtgcagctgggcagggtccctaccccagggcagcagttaatggcctagacacccctgcatatttgagatcaagaaatgtcagtagtggttaataatgtgaattccacagtctgtatctttcacacttccattctctgcttttaaggtgagattctaagtactgtggacccataatctgtcaggtagagtctgaaatgtttttcctctcattttagggatgggcgtgttttgggcgtgctagaggtgtcacgctccattggggacgggcagtacaagcgctgcggtgtcacctctgtgcccgacatcagacgctgccagctgacccccaatgacaggtaaaaggccctataagaggcacaggtgtgtgtgcatgtgggtttatttctcttcctcacttccagtttctatcaagcctttgttggagggaaggtgtgcatggtgctaggccctgggggtgcagagataaacaaaatgtggtttctgctctggtggggtccacagtggtagggggggacacatggggatgggcagctgcagtccagtgtgtcctaggcatgtgctgtgtgctggggtctttggcagtaggggaaggggttatccctgtcagagagaggagaaggggcttcctggcagagggaacacacagtaaggcattaaaatgtgacagtgtgaaagcatggccagacaggcgcttgagggacggagggagtggtgggaaagtgatagcagggtactttgggggcagatcctgaagggccggccctcagccccatgctggagagtttgaactttagttgatcattggtggagaatcataggtttttacacagagccaggatcggttgagaaagagacagttcacctgttcatctcctgttctccatgcctaagggtacggcaccgtgctggctgagggcagggcctcaacaggtgatggttaaagatggcattatggggctagggaggcctgtgagcagcggtgcagcagccctggcctgatgatgaagggctgaactaaggcagtagcaggaggggtcaaggaaagctcccggaagcaggattcacagcactgagttgatgaggggaggccagagacactagtggcactgtggcgagtgggcctccgagtgctgctctgagtcccgccccagtgctgcggatgaagagcgcgtgccttgctttggcactcgcctgcttggccttgtcttgagccactgccccattctccacatcttcttcagtgtgtttgtcatgttctcacgtaccgcggggtcctccatcatctctccagcagccgccgcctctggtgttctgaaggatgcaccttctgctttgcttcctagctcgccttcctgggttgtagtcatgggtctgtgtgattggttattgagggtctgagtctcaggacactggaaggggtgggagcctgccaggactaggccccacggtgttctcagcatggacgataggctcggcaagtagcggccgagtgaaagcctagttaaacgaggaaaacaggctgggtgtggtggctcacgcctgtaatcccaacactttgggaggcggaggcaggtggatcac

SEQ ID NO: 99441 - DNA, 1062 bp, Homo sapiens
gagtgagacccagtctcagaaaaaaaaatttaaaaaaggaaagaaatagggattgttcttaatcatgcttgaaaatcaattgatgtgcagaaattacaaaaacaaaatggccagccctggtgacccacgcctgtaatcccagcatttgggaggccgaggcaggtggatcacgaggtcaggagttcgagaccagcctggccaatgtggtgaaaccctgtctctactaaaaacacaaaaattagcctggcatggttgcgcgcgcctgtattcccagctactcaggaggctaaggcagaagaatctcttgaacctgggaggcggaggttgcagtgagctgagatcgcgccactgcattccagcctggtgacagaacgagactccgtctcaaaaaaataaaacaaaaaacaaaccaaaatgacagtgggaggaggataatcttccctccttgagagattgttttcttttggcccttctgtaataggagatgtaatcagtgtagagaaaaccgtgaagagatgccttttggacactttcaagcatactgatgaagagttccttaaacaagcttccagccagtaagtataacttgatgatgaagtttgagtggactgtgtgtggtgttttcctaaatgcatttcagtcttctgatgtggtttaacactattgctcactgtctgaaaagtgcgtagcactcagcttttataaccgttagctaaatctaaaacagaaaaaaagcaagtatcaaggaaatggttcattttgaaatataagatacttcccattgagctctggaaattagtctcaaagtgctgggctattggtggtgactgtgtttctgatgtgtttccccccaggaagcctgcctggaaagatgggtccactgccacgtgtgttctggctgtagacaacattctttatattgccaacctcggagatagtcgggtatgtggctctggagccacccacttagatgacaatacgttttatggggaaaagactttagcacgtacttgttgaataagattaaagtgatggtgtctggttgaaacctttcttctgggg

SEQ ID NO: 99442 - DNA, 1050 bp, Homo sapiens
agctgggactgtaggtgcctgccaccacgcccggctaatttttttgtattgttagtagagatggggtttcaccgtgttagccaggatggtcttgatctcctgatctcgtgatccgcctgcctcggcctcccaaagcgctgggattacaggcatgagccaccacacctggcccacacacaagtattttttttttaaaaaaagataaaatgctgtgaaagttacttaaatatttgtctcagttaaagccttttttttcccatttgtaacagtgtgactggtgtcttaaccagtgtgacttcctctgacttattaatgttcactctttgagacgaaatttaaaagctttaatggaaaagtgtggtttttgctgtgagaatttgattaactctcaattcgttctttcagtactcgggtttcatattttgctgtttttgatggacatggaggaattcgagcctcaaaatttgctgcacagaatttgcatcaaaacttaatcagaaaatttcctaaaggtgagactgagaactaaatcagttgatactcaaattggttattgctgtttggttggctgtgtgaagcagtcagatgtgttattttggctttagcagagaatcattgatgagtcttaaaagagtggtgctgaggagtggatgccaaggcttccaggagtagcggccatgcaggtgtgacttagaatggcacttctcatgattctaagtgataggcaccttttgtcaatcgtctttgggttcagttagtgtcttgcctttactggaaaactagtaaaccaacttcaaatagcactgtgttatatgtgaggaaagaaacagagattgttctggctgggcacggtggctcacacagcactttgggaggccaaggccagaagatcactcaagcccaggagtttgagaccagcctggcaacatagggagactctatctctataaaaaaaaaaaacaaacctaactggacatggtggtatgtgcctgtggtcccagctgctcaggaggctgtggtgggaggattttctgagccccaggaggttca

SEQ ID NO: 99443 - DNA, 1046 bp, Homo sapiens
attttcagggcatcttaagggcttttgagataaactctcctgacttgcatttgtccttattcaattatcacaagactaatttgcacatgatccttttgcctgatttgaatctcacttctctgggatggcagcacatcccttgccctgatgctttgacttacaccctagacagagttgttttgtgctcactgactcctcttttgtgtccctgtgcaacctcttagagctcaccctgtccaacagtgctccgatttgagttatagacttgcagctgggggagatgccttaaggggtattgcttatttgtttgcgccattaggatattgctgagtcagacagtcatagttccctctcatttgctctgggactagggtttccagagggttgggcacagttttgtattggctcttttgttctcttttccttagcctcttcggtgatctttggtctgaagggctatgtggctgagcggaagggtgagagggaggagatgcaggatgcccacgtcatcctgaacgacatcaccgaggagtgtaggcccccatcgtccctcatgtgagtctcatgtggtaggaagcccggctggcattaacatctcctgggttctgactggcattttggactggctagtttgtatttactagaaaatctaacacatcacttgattgtacatcagtgattctcagctggggttgattttgctccccgcccaggggacatttgtcagtgtttgggtacatttttgtcacaactgcgggagggagttgttactggcatctggtgggtagagactagggatgctggtaaacatcttagaagcacagggcagccccacaacaaagaattgttcagcctggaatgtcagtagtgtcgcggttgagcagccctgctgagcgggagatgacgcttcatagcatggctctgcagcgtgtgttactccttaccagcaactgagcggcttctggcagagaatatttttaatccatgacctagaagataagagttggaagccactaattaaagtatgaatggtgatcaagcagagc

SEQ ID NO: 99444 - DNA, 1673 bp, Homo sapiens
taaactgtgatcatgccactgcattctagtctgtgtgacagaatgagaccctgtgtcaaaaacaaaaagaagaagaaatgtctggcaaagagtaggttgagtaagtaaataagtacttgcatccttttttttttttttttttttttttttttaaagagaaacgtcttactactttgcccaggcaggtctcaaatgcctgggctgaagtgatccttctgcctcagtctccagaagtagctgtgactgcaggcatgtgccactgcatctggctgttgcatacttttatacctaaatgcagagaacatttcaagtcatttattaggacagcagctgcccttattggagattgatgtgttaggcactgtgacaaatgctcttcctacttgtcctgacccattttcaaacatccctctgagatgacagtattcttaccatgttacgcacgggtgaagacagctgagactgaaagattaagttgcacacctctttgaaacttgacttttctcatttcaaacacatacactgcagattcccttagctttgagtacagattcatccttttgctagtgggaacagctgtggcagccttattttgcctttgaaaggatgtattacagttcttaaaggctgccatttacctcattttgagccttttcgagtacttgttactttttggaacgtgattaggatatgttagtttgcttacagattttgtaagtgtttgtttaacactaagagcctgtggatataaaaacatgtatatgctacaggccaaaaaaaaccatgtatttttaccactgggaaaagtcttttacaaaccccttcagcagggtcagtttgactcagggcctggatcttaactttatgttctctcactgtgggacccccctccccctccccgccaaccatgaagacacaactcctgggtctgcctgtgtctgccagtccttgcttcaaatgaccttgtctttgagtgctaggatgaagcccagtctactagtgactttttccaacagtctacagctgtgtttctgtctggcttttactttatttccaggttctcttgccacatcaatatcccagatggtaaagactgaagggaaaggagcaaagagaaaaacctccgaggaagagaagaatggcagtgaagagcttgtggaaaagaaagtttgtaaaggttttcagacaatttgaaaacaaatgtattagacttcatattttaaaacaacccagagcaaaaccagtttcagctttctaataatactttctttttatgtctgtatttaagaaataagtagggttccctttttgcaaatgaatttccaagtttctctgtgctttctcctacttttcatgtacatctatctctgatcctacctttgatcagataggaaacctacatttgttcctcaagagttaaaaaatacaggtggtttttttcttagccttctgcagtgaatggttagttttttgaccacctagtctctctctgacttccaatctttgtttgcagtttgtcaattagtgctttgaattacgtgatttagcttagtaggcagcttccctaagcctggaaaaagccgttgaaatttgtagtcagttgtgtaacttgtcaaagttagtgaggaagaaaacgaaaagtattaactaaagagaatacttcagttgtggta

SEQ ID NO: 99445 - DNA, 1058 bp, Homo sapiens
cacagtgtggcctgaaaccttcccaataaagatagtacccttagttgtaatgaaagttaatatgttctggctgggcgtggtggctcacgcctataatcccagcactttgggaagccaaggcgggtagatcacttgaggtcaggagttcaagaccagcctggccaacatggcgaaaccctgtctctactaaaaatacaaaaattagccaggcatggtggcatgtgcctgtcgtcccagctactcaggaggcagaggcaggagagtcgcttgaacccaggaggcagaggttgcagtgagctgagatcacgccattgcactccagcctgggtgacagagaaagactctgtctccaaaaaaaaggaaagttaatatgttcaaagaaggctgttaagggatttaatagaagaaatgaagatacagcatagctgtctcttatttatctacaggacaaaaggcaaagtagtaaaaaatttagaagatttacataacactattaacaagcttaattttttggatatataatcttgggtctagtgttttagatttctagagaagttaacacattttttttttcttgagacggagtctcacactctcacccaggctggagtgcagtggcacaatcttggctcactgctacctccacctcccgggtttaagcgattctcctgcctcagcctcctgagtagttgggactacaggcgtgtgccaccatgcctggctaatttttgtatttttagtagagacagggttttcccatattggccaggctggtctcgaactcctgaccttgtgatctgtccgcctcagcctcccaaagtgctgagattacaggcgtgagccactgcacccagccgataacacattctttttttttttttccttttttgagactgtctctctctctgttgcccaggctggagtgcagtggcgcgatctcagctcagtgcaagctctgcctcccaggttcatgccattctgctgcctcagcctcccaagtagctgggactacaggctcccgccaccacgcccacctaatttttttgtatttttagtag

SEQ ID NO: 99446 - DNA, 1371 bp, Homo sapiens
tcttcccaggattctattttaaagaaagacttttaaatgtttcatgctttcaataatgaaattatcaagaaaatacttgttttcctcaaaatattcagtggccctgaagatgcctgttagggcatcaatcattgcttttatgttgactgtaactgttggaaacagatgtccatattaaaaaagctgttaagaaaatatgttttaaaaatttgcccaacaggaaggagaaaattagaatctaatagcaaacttgtgtcaaagcaggggagaccacatgatcttcctctttgaaaatctgtcctgggtgatgaccatatgctctctaaacaggttttctgtgttttagggaaagaagctcagaaaggacccctgctctttgatgacctccctccggccagcagtactgactcaggtacagtcttcaggctctcccaggtgtgtgtcaacgtctctactcatcctgggattgtagttgtctcaatctttttccctttcccccattttcaacacacagatgttttaggtgttggactgtctttaagttttgaatccatggcatcaggtaaggcagaaaaatctgctagtcgctagccctgagaagtactgcgaggaaatgtggagcagttttctctggttcatttgagtatttattttactacctgaagtacaatttaactttttaaggcagatttttatttcctttgaaataataggactttaaaataggttcaagatattattcattgcagtatgagttgccactggattgacgcaaagttttgagtttatttcagtaacctacataggtgtcctggtgggatggattctgaaacttaagtcttacatattttttgtgggctcactaagtgttctgctgtgtttcaggatcagggggacctttgctttttgatgatctcccacccgctagcagtggcgattcaggtaagtggtaggaaaaatccaaggtgctgatggaaataatacatagtattttactcttatgtgaaatttatgtataggttttaacgggattttggatgacattaagtcataatacagcataaggtttactaaaactataaacaggcacattaattggaagcacaaagataatactgtatcactttctggtgatattaacttcttgaggttcagattgttggaactgcctttaagaattaagagttcactaatttactcttaactttgttattaacattttttaaaaattcagagttcattattccgatttgccttgttaaacagagtgcttgactcaaatgtatcgaggctagtagcattggctctacctcctcctgaaaatgttccttttcatgtcctaattaagtagaagggaagaatagagcagat

SEQ ID NO: 99447 - DNA, 1032 bp, Homo sapiens
catcataggattgttgtaagggtaaaatgagttgatgtttatgaagtttctggaagggtgcccatgtatggaggcagcatagtacctcactaaaagcacggactgcatggctttgaatccccactccactccttactggctctgtgatcttgaacaggtaattgacctcagtgcctcagttttttcatcggtaaataataatagtacctatctcataagaattaaatgagaagatgtgtggagctcttagaatagtgcctgacaggcaggcagtattatcatttttagaagccattcccagttgtggccagcaaaatgtaggatggtctcattgtgtttaattgaaatacctctcatagtattccagagtgagaaagaaggtgataggcagttctctggggatggggctcagtttggggcaccatctgactgaattgtagccagaggagaggcggccaggctagtattaatactaagctgtaagttgcattgtgaggaatgcttacaagaactgaaaatatatttattacctgggtaaaagaagacttcctcccttgtacagtggcagtggaaagacctgatttagatgggcaagttaattcaaaagttaaaatatgacctggtacaagcggaagggttgtttgctcttcatgttgggctgttacctgtaaatgtcccctcccttgtcctaagacatctggctctgtgacaccactgaatgcagcgtgattgtctggaacatctcatgtggtttttgagtctgtccggagaacgggcgttgtgattgttagacccaatgtttgggcaaaagtgacctacttcgggatattaggaattcttgtaagtggattaatacattgagtaatggttatcctaaatactttttttgggtgctggggacagagtctggttttgtcccccaggctggagtgcagtggcgctatctcagctcaccgcaacctccgcctcccaggttcaagcagttttcctgcttcagcctcccaagtagctggggctacaggcacccgccac

SEQ ID NO: 99448 - DNA, 1035 bp, Homo sapiens
aggaatacatgtatcagattgttgattgtggcgtcacttatcatatgaagaactgggaaaagcttgaacccatcagtaaggatctggtcgaatgagtggagatgcttcccatgtgtggctgttggagaggatgaattagacttgggtgtgttggcctggagcatgccttgatgggttatgtgaacactatatgtggagtattgtgtagagtatgactctgtcttctacaaattaaaatgcatgagtccatgtgcatgagcattaaggaaagtggaaaggatacactaaactcatactgtggttggggggtgtggcggaacctgtccccccttttttctgataatacctctgtggtgtttggaaaacacctggatttattttatagttgaaaaaattgaggtataaaaaacaatttagccaaaatattttaacatccttttttaactttattggatacagcaacctttaacctgaatatgatcaacccaagggtatttttctcagcatagtatataacttccagtagacttagctccagaatgtagataactgaggaaaaaaaaaagttctagatgagattaactatgattaatggacatttttagtcttgtattcttattagggttctaatatttttaagattaggggaggggcctcttccagatttttaggtcagggtcacactttgtccaatgattgcagcccccaatgctttgaatttcagtttattcaaaatagaatgtaagggcctggagcagtgggtcacatctgtaatcccagcactttgggatgctgaggcaggaagattgcttgagtacagtagttcgtgaccaacctgggcaacatagtgagaccccgtctctacaaaaagttaaaaaattagctgggcatggtggtgtatgcctgtagtttcagctactcgggaatctgacgagggaggattgcttgagcccagaaggttggggctgcagtgagctgtgatcacaccactgcactccaacctggctcacagagcgagactcttgtctcaattta

SEQ ID NO: 99449 - DNA, 1053 bp, Homo sapiens
cgcccaggctggagtgcagtgacataaacacagctcactgcagtctcgacctccgtgggcacaggtgattcttccacctcagcctccttggtagctgggactacaggtgcgcaccaccacagccagctaatttttgtatgttttgtagagacaaggctttgccatgttgcccaggctgctctcgaactcctggggctcaagtgttctgcccaccttggccctcccagagtgctgggattacagtggtaagccactgtgcctggctgagccattaacagttgtttaaaagtggaaaaacgcagtcttaaatgaattatgggaaagcactgagtgtccaaagggagaatactacactgcttatatcacatcaaatgtattaatattttgtttagatctttttatttttgttttaaacgttgcatctaatgttcccacccctaaacctcttaaatgtttataatctagaaaaatacatagaatgcactaaatatttcaggtattttgctaaattagtagttttcatccaagcccttaaaagttttaattgctgaatgaatcaagttttttaaaggagagatgtatatattttacctaaaaaaaagtgtttgttcatatcaggcagaaatggaactttcctatgtcatacccataaaagtgccgacctgatgtctttaagattggcagcttatattgacaatccatgtatgtcagttgaaggtgtcatggtttaaaattgcttcgccagtaacttgatttcacttttatagggtggttcttttacttatttggttgctacactagtactttaaaaattgatggtcagttgttgaggaggaaataaaatatttgatggccacaccatcttaaaaatactttaaaaaaattggaggctgggctcgatggcgcatacttgtaatcccagcgctttgggggaacaaggcaggaggatggcttgaggccaggaatttgagaagagcctggcacaacttcgtgagacccctgtctctacgattaaaaaaaaaaaagaagaatatttgaacataaaggttaagg

SEQ ID NO: 99450 - DNA, 1004 bp, Homo sapiens
ctgcgtcctgtgggttacagtctccgggtttcatctgtcaaaacgcgtgaatatttcatatgcaagacttccagcttgatgttgtagtttagggccttattacaaaatttaacttgggggcagaaaacctggaaaacttaagacgttcagatttccaggcccacctcagccccagtaaatccgaatccctgagagtggggtttccgaatctgttactaaatccccaggccaacccagcgggggctggagaccagtggtttgggagctgctgttgtagggtagacggaggtgagtaaggcccagccttcgctttctaagagctgctttctgaagggtactaattacggtaattaaaactggcaaaagttaatgactgtgggaaatgctgaggactcttgaggagggattgtcgggcaccgagagactggggaaggaggcagtgtttgaattgagcttccaaggatgttcaggcttgtgatttgcagtaattctgggcgagaaaacattttattttattttactttttgagacggagtctcactcttgtcgcccaggctggagtgcaatggtgagatctgagctcactgcaacctccgggttcaaacaattctcctgcctaggcctccctactagctgagattacaggcgccgaccaccacacccggctaatttttatatttttagtagagacggggtttcaccatgttgggtagggtggtcttgaactcctgacctcaggtgatccgcccgcctcggcctcccaaattgctgggattacaggtgtgagccaccgtgccctgcccccactgaccgttctgatggtacagagcatctcagtaactggtcctggagtctttgaacttgactcagccattcattttcaaaataaccacggttttagctgtgggtaaaaattggatttgtgtagcagtcttttttctcttgtcaatggagtataatttctatctgaatatatttgggacagcatttggattcaccagtgt

SEQ ID NO: 99451 - DNA, 1158 bp, Homo sapiens
cgatgaaagggcagttttggctgcgtgtggttggcctgtaatctcaacattttgggaggctgaggcgggcagatcgcttgacttcaggagttcgagaccagtctgggcaacatggcaaaaccctgtctctaccaaaaatacaaaaaattaaccaggcatggtggtgagtgcctgtggttccagctaccctggaggctgaggtgggaggatcgcttgagcccaggcactgcattccctgggcaacagagccagaccctgtctccaaagtagaaagaaagaaagagagagagagagagacagagagaagaaagaaagagactgcagtttcattagtaacagaaagagtcaaatgggtgctctacctgatggctgcagcgccccttgtgcgtgtgcttgttaatgcgtgacagcatccctctgtttgccagcttcgttccagagcccagcatgaatggatacgcggaatttccgcccagccccagtaaccccaccaaggagcccgtggagccccagcccagccaggtcccactgcaggaagatgtggacatgagcagtggctccagtggacatgagaccaacgaaaactgctccacggggcgggactcgcagggcagtgactgtgacgacagtgggaaggagctggggatgctggtggagccaccggatgcccgccagaggtgagttcagcctctggccagatggaggctgggcaggttgttttctcagtggctcatttctgctgtgatttgattgcttttgcaatctttaaatcatgattaccaagtttttcaagatttttgaaaatacctaaaatgtgccagtgtctgtccttcctcataacgaggccctgtcgagttcgcagatccagttgccaacagacaggtactgggtagtgtaaggagatcttgggaggtagcagtggtgggtaacccagccagtggctgcttatacaacactgggcagtttatagaaaaggaactggctcctgttatcatgtgtttctgtgtcctggtacttagtttttctgatgtctgaaggttttatattccagttttatcttaaccttgtatttttaaaaaattgtcttaccatggtattatctagcctgttatcactggtaggatggcaggggaagatgtgtctggagcatacaattgt

SEQ ID NO: 99452 - DNA, 1052 bp, Homo sapiens
gtaagcctggtccccatctaggtatgattcctccaggaagggttccctgccactcctgctccctcccggattgtggattaggtaccaagcctgagtgcttccttagtacctgcatggtgtcatctttacctgtctgtccacacagccagactaagttctgagaggatctggctggcttctgccctgcacagcacgtgtagtagacatcaaatatttcttaagtggatgattcaaatctgggctgctagtcaattctgacatctcccaagtgtggagttgagtggatgaggctgatgaggaggctgtctgtgaggtgacatggtggcctttctttctctcttgaaggtgattagaatgactggtttcatgaagggcctctacacagacgccgagatgaagtctgataatgtgaaggtgggtttgagtcgggcttctcctattgactcctcgccttaacggatgggattttttgtaggcctggtagtgtggcttgtgtcatttctctgctgcatgtggttggaatacaaggtcagtgaattcgtaaattgatatatataccctttctcatttcattttctcattgtggcaactggatgtcatgctagttttattcactgaaaaatgggattagtatttcaaaggttaatgctagcccatcaactaaattaaaggctttaatgaattgtttttgttttgtcagtaaaaggtcagtatttctagatttgttatatatctaaaaacagctttgtatgtaaacagaaactatcctatgcctggtaaacatacagaagataatgcacactcttcaaagtattgtaatatttgtattttcaatggaaatgtttcaggataaagatgcaaaaattagcttcctacaaaaggccatagacgtggttgtaatggtgtcgggagagccactgttggccaaaccagcccgaatcgtggcggggcatgagcctgaaagaacaaacgagctgctccagataattggaaaatgctgtctcaacaaggtactactgctgtcctggcattttgaacttacttagtacttg

SEQ ID NO: 99453 - DNA, 1206 bp, Homo sapiens
gagcagtgctagtttctgaaaaatcatccttttcctaaagtgtgtaagttaaagaagggtggcaagatgtagtagtgggaattttcgccttagaaaggaggcttagatggtaggttccacatgtgcacaataattagtaatgcgtttgtgaccagcttagtgccagaagcctttgctgtcttttggttgaccgctgtggggtaggtttccagaagcgcagtggctggcacaaagggtgtggcattatggctactgcgtgcccttaatgacccttcaccccacaccttctccagtgttgttaaggcatgctgattttgatggacgaaaaacaaaaacgttgatgaccagtgaaatggtccttgtcatcgcgtgtgagtgttttgggcgtctctgacctgcctgttctttggtttctctgggttcttactgatttgcttgcacgtgctgtatgttaaggacatctgccaatttgccagtttttgcatgagtgtttctttttcagtttgtttctactaattatatttggtttggtttctgatttgcctaagtgttaaactgttatgtgcttgaggcctctaatcttttttttggtaatctgtccagagatttgagaggtgaagatttgtgctttatcatacatttttttttacttaatttcttatgttatctcttactttaattcatggtataaggtgaggctctgaatctattttgtcagaataatccatccgtggttccaggatcacttattcattgaatgcttctctcctgctctgtgaagccttttgtagtctgggttacgggcttttttgtgtgtggtgttttttacttccacttttttatttttactattagttttctatcattgttcttttccaaaaagttttaagccatcttatttgcttattcttccggatgaattttaaaaactcttcatgactcaagaattccactcttgcaaaataaactaacgtctcagaatttaactggacttgtgttaaatatatgctttcattagtttaggaagtttaggcacctctaacttcagcttagtgaaggtgtccccctcttctgagaacacgttgcgtgtacttggttgcgtatgttggtcacagtggttgctcgctggtttattttattttattttatttatttatttatttatttatttatttatttatttatttatttattttgagacggagt

SEQ ID NO: 99454 - DNA, 1007 bp, Homo sapiens
tatattttcattgtgcaattttatgtcaggaagaagggaccctaaaaccagtgaaaatagtctttcccctgaaaaggaacataacttttcctactgtaaagctaagaaggaacatagcatgaaacagcttggtaagctaagtgaaccatagtggaggctgtgagtgaatgttgagagttgaaagctttactgcctggtcctgtgcttctgcttggtcattgaacatgtggaagtctgtgggggtggttggcataggtgtggccctgcttgacctggggcctgcgctctagaacactgccttctggccagggtggagagggggcagagggacatgttggccccatgcagggctgcccctggccaggtgaggatttcctaccctgagtcaatcacaggcttaaattgtccatttgagccttccttcactgattctgcagacatttatgataataaagagaacacaggggtacatatgtgcatgttagtttgtgatgaatcttcaaggaaaatgaagccaagaggagcaggaatgaggggcgtgagcagggagggcctctctgagggaggacatctggacagagagctgacttgggtgaaggaggacatgcaggtgtgtgagtggtgaggtgggtggagagaggaacagtgataggggaaagggccgggccaggaagcagggcctggagctgctggtcccggagctgctgttcccggtccacagcagctgtgtggtttacagtgagtgcacacagaagtccttgaagagttttaagcagcaccgaggcaagatttgacttaggttgtagaaggcctccttttaaaactgtggagtggcaggagtaaaggctgcagcgcagcgaggagggggccatggcatctggatgagaggaggtgatggtttggaccagagtgccagtggtgacagcagagtgggtttactgtgctggcaggttggatgccacttgtttgaacggaaaggaatcaaagatgagattcattgtgggagg

SEQ ID NO: 99455 - DNA, 1041 bp, Homo sapiens
ctaactactttaatgttcatgagactttttcatgatgtattgaagactggacataacttgaggttttatttgctttaatatgctaagttatgtaactttattaactcagcttttagttaattatatgcctttttatacatagattatttttacatttcagtcaaaatgctttcttaatcttgctgtcgggatctcacagtggtgtggctgatgacatagagaaacggtttttatgtcttcgtcctgctctgctttattctactcagaaaatgctcgcagtagagatgtttaaagtgctagttaggcacgttggggaagttggcctgtcacagccaatcacattcagtccagccgtgtggtgggtgtgcccagccctcgtcctgctgcctcagagggggtggtccttggttcagtatcagtaaccactgtcatctgtgacttcagacggaattcttcaagatgctagaattcttcagtttcacttaaggtaaaaatagtgtaaaattagactttaggggaagaggaaatttttgctgggcccaacttgccttgtatctgtctgacttttacacgttctggagcgtagctggaataccgatcagcacatccttctctctctgtgtgcgttcccctgagagctggcatttccaggagtgggcgcacttggtacagcagccgcagtgtgaaagatgatctgtggttattttattccaagtagggtgactatatgggagttgtctgggtcttcagtagcatgggatggcggaggaaaaggtgactgagctggagcagggtgtttccactgaagagagcccctgccatacaggcatgcatgttaccattcaaccacatcttggtgatgtatgttttctttttgtgggagctttcctcatctccaggcgcctggggggaaacacccaggcacactgcaatcctgcactgcaggagagggcagcaggcagtggcgaaagcctgaggggtggactcctggtagcccccacccagctagctaggacctcatctctgaggccacagggatga

SEQ ID NO: 99456 - DNA, 1812 bp, Homo sapiens
ggtgtgagccactgtgcccagcctgttttttttttcacagcaaaaatattttctcaggtatttgatattttttctatcttcataaactttggaacatcagtcagtaattagtagacaatatgtggaagttttcaatatggccaggactgtgcactgtgtccaaaatatttttcttttcttcctgcattcctgaaacagccgcctacttgcagcctctcagctgctgggtctggctctactggggaggtgagtggagactggcagtgtcaggtagctccagaaatggggggcgggggcagtctgctcctcctggcctgagtagaccaaggatccactcatagtctggggtgtcctttccctttcaccccagagccgcccatgggggaggaacattctagatgcatgttttctaaaagctgcctttggtcagtcctttgtcagtcctaacttgcagtgtgggaaaacatagataagtaagtgtgctctatgttaatgaagccgctgatcaccggccctttggtgtacagtcttaatgactaattttaaactgttttatgtcaggaacaaaagaagctaatattaactcaactagtatttcagatgataattcagctagtctgcggtgtgagaatattcagcccaaccccacagagaagcagaaaggtaagaatggtccagtttcgccctttcctggcgagagcagagtgagccctccagaaccttcttctcaaagggccgcagcccagagcccgaggttttcctcttgggtctgaacgtggcaagtgattcacagtgattcacttctgcctttttgcataaactagaatcgaacatggtggtttcttgatagcatgggacccactcgtgtgctcccccgtgctctgtaagtgagaggaggtggcatgtttcatcacttggggggtgtcatgagtggtccctgaaaagtttcggggtcactacttggagagccccaccagtcaagaggtgtaccccccagacttcatggtcacagtgctgtggccaccatgatttttctgtctgtcattttctttgagtgttgaattatacctcagtgggattttactttcaccataaattttctcagcctttaaaaaaactttggtaaaatagccattcaatgtttgtgttttgaggccttggagctcctaacaggcctgcaagggtaccagtgcccaggtaaccaaggcttgtgcaggtggcagcggcagggtggggtgtggccaggggagggctgatgtttgttgatttgttcaaacagaaaattatctgttgaaggcctactgcatgtcagccctgaggctgggagcgcatgagccagtgaagtcaggctggcctcctgccttcctggtgcagatgaggctcgaagatcaaccgaaatcgtttgatggggtggcagtctgggacgggaggggccttggttggtgagggtggcccagaaagcctgcagggcagaaggggctgtataaaccaagatcccggctgggatgcgactgcagcagggctggctcagcccagaggaagggccagagccaggtccctgtgccagcttatggagtttagcctttattggaagagcagcgggaggctaattatatctttaggaggagcagtataatgatatttagattttaaagagtggccatgttaattagggagggttaaagattgtgcagagaagagagagaggcctggactgtggaggcgccctgggaggggagaagtggtaggattccagggctgctggcacgtgctgggggagctggcctggagcgtagagggaaggcccaggct

SEQ ID NO: 99457 - DNA, 1150 bp, Homo sapiens
gaggggcctccagctggctgtgtgaagagaggtctggggtcagccctggtcagtgggaccccaatgtggcccctgccctgaggtttgtgacccagggcaataagcgcctccaggtagaaagcagcaggtgaagggctggtgtcactgagagcgcagtcaggggagaggcggaggccctgagggtctttgtgcagtagagggcatgacgaggctgtggggacgggaggccaggtgtggaccaggaggcctgggcagcacagggacgtggggaagctgggtgggggtggagggcgaggctcacagggactcaggcctggagggcttgcagaggacactgtttgcagacagtccatcttagcttcagcgggtagcttgagatgctgttctagctagagatggttggtgattagattcctctctgccgacctctgacacagtttcagatgcttgggactgatgaaaatgtgtaattctaatttaatctaatttctttttatttaggtcagggagtggtaaaaccgtttcaaatgtgattacagagtcacacaattctgacaatgaagaggatgatcaatttgtggtggaagctgcccctcagctctctgaaatgtcagaaattgaaatggttagttaaccgaaatatgatgttttttaataataatgttttaccttcattgagattaatagtctagcttttagatttatgtagacaaaaatgtcctgtaatttttcagttagttttctaccttcgttaattttgttgttctttttttgagatccacagaagcatgatctttaaaattcaacaagcctgaatcttctttttcccccttcctttcctgctcaggtaacagcagtggaactagaagaagaggagaagcatggtgagtcctgggcacgagtgtgcatgtatgtccatgtgtgtgtgctcatgcaccttctccacgtgggcctggaaggatccagtgcaagggactgttgtgtgccaggttctggtctgggtcacactggcgggatcacactggtggtacataggaccctgcgggcatggattactcttaaggcgatggctgctgctccccatccttagaggagggggagggcacagttggaagctggaaactcactggcaactgtcctgcagatgaca

SEQ ID NO: 99458 - DNA, 1112 bp, Homo sapiens
ctcagcctgtctccatatcaggtacctatcaactggattgttttcatttttgttttttgacctctttgtaattgcatgtacttctctatgtaattttcctcttgatctctactatcgtttgcttgtgtttctagtccttaaagttcataaatttaaaaaggagatttcaggatggcctttatggacgttgtctggacatacatcctcactttcttccgcagtttaccctggttttcctcagacagaggctagcgcagccccccggagtccttgttctccttaagagggtctcgctctgcaaagcattggcgccatggcttttcctttgcatgggtgtgcataccgagagacaggcagcttaggaaaaacaacataaggaagacttaaaaggatgcactgatttacgacgttttttgatgttagccatttttttggaaattgttttttaaagcaaaagttttttaaaaacatggtttatagtttttcacttacatatactattgtaaatacttagcagagtcttaagttactgtataaaacatttcattgtgtttgaagacatacttatgggtcttgaggtctgggtcctaatacttttaaatagtgtatttattatgtaaactgaggagtgccatttaaagtgtgaggattgcctgaaaaggttttgtttctttcttttttttttttttttgagatggagtcttactctgtcgcccaggctggagtgcagtggcgcaatctcggctcactgcaaccaccgcctcccgagttcaagtgattctcctgcctcagcctcctgagtaactgggactacaggcgcacgccaccatgcccagctaatttttgtattttcagtagagatggggtttcaccgtgttgaccaggatggtctccacctcctgacctcgtgatccgcctgcctcggcctcccaaagtgctgggattacaggcatgagccactgcacccggccaggttttgtttctttaaggattagcacaaatggcaccgttgggtttttcttcatacaatttccaaaataaattctgtactcaggttgttatatgattttctgagctgaataagttcaggagcagattattaagatctgcca

SEQ ID NO: 99459 - DNA, 1064 bp, Homo sapiens
tactggcgctgcctgcagcgcacaacctccacagcggggcgttctctgatcgaggctcagacttgcgagaacgaagaagccgagacggtcaccgccatggcctcgctgtccgtgggcgtgaagcccgccgaaaagaggtgagcacctgccctgccgcccgcctgcaggctcacccagccccactgtgcccactgacacactattcagggtcagaacctttatggcacatgccctgcccaacagactagagacaggccagtgtggccccctccttccagtgccaaagccccttagagacgcatgaggagcattagatcctgaacagatggacccggggctgccaggccagggctaggctggcgggtggggcagcacacagcctttaacccacgttctgttctctcctctctgtggtgcacctgccccacgcccccatctccttctcttgcgggatccacagaccagatgaggagcccatggaagaggagccgcccctgtagcactccctcgaagctgctgttctcttgtctgtctgtctctgtcttgaagctcagccaagaaactttcccgtgtcacgcctgcgtcccaccgtggggctctcttggagcacccagggacacccagcgtgcaacagccacgggaagcctttctgccgcccaggcccacaggtctcgagacgcacatgcacgcctgggcgtggcagcctcacagggaacacgggacagacgccggcgacgcgcagacacacggacacgcggaagccaagcacactctggcgggtcccgcaagggacgccgtggaagaaaggagcctgtggcaacaggcggccgagctgccgaattcagttgacacgaggcacagaaaacaaatatcaaagatctaataatacaaaacaaacttgattaaaactggtgcttaaagtttattacccacaactccacagtctctgtgtaaaccactcgactcatcttgtagcttatttttttttaaagaggacgttttctacggctgtggcccgcctctgtgaaccatagcggtgtgcggcggggggtctgcacccgggt

SEQ ID NO: 99460 - DNA, 1847 bp, Homo sapiens
ttttgtggcgacttgctttacgggccagtgcgtggtcagcctgcagagacattccacatgtgtttgggataatgtgtcctctccgtctgtttcccagagttctgtttgtgttcattaaacagaacttgctaattgtattgttcacgctttggttttcctgaccgacgattgtctgctggatctgagaaagacatggcaaagtctcccacgatggtgggacacacatattcttgtcttctttccattgcacccatttttacttagacattttaaagctgctttactaaatatagacatttgacatcattatgccctttcgtgatgaattgaagtcttatcacaataacctgtatatccagtaatggcctttcccttacatcttttgtgccagatattggagctgtgaccccagctgccctttggccaggtttgcctgcctagcgtcagttttcctttgggacttttagccttcccctgaagtttcagatgtgtctcctataaacagcaaaagcctgggcaatatattattttcacgtcctatcctgtggtctgtgctttaagtggaaacgtgggtcatttgctgttagtttgatcccttttttcagatgccttcttagcatcttattcattgtttgtccccagtttctgtggctctttcctttttctcttttctcgccttctcttggggtaattgagggtttcctgcattccatttgttccctctactgagtccaaagatatgcaacctattttcttgtttttcattcgtcatctttaacaattggagcatgtattgtcaacacagtcagcatcctcactcccacctccatgcaaaccaaagcccggactgggccagccccaattagggtgccagagtagacacagagcacccaggtgggtatccttccactgcaaaactacttgtttatcagacactgaaatttaaccagggccgtgaatggttttgtttgtttttgttttactaaatctggcagccctagcctcagtgccccatcccaggttatatcactgactggtgtttcatttccttctttcttttgtttgatttcactgataagacaccattattattgctctatgtcatccctgttcatccaggctttcctgtacttatgtcattttcttggctcatcattccttctcatttctcacactgtcttctaggattattttcatactgccttaagtataatacatccactagagtgtcccttgggaaaacactcatgtggtcaacttccccagctcgcgtttgtgaggaggcaggtctttatctcacccttgttcttggatgatagtttcactggataaacaattctgggttgacaaggatttgctcttgacacattgattggcttaagattttaagccactgtctgcttgcctccattgctgttaaggagttggtgtgtggctaatggctacctctttgaagattctgttttctctagcagcttttagaattttctttttgtttttgatgttctgcagttttactctgatgtacctaggtgtgcattcctgggtttttttgcccctggcttgggtctcacatcttccatgtcacgttcataaatctctggttgtttcatcatacagaaatgtcatttatttttaatacatactcactatatttactttttataatttataactgatcatttcagtaactgcgatctttaaggatctaatcaattaaaacttattaaaagttaataaactttttatttttggatagtctgagatttacagaaacattgtagagatcgtgtacaagttcctcatatcccccctcagaaaacgtcttctactgtgaacatcttact

SEQ ID NO: 99461 - DNA, 1044 bp, Homo sapiens
aagacccccacctttctagggccccaggccgccacagcaccagaaccttcctccctccccttctgttgaggccgatgtgaggggcagcatcagagacggcggaggtgggacctgggactgcaggtcccgcctccagccaggggcactccagtcaggggtctccccctgcgccagaagtgggagcagcacagggcatcctccgggcccctcccccgcccccagcagggctgctgccatggctttcccagaaaggccagcactgtaatcctaaattttgaaagattcactctgagacaaacctgctttattttccaggaaaggtctcattcagacacaggcctgaaggccaagcacaccagcaatatctccaggtgacacaaactgcccggcacagcaaggggagcttttccaggccagggaagccagggcggtgcgcgtcagctgtgtgttcctccagcccttgccattagagggagaggggcagcttccttagaacctacgaggctccgtctctctgcagtgactcctgatctaagggccgtgggtgaggcctgcagatgatcggcagggctcagtgccttgccccggtgaccatgcgcagccgctgagggaggcccaggaccggcagcgctgagcctcggctcacccaaaggctgccatggggcccatggggccttgacccagacttgggaagccagggagctggcggtcagggaagtgggcactggccagtggtctcccagacaggagggaggttcggtggcttgaagaagtagaggacgccaagggcagggtgaccctgggggtcagtgagagcccagaagtgcaggcacctcacgggaggacagttgggctctcgcaggtgtgggggaggctgggctggccaagccaagagcacgaggcagaaggggaaaggggagagagggacgcatggccaggcctgaggtggtctgttgggccccactgaaacccctggatcttctgaggggtgggcgcatacgtccccttgcacacctccgccgacagctgacagtgctgccttaa

SEQ ID NO: 99462 - DNA, 1250 bp, Homo sapiens
acgtcaacatggctttcaccggcggcctggacccccccatgggagacgctgagtacttggcggccttcaggtgagcctcccggcttcacatgacacctgaagtagcagcttttcctctgtgcacacattccaggaagcacttgttggagatgagcgtgtctgaaactggtctgtggctgaacggggctgtggggtccggaggagctgtctcagttcattcttcagtgccaagcgtggaatcttggcgactatcttcttaccatcagctcttagtgctcccttttgtgcatgaaataaaaccaggagctcactttgggtcgatggtgagagagtgatggagacagaggcagggacttttgtgcagagtgttatgttcatgagaaacgaaggcaaagacctgcagggtctcatgatctcctaattcttcttccgcaaacctcctgtgatgtgatgtccaatggaaataagtatttcttctttatttattcctaaaaatcaaaggcagttgtcgccctccctcccatttccttcgtgtggctgtgacccttcagcatttagccgcagggcgcgccgtttaaagacgcagtgtttgcttttgtcatcaagcggttccttctcctttggtctaggccagattggggtcattcctgtgacccaaaatgggatgctgagcagcgcaggttttcttgtcatcgttttaaaatggcagcttcacctgccgtggtggagtgacgggcgtccagggcagcagcccacagcccacatcggttcccagagccacgtgaggagaagggttttattagcgtggctgagcctgacatgccgtgtctctgttagaaaacgctgtcagtatggtgtcaaagccccatacagtcttcagcgcttttctctttctctgtctccatggtcttgttctgatttacatacatataaaacgcacgtgtgcagacgtgtctttgtgacgtgtgtgcatgtgtctgtgtatggatgtgagtgcacgtctgcatatgtgtgtgtccacgtgcgtgtgtgtgtttgtgtgggtcggtgttcatctgtgtgtgtgtgtctgtgtgggtgggtgttcgttcatctgtgtgtgtgtctgtgtgggtgggtgttcatctgtgtgcatgtctctcagtgcttgtgcaggtgtctacagccatgtgcatgtctgcaggtgtgtgtccatgcctatgtgtgttacacacatctgtgtgggtgtggatgcatgtctgtgtgcatgc

SEQ ID NO: 99463 - DNA, 1039 bp, Homo sapiens
ccttcctgacagaggctgaggaagtggctcacttgtcagagacacggcaggtgtaggaaattgatcagatggcttcgtctgggaaatggtggcctctaggcctggctgaactccagccccatcggctgctggagtcaggattgtgccatggcgctaagggcgagggaaacagtgctgcagacgcgaacattggcccttagaacccctgcgaccctgcaccacgtagccctgacccacacagccccagaatcgcgcctgccgggtacgggcccagctggagggtaatgtcattcctgagcaggagccgttgtcactaagcacaactggggttggggacggccctcaggggaggccaccctccaatacctgcctcagccctgaagtagttgtccctgctctttaaggacgtgcaccatggaaacgggacccagcaggctttctacagcgaccccagcgtcctgtacatgtccctccaccgctacgacgatgggaacttcttcccaggcagcggggctcctgatgaggtaggtggggtatataagggcctctggggggaaagggggactgcggggagccgctgtgggggcacggggcagacggtccacagctgcccggcagcagtgagtgcggccttcgtgctcacttaagcccagacagtaacttcagtcagacgtcagcctgcatcgtatcgcgtgtgcacaggtggcctgtgttttgtctgaagtacaaatgagaggctggatattgtttctggttcccatccaggcagacagaggtgtttgtgaaggaggaggtgtgtggtgcccgttttcctccgggcagggcccaggccactgtcttccacaggacaccctccggcaaggggctctgtccactgtcctttgcccggcgcggggctgcatggcggccccaggaacggcaggcccagcggctccttgacaacgccccaggtccccgttcagagcctgcccactctgaacagaggctccaacagcagggctttcatccaggaagacgctccgtctgcctctggatatta

SEQ ID NO: 99464 - DNA, 1246 bp, Homo sapiens
ctaaaattaaaggtaatttatgtattggaatataggaaggtcagcaggaagcaactgagatgaacggctgccatgtctcctggggcgtggcggcagctcctgagaggaagggttccaggtgaagatgagggaaatgttggtaacatgtgaaatagggttccctaccagaggagcgtgggggacctccaagcaggagagtgtgtgtgtgtgtgtgtgtgtgtgtgtgtgtctgtctgtctcagtatggaactgtggatgtgtgtgataggtatatgcttatgtgtatatgtgtgtgtgtgcttgtatgtgtctgtggtttgtgtgtgtgtgagtgtttctgtatggggtgttcatgtgtatctgtgcatgtgtgtctacgtggggggggtgggtatgggcgtatctgtggggcatatatgtgtgtagggcgtttgcatggtgtgtgtgtctctatctgtggggtgtggggtgtgtgtggggtgtgtgtctgtgtggagtgtgtgtggggtgtgtgtctgtggtgtatgggcgtatctgtggggcatgtatgtgtgtagggcgtgttgcatggtgtgtgtgtctgtgtgggagggtgtgtctctgtggtgtgtgtgtctgtgtggggtgtacgtgtgtctctgtctgtggtgtgtgtgtctgtggggggtgtgtgtgtgtctctgtctgtggtgtgtgtgtctgtgtggggtgtgtgcatgtccgtgtcggttagccgaccctatggcattggctaagattccccagtggcttgtttgggagctgtgtgtgtgtgtgtgtgtgtgtgcgcgcgcacgcgtgtgagtgtgtctgcatgtggggtgtgtacgtgtctgtctgttaaccgattctccggcatcactgagggttccctgcgacgtattcaggagctctgcactcacagagacctcttaggtctgcgtggaccccgagtggctctctggcgggccgtggagaaactggccaccgcccacctgcgcttcgtctccagcgtcagttctctcccgcaggggcttttgctacttcaactccgtggccgtggcagccaagcttctgcagcagaggttgagcgtgagcaagatcctcatcgtggactgggtaagcagagccgccttggccagcgcagctcaggttgctcctttgccgtccccgagcggacagcagcgtgtggacagaggagctgggctcttggatgtgggaagcttaggtttctggaaacggtctcaaa

SEQ ID NO: 99465 - DNA, 1040 bp, Homo sapiens
gatggaagtatactgaagcaattgagggaaaggaggatgcctcagaacaggtcaggacacatgcatctttcttctggtaaattctcttgtattttcctgtttaaactttttggcatgtcttaaaaagattgaaggctgaacgtgggctgcagctgccctggctctggtaggccctggggtttcagaagcagagcccacggaacctgagctgctctgcccagccagggctggtgatgacggtggcctgggagggtgacctcactgtggggtgttgtttccacaggtggacagtgacaccatatggaacgaggtgcactcggcgggggcagcccgcctggctgtgggctgcgtggtagagctggtcttcaaggtggccacaggggagctgaaggtcagtcggggcctggacagtggtggccctccaggaggcctgccatagattcccagtgtggggaggggccgcccactccgtctccctctcatcaggctgggaggcggctgtgatggggaggcgtggaccccactctgtcagcacagcctcgctattgaatcaaagagacattgcccacatttgtgatagggtatgtgcatagtacagagattctcaatgatttgggtcttaagaaccctttatactcttaaaaatttatactcttaaaaaaaaaaaaaaagctccaaagagcttctgtttacatgagttatatccacaatattgactctattagagattacaactgagaaattttcaaaatgtttattaatttaaaaatagcgaccgggcacagtggctcacacctgtaatcccagcactttgggaggccaaggcagggggatcacctgaggtcaggagttcaagagcagcttggctaacttggcgaaactccttctctactgaaatacaaaaattagctgggcatggtggcgcatgcctataatcccagctacttgggaggctgaggctggcgaatcgcttgaacctgggaggtggaggttgcggcgagccgagtcacgccattgcactccagcctgggtgacagagt

SEQ ID NO: 99466 - DNA, 1169 bp, Homo sapiens
tcgctcgcctccgtgttcgtccggctcccttgcggtggtgttggggtaagtgttcctttaatgtgtaaataatgtcctgtttcttctcgagtcccagtggtcacagaaatcgcagccttgcttccctcaaagtgaataattgctgccaggtgttttccatacgcaggggctgcccatgtgcggcttcaaaggccgtgtgagccgagagcgttttgatcgccgactcgggcacctttctctggggaaggttgtctggcgcaggtggctggggctctggggtgcagtggctctcgctttaagaaacaggatcctgtatgcagccagcatctcatccccttcgaagtctgtggcagtaatctgctcacatcaggccacgagtatggtgcgggtaggatgcgtgcttctgtattctgtacctagtttccacccgaagctacaggtggggctcccagtgcagtgaccgtgatactcatgggccacgtggagtctgtagggctactcgctgggctgtgctggcttctgtgagctgatgatatggacctggcctgggcatatgaatcactggtctgtgccagcttctacgaactgatgatatggacctggcctgggcatatgaatcactgggctgtgctggcttctacgagctgatgatatggacctggcctgggcgcataagttcacaaggactttccagtctgggcatctgcccatccgtccacacaggaagggtcaggtcttgcaatcaaacttctcaataacaaaagagttctcccctggcccctgacctccttgatgcagcctgggcaggggtggcaatagcgagggcggccatgagaagctgaggcggagcgtccgagcagatccgggccatcatggtcctgcagtgccgcgaatcaccacagacggttacaggcagggaggacgggagccggtggacagcaggagccgctgcagccgaaacggtgcagtgtgtgtgtaatcactgatcgcagggtgaagctcaaggtctggattctgttatggaaatgaaacaaaattgttttcttcctgagtttttataaaaatcactgctttgaaaattatcccgtcagaaagagaataaacggcatttattcataccaccaccaagccctcctagagttattttattttgtattgtaaataggctg

SEQ ID NO: 99467 - DNA, 1058 bp, Homo sapiens
gccagtccgaggaaccacagctctgtaggatttgattctatcctccagcagcagagctgctgcctcggctgcaggagccactggctcgttccctcccttctctctggactccatgccggccgtgccgttgagcacctccccagcttcctgactgccagctgtgtggccagacgctgcatctccacccccagcagcaccttggaagccaggagcaggacgccctgcagtaaactgttccccttaattctcagctacagttcttaaatgcttgccactgaatgaatcagtgtggggccttgtacctggagcacctagacccaagcctgccacacacgggatcagtgctcagtggtctccagaggcttctgggtcaggagcccttctccaccgagcttcccccagtggctggcattgggtgctatttctccttcttgttcagaggggggcctgtctctaatttctgggccttcttaattagcaccccgggcactaaacactacaaagcccagcagaactaacgcttggcaaagacagagagagaaagccccgggcctctctggcacacacacggtgcttcatggtgaacactcgtccacaggtcctgtccgacaggcccagggtgggggcctcttcctgtggtcgggccttgtaagttgatgaagatctgaaattcagtgtgctattattaggctgataagaaatgggaaactatttacattaataatttttagggctagtttctcatagatcagcctttactttgagaaaaagaggcttgttatattccaagcatgagatgattattagaaacacttattttctgttctctctggagagtaataggcagaaccccttatcagggaaacgtcgtagtacacggagcaatttgccgaggtaaacataaggcggggcacctccagcccgcgtcggggaggattgcttattaaccacttaaccgcgtggggcccacggcaatcccagctgaatttggtcagcagcagactgggggcctgtgggtgctggctcctgctccagctcctgctgcagctcctcccact

SEQ ID NO: 99468 - DNA, 1054 bp, Homo sapiens
ccggtcgctgcctttagatccctagtgcttcccaaggcgggcctcgcgccggaggtttgggttccagatgcagatgagttggggaccacggtgggctgaaaggtgtagattcgcaaatggctctgtccacacaggcagagctgttcacagaaaccgacccacgcccagtaccttcaccctgtggtcagatgaaaggtgaagccggcgcagatgttgggatgggctctgctgagcctccccaggtcggggtggggatagcagcctcacgctctggaggcctcactgactgacacagctggggcgatgcatgggcgagcaagaaagtgtgcaacgtggacaccatcctcacatccctgggcccagcctcacatccctgtcagtctttctctgattttagagcaacacagctatgaagataggggtgtattatctagaagagcattagttacgagacatcgccattaagtgacttcacacctcagcagcctcctgccacgcccagtaaatcagcttgtcagtcctgtttccatctcctggtaaacagtggtggcctgattctgtgaagacagtgccagcgcttgcataatgctgtggccacagaaatttatccaaagcaccagattcgttttattcattatttgggactgatgaatgggatttagaatcccctgcttcgtgagctccctgcgctctcccctgcagcaacacagcagtgttgagcaaatatttactcaccagagtgcgtatttttaaaaaaccaccaacaggataaccttgagccagtggtgtctgcctggctgtaatgacatctcctttttgtgcagcttctgaaccgaatctgaaattacggtccaggctaaagcagaaagtggccgaaagacggagcagccccctgttacgcaggaaagacgggccagtggtcactgctctaaaaaagcgtccgttggatgtcacaggtatgtcggctgagcaggtacacccgccccgctgccctctctgccaggccttcctgccataggcgatttctctcaggagcttctgaaaacccacgtgt

SEQ ID NO: 99469 - DNA, 1035 bp, Homo sapiens
tggctgttggcttcccatgctgccttgtgtttctctggggatgattggaagcaaagtctccaacaccttctactgtgcttctaaccttgtgatagcaccaccctccaactccctgctttcttgagaacggaagagagaattctgttttcacactccgggaaatgttatttagaatacatagtgctccagaagaacttaattaagatttgattgcattatcagttttttaaaaagtcatcactaccacattaataataataacataaagatttccgagaaaacgtttaaaccacttaagagaatagtgtgtagttacacaccctgtatcacccttgacatctactttcaaacacatgacatcgctcattctaagtaagttatatctgtgcttttctgcagtaattggtaatatgaaacacgtcattaaattttagttatgaagttccttgaatgaactgaaatagtctttaataattgtgatgtagacttaaataattatatgattttgattttacattaacttatcctgacccggcacacagtttgcccatttctgcatctctaaagggcaattgtatgacctgtgaacatgtgaaaagctttgtcactgtcttgtgaattttgtcgtcaccccatgcattttttgcatgtcctttgctggctctgctgacaggtaacgcctgtaccagctcaaacgtctgacctccctggtgaaagcaatgcagtgactcctattcggagcttgggcatattctgggcattcacatcgcctgcacctgtgggcaggaccaggtgcctgagtttctacccagctccttcacccgccaccttgggacctggggaagctcttgaacctctctgtgcctcagtttcgtcatctgtgaaatgtacctttaaattgcttctctcctggagctatcatgagatgtgaattaattaatatttgcaaagtccttcgagtaggaccagatcgaggtgttttctgctcttgtttctctacgctgttagggtgtttttgatttttttctccatcca

SEQ ID NO: 99470 - DNA, 1089 bp, Homo sapiens
tctctggcaaagtttatttaacatggatattactttttccataaatatcttgtgaaacttactgctaaagccatcttaaccctaagatttcatttgtgcaaaggtttttgattacttattcaatttttaaaatagttcctgggacatttttcccccccggctcactttagctaagttgtatttttttaaaagaaatatatgcctttgttatacatttttgtatttttgacttagtggtttttggtgtcatgtccttttctggtgttttttatgtctgtcagacctttaatgatgtcctcttttacactccagatattggttgtttgtgctttttctctttattgctgctgttttgttttgcttttgtttttcttggtcactctctccagaagtttatcagttattcttttcaaagactagcttttgactttatggatgttgtttgttgaatatcgatttcattaatttctagtatttttatttctctatgttctgttttcttagggtgtattgtggtttttgtagctttttgatatagatacatagagcattgatttcagctctgtcttctaacatatgcttatatagctatacattttcctctaaatgcaactttatctgcatcccacaagttttgatacgtagtttgacaatctttgtctttcaattagtttggcccatttacatttaatgtaattattgatatatttatgcttaaatctatcattgtacaatatgaattataattatctcaactattctaatgcacttgtcttgcctttagtgtatgtttttagtgatatatatatatatatatatatatattttttttcaccagcttggtaatcactattttgctgtttctttactgattatcagtaggatttcaacaactgtctttaatctatcacagccttatctaaattaatacttttgccaattctggcaaagtaagggtctgggatactttaactcttaatttatatactattttgacctgtatttaactctaaacttatctttaacatcacaagacattgttgttattattttatatagtcaagatttactcataaatttatcctttcc

SEQ ID NO: 99471 - DNA, 1209 bp, Homo sapiens
ctgatctgctctctctgctgctgtaaatccttgctgtgtgtgaccacaggtgtgactgggcagacctgcctagagcccgaggtcccactgccctggactccaagcgattcctgtggggctctgccatccaggccacttccgctgccatgggacagtggacggggaggctggctgtgggctgcaggctgcaatgacccagcccaggtgggccgggaaagaccagcgctgtggtctccgtcctggaggctggggcagcctcagtccagagctatctgctggggtcactgcaatggggcaggcggtttctgcctggggactcttcctcggggtgggccatggggggcagcggcccagcacacccttccatccacatggggcactcatgaggggcaatcatgttcattttgcttgttcactgccagcgccagtttgaggttgccgaatgccatttggttggccaatgcctgtctctgtcccttgtctgggctgggggctttacttacagaatggaagaatgaggagttttaccttacaaaattacacagttgatgttacgtttaacatcgtggacacaatgtgattcaaatttcacacaggtcacagacatgcggggtgactggcatgtctcatcttgagtaggaagaggctgtgagcaagctgaaatcctttcttccctatttacaagtggttctgggtggtcgtggaaaccggctgagtcctcagcagtgggaagcgaggtccaggaacgggattgatgccctggtgaggccattcctcatcccctgcaccgcctgtgaccatgaaagggcttgggccaggctgtttttgcaggctggatcttcccagaagcctaggggttggaaaggtgtgtgtgctgggtgcccgggggctgagctggacctccaggctctcgcaggagagggtgtggtggccacctggaagctggctgtgcaggggcagcaagggtgtgaagcttgccagtcggctcgggcctctcatgtgaagaaggacccagcaagatgcaggagatgttcccggacacacaccgcctgcccccgtcaccttgccaacgccgctgaaggttggcgcccacagagaagggcagcgcccttgcacgctcacagttacctggagcacacatgctcaatcccacgcgctcactcacattcagaacgcacacttgggtgcacaagcacgttgatgtgcagg

SEQ ID NO: 99472 - DNA, 1045 bp, Homo sapiens
ctgtgtgcctgtgaggcgggcaggagcgtcacccaagcttcagaagagaattccccggcagcagcgtggcgctcagcatgttccgtgtctgactgttttgattgtctctcagtccagttgacaaattccttttaagatgaaatttgaattaatttgcagaacttgtacaaatctccaagaaaacagcttaaggaacagattaaagaatgaatgccttaggaattaaagcattaatagctcttgagtagactggatggaaagatgagttgtgtaggttatccagatgaggctacatccagggagcaattcttaccttcagagggcgctgcctgtcctccttggcatccaagtgagcgcatctcctccacgctcaatgatgaatgctggccggcatccctgtgaggaaccttgtgatcattttccatttctgaaaactcccaggtggtgggggcccttggcccacatcagcattgaccaccccgggctcagatctggccaggtgcctgcgttgtgatgggaatttcagtacactgaattttgcctctgaccctgatgaaatagcttcggtggcatttgcatcaagatcatgttagtgtcatctctattagatgctttggagcaaacatgaacttgggtttccttttaagatgtcctgtgattccagattcaggggaatctgagaaaagtttgaagaaagaaaattccactcggccagccaaccttgggtgtgcagagcctgccccgccttccccactttgtcctgagaagctgggtcctccccagcaccagagttgctgctgcttcccctcgcgctcttggctgctctcccggccccaagcctgagtgacactctaggattgcagatggcaggctggtctctgggctcccccgtccccatgaccctccacctgcacccagacctctgggtccttgctcaggcagcccctgccctcggtgagacgcagcccactgtgggcccttcccctgggcctgccatcagctcctgtgctcctcggcgccccagcggctgccctgggcccgttcc

SEQ ID NO: 99473 - DNA, 1045 bp, Homo sapiens
aagcggaggatgcactggtgctggtttcattactgttcttttactaaacatacttgttcttcagcatggatggcacactgcacaataaataaagggtgaaggacattgtagctaagtcatgcatttctgatgtgctgtctccctcctcttctgtcccatcctctctcttccccccacccccacatagaggcaaaatatcagtgtaagaggaaatcatggttacatagttgaaatatctattatttttcccttgatttgaatgagtcattctttacttgaagagaccctaaacattgactgtgttacctaaagaatagtgcctctttttcttccatatctgtatgatggcatgaaatcgcgtcctgagaagaggacctaagcatgtcgtggaaaatcagtatgcttctttatgaacatttattttaaaagagcgagagagagagactaacaggtttttctgtttgtgattgagaattcattcacagcacactgaccgtctcccattggactctgaatgcggcctttgtgctctcactgacgtcaggagtctgattgtcttaatatgtttctcaaggcacaacctataaaagccgttttctgctgtaccgtagaatattcatgagaatacagacttttttgttttgatgctgcattctttaaggagagaaggttttattgttttcttcagggtgctttgggtcaaaagcactagcagcttctgttgggaactcgtggcattttgaatggtttttgatacagaaatagcacaagtcacgtctgacacagccgtaggcgcacgaatgcgtgaatgcgattgtggttctcatctctgcagctggtgtgtggggccgggcctgggacagcttgggcctcatccccacccacccggctcccaggatcctcattaggaagccctcaggagccctggggtgggtctccttgccctgtgaacgctccatttgtgttattgaatccaacataaatgcagcattgtcttcagaggtgagcaatggccgtggccggaggtgcgcatgggatgcaggcg

SEQ ID NO: 99474 - DNA, 1025 bp, Homo sapiens
ttgtggaacagaagcacacagatggtcttgctccctccagatacagccctggctggtacggccagcacccagggactctgcacacggaattccacgagaataacatcacgggctgccgtaaaagccagggaagcgaagggaggcgtttctgatctgtttctggccttgcgctggcacagggtgtcatcccttgggtgggaagggtctttggagccccttatggcagcaagtttacagccgcatttggatttaatgctggcaaggaaggactttattttctgttcgaatcaaatttggaatacgtttttgagtaaagcttgctgcgttgttgatacagcttattactcagaagaaaaaaagccttttaagtgacctgttaaggaaagttttatttcctcaaagttcgtgatagcttcaatagtttcggcttgtcatttaataggaccttttgaaagaaatattcaccagaaaagaatcacttcaagttgtgtgtgcattataaaaatggctctcgtccacgatgactggctgaaaaatgagatttttgagtttgtcatacatttaggggacccttaagaatgtggacagatgtggaagtagctgttcttcagttgaaggctgtgtgtgtgtgtgtgtgtgtgtgtgtgtgtgtgtgtgtgtgtcccactctcagcgcactttgaggcgcaactcgaggtgacacagttgagtccaggccttgcggtgagtgctgaggacacagagatgggcatgggccgtccttcccagctggccactcttaacccctggggaggggcacagggtctccgaagctcctgccacactcctgtcttttttgttttgctttgcaattcagtagtccctgtggggtaaccagatgctcttagctttgttggttggagctgtgatttttttttccagagggtttcccagaatgctcccatctcctcccctgatgtggtgtcaggtggcaccatggtgtcccccgctcctgtgcacagaccttggctttcctcagcggttta

SEQ ID NO: 99475 - DNA, 1028 bp, Homo sapiens
gtgagccgagatcacgccactgcacttcagcctgggtgacagagcgagactccatctcaaaaaaaaaaaaaagtgcaagaggagtaagtctttcaacccaaggggcgtgttggctgaagcaccttggagcagacttttgctgggtgaagccaccggcctgtcacttgggtagctgctggcagggtcagcctgactcgcacagaacatcaccgagtgttatgggcgctgggggagccccagcctcactctctccccatctcactggccactgaccacagattggtcacttccgaaatgctgccttaaacttggcatcaaaggatcctttttctgcacagagaatgagcggtgctttcaggtctggtttggtgagaggaggagagggtgtggtccactgtggtcagcgccctccgttctccacctcgctccagggagggatctctgctttgatgctcccagccgcgcagttaatgtgcctgcctagactttccgcaaatggccactttgagtttattgttctaaattagtgactcatttttcgtgagctacttattaacatgcacctattttccagcttcctgccacctaaccacaagcacctttagcgagtttgtgatgttcagcagtgtggaaaatattctgggagaatggttcgtctgtatagtggttttcgttgctgagtcacgtttggtgagcagcttgttcggctcagatgccctggcgtggagggcacgggccccggctgcggcactgaagcaaaggtgaagcgggaggagcaaagggagtctctcgccccgcacgtactgtgtgcctcgttctttatctgtgttcgtttattcactcctcatgtcagcctcgtctccactcgacaggggggatattccaccccaaaccctgcaggactgcctcccacacgggttctacgtccaggtggagggtagatgcgggtaggaattgtataatatttgttagaattctcgggagtgaaaaggtgttagtttagaaagtaggatgcctgcggggaaaca

SEQ ID NO: 99476 - DNA, 1126 bp, Homo sapiens
taaagattcttagatggctgggggtggggctctgcaaataccaacaggggaaaatcagccccaaatgccatcttcaccccccagcctttgtctggtcctgtaattcttcactgtttttttttaacttagtagtgtcatcaagaagatgtgtttatatttgtccagcttttgtgatttttctctctgctaaggctggaccacatggcctatttcaccttttttctttttttttttgcacttgtgttttttgaagcagtcatgtttattaaatatcgatattcagagtttttttggtcaaaaacaaaattcttctataagatgattagcagtatatatggaaaatcaggcaatttgaaatgaaattaataactaagataattattaaagggtttataggaatgcttattctgttatttacccagagttatttgtctacatggatattttagagttttaacagcaagtttatgtgagaataggtgtttctgttgagggacatctgaaaatacccaggttcttctgtcttcttaggctatcccacgtggattcttggtctagtggatccgattagcagtatacctgcattctaacaaatggaatggtaaaattagtattattagcatgttaaggtcaaactgtttccaggtactcttgcttgggtagagatttggaagttgactatatttgaaatctgaagggtgacaagtcagtgtttctccacattatctgtttccccataggtagcttgatttattcatccagtcatctgcccatccagtcccttctgctgctgaactagtcattgcttcagggtcatggacacaaaaacagacaagggtatgcccctcttaggggcagacacagaacagtatcagtggagcgatctgaggaagccagtgttggcagggagccttctagatggccaacaccttctatgaaagaggaggatgctgctggggtgaagtcctggccttctgggaggggctggaacccgcctcggcgctgggtcagtgctctggatggcagcctggccccgaccagcctgtcctttcccccatgtgttgttctgaatctctttcccctgcgacagaattcacagaaaaagcaaacctaattttttccttag

SEQ ID NO: 99477 - DNA, 1034 bp, Homo sapiens
catcccccactctccagcccctgtcaggctctgcacccctgtccacttcagcccgcattgggcctgccctgctctgcagggggaggggcaggagagtccatcttcagggttctctgaagctggacagttctgagaggcagcttccagctcatggaaaaaagaaagcccattgccacacctccagcagcatatgggggccttcaggtccccggaacaccgagtaggaaggaaggggcaggaccctccgacggggcagcagtgggccaggtgtcccccctgcacagtgtttacaccctgggacctgccgcaaggcatggctttcagaagagcctccccccaagaaatgctgcagacaggacggggcttctagagaccttggcttctacccaggaaggctgatctattcttcgactgttgcatcagcttcctcaacctctgcaggttcaggctgcgagccctagggagcatcactcaaagcaccctgttggccacttaggatcaggagggcctcggctcacccaagccatctccctctggtcgcatgtggttggctgtcctgtcagagccgtgggcagccacacttctttttccaagataaaccgctgcatctgcccagcgaccttcatgtgtagtcttacattagcacattcttaacagacatttagaaaccaaccaaacaaaatccagtttcctgcccccacggtctttcgctcttttgccacactcacaaatgtgagctgcatttggaaatgcctgtgcttccatttgcaaaccgaagctgaatggaacctggcaggcgcatctgctcctccgcagtggaggctggggcggcccgagcagaaagaggtgaagcctgtgcctgctgggagtccccgagcggcaggaactccggtgtctgggatggcctttggggtgtgaccttaggctgaggccagagcccgtctccccacgagctccccgcctggcctgggaaagtcagccccctcctttccagggctgtgtcttcccccttttgttttcagtcattgagcccc

SEQ ID NO: 99478 - DNA, 1046 bp, Homo sapiens
attgggggtgagtgcagatggttggctgcgagaggttccgatgctgggtttgacagtcagggtggtcttgtatctttttgatcctggccatccttgtggatagaaagtgacatcttattgtgattttgatttacattttcctgaggttaacaactagtgatgacagtcatcttttcacatgctcatgggccattgtgcatctttggagaaatgtctgtttaaatcctttgctcattttaaaattagattatttgcctttttattgtttgagttgtctggccctttatattctagatacagctccttgatcagatatatggtttgcaaatattcttttccattctgtaggttgcctttctggatggtgtcttttgaagctcagaagatttttattttgctggtatcctgtttggctatttttttcttttgctgcctgtgttttggtgtcctatcagagacatttattgaactcggattggattggaacgatgatgtgggccccctcttggggctcctggcttttggcttctgttgaatgtaaatgctaaaaggcttctctgggctgttaggagagaggcagattttattgcccagccagcttctgcagtgtctaatggctagattcgcttttcccacagttgtttttaattgaatgtccgtgggaaagtggccaagtaaatggaaggtttcacagagagagctgggtttctttgttgattttttttgaaactgtgcttttttgtcattactgtgcagagtttgttggaatctggcgccaggttgtgatgtctgctgagacttgtattggtcttgttgagtatggcagcattgtagtggcttttcccccactcgaaacacaagttccaggaaatttcgaagctctgtgtaacttccaggtggacatcttccctgttgagaggttaattatgggacgtggagccatcagggactctgaatgtgggacacacatcctgaggagagaggccacgtcttggaaggatgaagggcaacctgtcttcggggtccagaactggactctcactcag

SEQ ID NO: 99479 - DNA, 1005 bp, Homo sapiens
ttttgcatggcatttattgcttaaatcattcattgagggttttcttttttttaaaatgcatcaattacacttattatttttgaaagtctactttgttcttttcctaaaatgattaattttgacaattctgttgcttcctctgattcattacttaaaatttttcaagtattttcataaactttttatttaatcaaaacatacatggggaaaatgatagtgaataaagcattaagagattctttgaaagtttcagaaacagtaatcgtaccatttctcatgatatgagtaactgaagaacttgactgtcttttgatgtgtttgctgccttttttcacttctttctgtgttggcttgtgtttgcttgggagcgtatgtctcgctggtcttactgtttggaaatagagggatgggagtgaggaggccgttcttctgataggcatgccacgtgcatttcctgggagctgccctggactccagcccctgcatcctgaacgctgcagctctgggctcacctcggtcctgacccccatgcagtcctccacccgctgccctcaactctcctgtcagctcgagttgcttttgtttcccttaattatatatttctggcttgttggagggtttccttactgctggtgagcccagcagtgtgacagaaggtatgtcttatgcagaacctggggtttccacagcacaagagcctgtaagatgacttgtctgccacgtccccagaagaggaagtttctagtacttcaaaagcccaacctttggccagctttctctcagccccttttacccagcttcgttttctccccaccagctgggatgacaggtcccgcggcggagacacttgctggcagccggcactgctcctctgcctccccgcacactagcgaagccccagcctcggtggaaccccttgctgtaaggcttctccttccttacccaggaagtgcaggatgccagggaagagcaccggctcagcattctggccacgctgcacagccg

SEQ ID NO: 99480 - DNA, 2095 bp, Homo sapiens
cacgggagcgtgtgtggtgtgtgtgtgagtgcgtgcgcgtgtgtgcgtacgtgagtgcgtatgtgagtgtgtgcgtgcgtgtgtgtgcatgcgcgtgcgaactgaatgcatgcgtgcgcgcatgtgtggttgtgtgtgcgtacatgtgtgtacgtgactgcttgtgcgcacgtgcctgtgtgtgtgtgtgtgtgtgcctactcccatttcaggagcttgccctgcctgtttgatttttctaaagattgacactctaaatcccctttctctccaaaactctcttggggtgatatggaagactcctagggtctccagttttaccatattctccctagtccacacagaaggtgtccttcagccacataaaatgggccactcattggtgctggacatcctcacgccattggtgctggtgtccccatgtcgctggtgcttcatgtcacgtgccgttggttctgggtgtccccacagcctggccttagggtgctctgtttctttatagttaaggaattagctcagctgacagggaactaggtaagagtaaagtctgataacatggaaaatgttagtgcacatttgaaaaaaaataaatttagtaaaaatgttgatatattttaagtttgaatgacaagacttgagtgaatttttcctggttaatgttgtgtcttttgattaagccatttcaatggagtgtacatttatattaactcttgatgccttttttatttgccgtaattggattagaaaataagatcttttctgtagttgatagaactttgttaattttattctctcatttgttttccttaactcaaaaatggtgagtaaagatcacgatgctgttttaaaatttaggaagtggtgaaccatcaagaggataaggttaggtgtaatttgaaggatgattatgaagtgagggtttatgcagatttgtgcaccagtgtgtacagtagggaaacggagggttataaccaggggcattctcagagtttgggcaggatcaggcagcgggcagagctctggtgccccatcaggcggggactttggggggtgctctctgctctccgtgggctcccacatcagatgagccaggtggctgggaggggccctgcgtgcccaacacagtggctgaggggctgctgctcctgccctgtgatgtgtgctctctccccagcctggatttccagaagaaaagacctctgctcctcctgtctttttattctttattggcctggtgctgggcacttagttggagttcagtaaaggtttagtgagtgaagaaggaaaaaatgttacttagaagtgttttactcgacttccttgatctggaaacacacacacatattgtaacataagaaaagttatatgcaaaaacagttcttaaatgacacctcgactaagacaaaacacagaccttttcttttgtggttagtgctttttcgtatttcatttaaaaacaaaacaaccaccaaaaaaccttccctacctcaaggccataaagataaccttgtatattttctcttaaggcctttgacgttttgtctttcatacttaagcctttggtttttgtgtggggtgcagggtggggatcagtttcattttcttttctcattttgagaaccataatgtttgacactttacaccctttctctgggatagctgtgcggccagctcatcctccaagttcaatctgttttggaccctccctgtgctcagctgctccagagcctgtcctggggccagcagggcactgtctccttgacaggcgctgcagccgcactcccctgtctcagccccctccctgcaattgtcccagctcctcctaagctgtgacttgtctagagacaagttcctttaaaaagcctagcctgaaacttgattggaattgcattgactctatggatgaatttgaaggcagggttggcatcctgacagtatatttgtgtgtgtggcttctctttccctccatcaggtcttctttactgtcttttttcaatagatttttataattttctctataaaggtcttgtacgtgtcaagttagatttattctttattctttggtagattgtagttgttttgtttttctgttgca

SEQ ID NO: 99481 - DNA, 1011 bp, Homo sapiens
taaagtcctcctgttacttttagagttctagggccctaacaggtgcttagcaaatacttgttaaatgttttcccactagaaaggttttgtaaggaggaaggaggctggcgttctcgccgtcaggtttttatgccatccgctgagtgcaggtattttgggagcacgtaaactgtatgtccaggtgatacaggttagcctcccagtatagggtgcagtggacccaaaacaggaaaaccacgtggccaggcacagcagctagaagcgcatcagctggagagagcccagagatgccctgtgcgtagccactgcaggaagcctggaggtgccctgtgcgttggtctggggatccctgtgtccataagcaggtgggcctcgggctcctgctctcagcttctgcctggctcttgaccccttaactacctcatggtagcaagaatgtgacctttctcccacgctcctttgctgctctccgcccttgttaatgttccgcccctgctggggtagattgtatccccctttgattgtggagggtagggcccttctcaaatagggttttctgggaccctgcggttttgcaaggtgtttgcagttattcaccataaaaaccgagggcaggggacaggccctggtcaaacccctttgggggaagctcagagaaattcagaaggcaactgctacattcaagctctgggaagctcccgagtagagaagccagctgggatctgtcgagaagagacttgtccagtttattatttcagggaatttgtatcccatggacacaaattcctcacgggatgccctttgggaaacgccttgtgaggactgacccagctggagcaggtacctgggaaggaaagtcatttccaagggattctgggctacctgggagctggccgctggcctcacacctgaacctgaaggccaggtgggtggtctcatttcatgtctatagggacattcagctgttatttttttaagtaaaactgtatctaatggagcttgctatttatt

SEQ ID NO: 99482 - DNA, 3573 bp, Homo sapiens
ctctgatgggacccctcttccttctctgtctcccctgtctcccgagccccaggactgccggtctcccatctgcttagtccccagctgcgtccctgcaggctctccgctctgttgctggtttggttcgtctggtgtgtgcctcccctgtgacatgccgggagcagagcggaacagctgtgccagtccctgggccccagctggactgtgctgggtccagggtctatgagagctgctgggaggccaccagtgcaggtgggcaggaccttgctccgtgattctacccatgacgcttctcactcaaggaattggcttttgtttcagtgcatcctattgaaaatcacttagccagtaagcaaatgttggcccttagtctgttaaacattaatacaaataagcacgtgtcgctgccctcccgttgtacagttgtacagctgtaataaacaccactcgccctgcctcgtgtgcatgtctcttctggtttcggcaccccagtgccgtggttgtgcgaggggatcagaatatctgcttgagattagcccatgtcagcattttattgggattgttaggcacctccgtcctgatcattgcaccacgctctgtccctgtacttaaatatctctacttggcatttgaaacaaaacaaataaacctattgtacaggatggaccaatcatgaggcattttcactctgatgttggcagtggatgtgttgacattgagaggatattcatggtggcaggctgcccccagttccaggttttggatatttggaataaggtaggctatgacaggccgggtgcaatagcttatgcctgtaatcccagcactttgggaggccaaggcaggcggatcacgaggtcaggagatcgagaccatcctggctaacatgaaaccccgtctctactaaaaatacaaaaaattagctgggcgtggtggcgggcacctgtagtcccagctactcgggaggctgaggcaggagaatggcatgaacccgggaggcggagcttgcagtgagccgagatggcgccaccgcactccagcctgggcgacagagtgactgcatctcaaaaaaaaaaaaaaaaaaaaaaaaataggctatggccatgaagggttgcttccggattcagtacatttaggaggaaataatgttgttcatcatatgacacagttaagtctccgagagataattaaatgaaaatcattctaaaatgtttgattaaatgcctttctagcctagcccctgtaggtggagtgtcatgatttccacgttgttgggtgctggataaatgatttagccacagtctcacggctctgtaaagagtggcaggctgttcctatcactgctgatcctgtgtgtgctgtgcaccggatgtgggtggaatgaggctgcaggggcacctgcatccccagtggctatgatgactaaatgaggaggcccctgtagagtgcacagcgttcacccagtgacagtgtgattgtaatagctggggttgctgggaccctagagtatccacggtgtgcatgcacttgaacttcaggataccctgtttccctctgaggtgcaagagctctggcgattccggatccctactgtgtgtcaggttctggaagcatcttctctcatctccacgtgatgcccaggggctcccccagcttctggaagccaccgcttgtccagggcaccagcccagtctgtcgtcaagcctggatttgatcttaggtctggctgcttccggaataccgagacgggcctctgctgttccctgagcttgctgtcagcaaatgtttggtgaggagaattatttggtttggaatttcttgtttatgttttagtccattaattttttttatcctgtgaaatattttagcaaccctaaagacccatgacacacaggtatctcttcaatattgtgctaattcctgcctttttttggtgtcttctcatctcagcatcagtagtggtggccatgtagggacagaggcacttagcagccgcggcaccgggaataatgatttgacttgggggccctgtggaagaggcacatgttgccgcttgaattctaagaacactatttacctttctgttttgaaagttcactttcactttcaaggtctcaattttctcaaaagttctaaagtgataaacatagtctttctaagattttctttttgcatttgtggccttcgttgtggcacagccctgtgtcaggtggggctgagcccagagggtgctgaggggatggggctcatggtgacagcgtggtgcaatcccgaggcaagtccttggcactgtgatgggcgctaccattggggcctggcatccccaggcctcattagccagcagtgaccacaggtgatgcacaggcgttctcatgtcctgctttggattccctccgttaaggaaaccgcagcacagcaccgctccacagtagctcatagccgggcagccagggagccgcagagtctggacttgacctctgcaaccccgtctcaaccctatgctgtcacaccagtgtctgagttaaatggcaatgcaaagctctgggtcccatcttctagcggggacctttgtggcttgcccacaggttggtggcacggatcgctgctctctgggacagcatgggaccctttctggagcgaagtccacttcagagaccctgggttgctgtctgacagagctgtgggcctgcctcatcctgcggccaaggtttgggtgagcgctggctgctcgtgggaaggttgggggctcaggcacctttgtgattgccttgtcttcagtctccacttctgtcagagcttacaaagagcagcacatggggtccagaggcttctggggagccacccgtgcccctgacccaaggatgcataggccagcccttgtaggaagcagcataagacttaattcctttttttttttttttttttttacatgaaaacaaacagaaatgggagttttatttgttccctgcagccccacgaacatcttttggagccatctggagagctgatcacttctttggcggggacaatcaaatattgaatgttgagggaaattagggcaaatggctccaggactgtccacttttgacagacctggtgagtgagtttaatcattaatcattaatccacgctttctaaatatatctgccccgaagaatctcccgggcggaggtgaaagtcctggttcccatgctcccttgacctgactgaagcacagctccggggcccgacagtggacaggcaccccatttcatccctgtctggggacacatttaagcagtgctgcctcggtttgttatttagtgacttattttcaaggaaaaagatccagaaatgattagataaatgcgaagtcctaaaaaagaaaacagcgcagtttctcttaaatgccggccagcattgtgaccctgatctgctgaggccttggaaggtagttgaggctgcaggaaatgtcacggggtgacctttagaattagagtgtcagcactcagctggctgcctgcatctgaaaaaggagccattgtagccagtgaaatggggaaaaaccagaaaaccagctgggccagggcgctg

SEQ ID NO: 99483 - DNA, 1101 bp, Homo sapiens
gggacccggctgagcagcagcagcaggaggaatgagcagtgctcttggagcccggaggagggggcagggcttgtccttctggacgggcagccccaggaaaagagaagcccagagctaagggcccttgccctagggaggggtcccacatggaccccgaagacgttcctctctgcagcccttcctggcactgcgtggacacgatgtacggaatgaggaaaacgagcttctttcccttctctttcacttctccctcccatcacgcagcgtgcaattatggaagaggataaagaaggaaagagcagtcggaaaaattctgtaagaaccggagaggggagttcgggtgtttttacagctcctggggttctccgggaaacaaaggtgtgctatttccacttctgtgtcttcattcctgttctgcagggaagctcagcctggcttcatccacatgggtggagcagagtcaagttcagttgggaattttttttttttcctgctcatttggaaaaagaggaaaagacactgggatacaaagagggctttataaagaagaggcctccttggtcctccactccaggactttctgcgatggcggaaatggtccatagcagcaatgcccatcggggcagccactggtcatgcctgactgttgagcttgtcagcagccacatcaacacatggatggtgtggccgaggaactggatttcaaattaaattaaattaaatttcaatttaagtaaccacatgtggccagtagctacctacagcgcactctcaggaaggctctagactgagagtttgaggatcatcctttatcagtgatttgaatggatgaggcttcatctgtttgaatttcccagttggggtaaaaagaggggatgcttgtactggaatgggagtaggttcacagcgcacagcctgggccagcatcagtgtgttgctgaatttatgctccttcccaaggttgttgaggagactggaagagaagttctgtgttagagagagggacgccctagaggagttcacttagtcacaaggagcagaaatgccctcagtggcatggattgaaaggcacttacggatggaattcgggagaaattcatg

SEQ ID NO: 99484 - DNA, 1051 bp, Homo sapiens
acaaagaaagaggcagaagccagggctgtctgtgcctgcagggcgctgttgggctcacagatgacccagactcccccgtaatggagccgcggacccacagcgagccacttgcaccaggcttagccaagctgacaggccagcggagtaaggaatgttccctaccattgtccagaaaatgtaacgagggtgaaggtgtgccaagcagactccccgtgtcagccctgaggcgactgccatcgctttcagaaacctgactaccaacctggatgaaaaccgactgcttggtcatggccatgcagttagaaaacacagcagcaatcctcagatgagtgtggccgtatttgtgttactcaagctgctttgtcatctgcatttgaagaaacgtggtgagcctcctgtgtgtgcccatgtggcagtgggcacctctgccccctgcaaaggctgtctaagaacacagagcctgcagtacaggccctgcctcctgacatgccccaggccggctggaagaaagcgcgggactgtcctattgacgtggggaggggacggctggactctgtgatgctaactgtgttctctgctgggccatgtggctccccacagagaccctgggtgcccagtcattcgcgttctcctatgtgtgtgtatatatattatatatacatgtatttactaactttagaaagcccccaagggggccttgtttctgcttggacagtcagcgtccatagcgtgtcattcctaagctccattaaggagattcagaagcaagcagttacccctggagtctgcacgctgggcacaagggtcacaccttcgttgagagctcctgaccccaggagccgagggcaggacacggtagtgtttacaggacctggcaaaggggcactgccttgtgtgtgaggttttttcaccagtcagtcccttttaaaaacagcatatcttttgaagaacaagaagtttacgcaggcataagcaactcactttgcacgtggagctttcaggacgtttcatgtctgttacgttatagcctctatcctcatgggggctctga

SEQ ID NO: 99485 - DNA, 1035 bp, Homo sapiens
ttggctggggtggggtcctgccttcgccccttagcattcaccccctaccccttttcaccatgtaaaaccctgtgggccctgggccctggatgctctgcgcccgaggacctgggttctgccatcacctgggcagtgtggggggcatatagggggaacatggggtgcctgatgtagtgcctgtgtttgaccttgtttaggtgaagagcaccctttccagcttatgttttgtatcatgaccgggaaaggtacgaaacaagtgtgtcggggcccagatgatttgatggctctacgggccgagtatgggacacaggatagcttggccctgggtcaggtattagtcagtccttgctggcacctgggcagggacacatccgtggatggggcctggccaggtggcctctgaggtcctcgtgtccactggaaggctgtgtcctctgttgtagtcactgacttgctggacctgggtgggagctcacccacctgtggatgggccagggagctcctggaatcactagaaagatgaactttttttgccttctaaatgtatgaaaagatgggaaatgataggaaaataagtggaagtcagatctattcaggaaaatgacttcccagggaagagctggggtgcctccaaacccagaatcctcggtttctagaagcaaggctgaccgaggtgggcagcattctttgggaccttgagtgatgaagtagttacttaagcagagtgtttctcatgtgaagccaggcagtctaggacactaggaatcatttcagcgtgggggagacgcagacactgtgcttgcccagggtgctgcattcatctgaaatgccggtggctaccagctctttgtcacggttcctccgtggtctccttgaatgctgtcagattcagggcccgtgtgggcagcggcagcctcgttcccagtcgtgtttagggaatggggtcagagaagtacttgctaaagcttcctgtgtgcacgtgtaattgtgtgtgcatgtgtgttaaataaatgtatttcaactcgaaatacacgt

SEQ ID NO: 99486 - DNA, 1037 bp, Homo sapiens
aggatacttgctggcggagctctgcctgcggtggaggccctatgacttgacctccatcttctccctgggcccctcgctggccctcactggcaggggctcctgcacgcctgcaaggccagagcctcccgccaggtgcaggagaagtaaatgcaggccagagataaatcgtatttccctctaactcggatgtggagtgagaggaaggaagcaggagtggagctgagtgttagtgagaggtggctgagaaggcggggtcccgcttcttgcttccttgggcatttgctgtaggtgctgggtttcagcctggaagggtgcagcctctgcactaagtctggtttggtgaacgttcatggcccccaatataaacagtgttctgggcgttctttgtgactctcgagccgaaacactgtggtgatctctcgtatcatctgcttgttatgtaatgtgacaacatggatatgaaatagaaaccagatgtcagggtggagcggctgaattcttccccagcgaggccgccgggagagcaggacttgggtttctcctgagttacggcgccgaacgccctgagaaaaacgcctttggagcagtttccgggattaagcgaaagtctgggctgaaggtaaagcaccaagtcagtacgattaactcttttttaagaaacttgtaagggattttctgtgctgttatgtaactgctcagtgtcttccagcgagccggcggcttgttatcaagaatccgtttagaatgtttgaactcagcctctgggggagctgggagcactgtggcacctccaggggcctgcagcgtgcttccgagggcttgggtgtagaggaaggggaacccgtctttcgcctgtgacagccttgcccttgggtctgggagcaatgaggactcggaacgtgagcctcctgctacaggtacaggccctgggggagtgagggcgctggcggacagcagtcttggcacttcacgttagcagattcggagtttctgcagcggctgaacccctgcactgggctggaagggggggacacccg

SEQ ID NO: 99487 - DNA, 1108 bp, Homo sapiens
tcccttgcaggcctgtcttctggcttcccctgccaagggaactacagcccctccccacgcacactcacagggacggtgcagtggtaagaggcagtgcaggtggctgccccaggacaggccctgggctccaggctggctttcatgttctatttgccctgccttgaattcctgtctttggagtatattcctcactcttcagccaactcagccctgagtataattagacgtctctaaaagtgcgtgtgccatattgccaggcgtgaaggcttttctgaatcttcctttctgtcaccagtgctgtacgttggctttcttttgaggcgcttattttcataagaaactttctctgtgtccttaacttccagcagagagtctgggagatcggggggtcaggaggtgctaagggcctgaccagctgtgtttgcgaagtgccatggaaaactgggatgattccggtcatcacctctcgtgaggttaggaagagtccagcctgcggtatcagtgctcggtgggatggccagcccccaattggaggagcgggctcctgggcagcctggggatacttggttctaatccagatcctcacactctttggggaggaggccgtttccagcaagtgagtgtcccttgggtttctcctcaaagccccttctaaaattagtccctggctgctgcagggacatttacatcagcgcattttgttaagtacttttgttgctttccattaagagcatatttaaaaatatgaaatgaattcaggcagaagccaggctctgccgctgagaacatctgtgtgctggtgagagggagagactgggcggtggataacgggctgcagcttcctcctccgccacctcggaacgcccccggggaggcacgggacagagcccaagcctgagtgaagctccctggctgggggaacaccctgccccaggctggccaccttgactccttgctctgcaggctgcccccggcacctcgtctgcctcccgtcggcagccagtgagaggagcgtggggcctgagagcattgcctgcctgctggccggccgcccccacagtgcagagctggagcggtcttcagaggctcccggtctccctctgcagat

SEQ ID NO: 99488 - DNA, 1568 bp, Homo sapiens
cccattggtatactgtacagggtagtggtagaatcacagctcactacagcctccacctcgtgggctcaagcagttctcctgcctcagcctcccaagtagctgggactacaggcccgtgctaccatgcctaggtaatttttttatctttaatttttttgtagagatggggtcttgctgtgttgctcaggctggtctcaaactcctgggctcaagtgatcttcccaccttggccccccagagtgctgggatttacaggtgagagtcaccgggcctgccatctgagttttatcttcagagttggtttatggagtgatttctatcaaaagataagtagattatatcattttattagatttttctcaagatttcctataggaaacttatatcagtttgcatttccgccagtagtgtctgagcgagcctattcccacggggctttggagtggagtgtattacttacttgctgatttggtagatgaaggatatttcagtttgtaagggccgtttttctgtctttgcttttggcttttctgttaggcttttggtctctgttcacacagtttgtaagagttctactgatggaagagattttggcctttgtctttcatgtgtattgcaagtaactgctcacagtttgtccactgtattttgacattctttctcatgctgctttcaccctgtaaaaggtttttcctccatgtatcaaacttactgttttttttaaattgcatctggattttcagtcctggttagaaagccttccttgacttccagaagatgttttctttgagtgcttgtacggtttcgttttttacatttgcatccccaattcgtttggagtttacccttgtgtatggtgttaggtttggatttaatgttatcttttcccagacagcaacccaattgtctccagtactgtttattaaaacatccctgtttgtcccagtggttgagatgggcacctttatcctgccctggagttccgtctgtacttctgtttctggactttctcactgtcacctggtctgccgggttgatggtgtctgtcgtgctctctgaagcgtaggggctttgaggcgtgttttagcatgtggttgggcatgctgggtttcattttgaatgtttctctagcgctcgtgcatcggcattgcccgttgctctcccatcatctctcttctttctttctgggattctgattacaggtgtgtaaaccaaaagtatctgagacaggtctcactcaatttaaaaagtttgtttagccaagcttaaggacgtgcctgtgacacagcctcaagaggtgctgacaacatgtgcccaaggtggtcggggaacagcttggtttcatacatttttagggagacatgaggcgtctgtcagtatgtggaagatgaacattggtccagtccagaaacgcgggacaactcgaagtgtgaggctttcagattataggtagattttaaaatgttctgattggcagttggttgaaagagttattatcaacacaaaggaatgtctggattatgataagggtttgtggagaccaaggatttaccatgccgacgaagcct

SEQ ID NO: 99489 - DNA, 1050 bp, Homo sapiens
ctactccccgagcactgacccacaagtctcagcatcattgatggttctttgtcggagtctgttgttgtcgtggtggtggctactggtcatctagtgtcaccgttcttgctacattcaggacgggaagccctcattaacctcaggaggttcttggaaactgacttttaagtgaaatggtcatctagtgtcaccgttcttgctacattcaggacgggaagccctcattaacctcaggaggttcttggaaactgacttttaagtgaaataatacagaataaaaccaaggttatttttctcaccagtgcaccagtgttatagtcaaacgactggcattgcttgaggaccctctgtcgttggcttaaagttgcggtttccaagaacctgtggacaacgtgaaatgtggactcctgtagttaactttctcctgtaaagagctttcctttcctccttatttatgtgtttccttattgtttacttatattagtttgaactcatagattcctaatttattaactgggttataaccttttattatcaatatctattctgctgcccaaattgttccagtttggccaatgagagccccttcatgctggcgtttctggcaggtccctcccgttttgggacccttctttactctcttggatacacaaaatgtcctaatctcgcctgtacttaccctgtcctggcctggaatcagctttttctcaaggcggcctggttcctttctcggggaatgctatttagaaaccagctctcggccgccagagctgtgaatagatgtgtgtagatcggcccctgcacccacacacgccggccccacccacacacatggcagttcacttccagcccagcctcacaaaggccaccggctggccttctcctttcacatttgttactccctctgctgacaaggagacgtggagctctcagaatccatcatgtacttacttatttgttcagtctcaatcccagaatactcagagattattaacctatgcctctgtgaaaaagaaacccccaactagagtccagcagtcgctgaaggcg

SEQ ID NO: 99490 - DNA, 1792 bp, Homo sapiens
ctgggattacaggtgatttatcactttctcagcccgcttagtcattctgtttttatcccctccacacgcatttattttaaattttaattataaatctctaattaaagaattaaacaattcatagacattatctgcatcatttaaagcaatacaatagcagtgaccgtgtgctctgtgagacagagaccactacaaggacatttacatgtttgcttttcattctgctgtttccaaaaaaaagttttatcatacatgcacatgttcctaaacaatatgattttagttttatgtttttgaacttcatgtaaatagaattatactatacgttttctatttcgtgggttctttttcaggcaggactgtttttgagaaccaggtttctgcctgtagctgtcggtgactggtgttcattagtgtcttgcattcaattttgtgaattttcacaactttgattcatgttcagatgtggctgctctcaaacatgatgttgtggacattcttttgtgtgttttctgacacacgcaaacttgggtctttgccaggttcctgcctgggaatgggagtgccgggtcacgggtaagctacttttaactctgcgtgacctccagcacggccacaccgtcttagacctagtgccagtgtcttcaggctgaccagggcgccttgctcggtcccgggaggtggccctcgcctggcctgtgcctgaccgccagcctgctgtggctgtcagtgtcttctgacatgggtcacccatttttatgtttgttgttggtttcgttttcttaatcatttgcagaattgaaatatctgggtgtgtgtggcttccttccagcagctaacgggaggctgcggccgtgtgctgccttcattgtcacagcttcctatggccactgctccttaaagtttcctatatgtggatattacttgcttgctgtttcttgttgaatatcagatattctggttttttgctcttacttttcttctggaagtaatatcctttggaagtaatatcctttagaaattcctgcagaagttccgttttttgttcgtctgagagttgcctccttttccttcattgttgaatgatccctcacagaagacagtgctggggaggcagctgctcttccccagggctctgaggatgtgattggttcactcagttccactggggctgttccgttccttggcaggaatccgttgtgtctctctaggtgttttgtagtcttagtgttctacatttttgtaagcgttttcacttacccctgttgatatttttttggacttcctgaatctgaagattagtgtcttccaataataatggggaattttattccttaacttttttctttttaacttttaattttgctgtaatttcaaacttacagaaaatcagcaaaaaatagtccaaagaattactgtttattgatatgcatcctttttttttttttcagaatcgtttgaaagttagtgttagatgtgatgccttcccccaactaataatccaggccatgttgcctcagataagcgtggtcactcttcaactacggtcagtgagtagagttggaaaataacagcgagcaggcattgttctctcatctgtaggccttgtttatgtttcgctgatagtctagtgatgtctcgttatcaacagcagatgacaggccctgcagggccttcaattctcacgtcctccccagtcccctttgctccgggacagtctcctcgtcatttttatgtttcgtgacattcacattttggaagcgtaggggcagctattttgtaaaatgttttt

SEQ ID NO: 99491 - DNA, 1012 bp, Homo sapiens
ccacacaccccgcagcagcgctgggtttgtctcagtcactgcagttctttctgggcttcccgagaaggaagggccacaagagtctgtccaggtgctggggcagacattggtgacgtcgcttatcgaagccaggagtggggccccgggtgtggggccgagtgacagacccaggctacccacacccgggcaggatgaagagtctcaagagtgctttccttaggctggttcccgtccacacaccagcactcagccagtcaagacacctcttgtgagcatctgctacatgccaggctgctgtaagcactggggtctactggtgaaccacacaggaaaagcccccacccattgccacacccagtgccagtgggaaagtcaaacagtagatgggtaaataaacaactacataatggtaaatatggctggcagtgatggagtctgccctgcacaggcactttgctaagtgttttctacatatttacagctgtgatccccacaacagcctacggatgggtcctactaaccttacatcatctgtattttacagatgagaaaacagaggcattgagaaaggaagtcactggcccaaggggctgtgccaagcaactgactcttaaccagtgagcttgcgctctgaagtgtaaggctttactcccctaaacttgtcattgcaaggcagtagaataggatctggagacagggggccttcacttcagcatccgattggttgcaggctgagctttcacttcagcccctgattggttgcaggccaagtcttcattcgcatagggtgtaacttcactttggcctctgattggtcatgagccaagtcttcatttacatagggtgtaaccagtaggaaacctctaaagggtacttaacccccagaagattttgcaagtgggagtcttgagcagcttgctctggagcttgctcctgctctgtggagtgtacttccgcttaaacaaatctgtgctttcgttgcttcattctttcattgctttgtttgtgtgtt

SEQ ID NO: 99492 - DNA, 4520 bp, Homo sapiens
gaagaaatggcagccaccccaggcccctggatggtgtgtatgcggggagagcatgggaaggaagactgtccagagactgtccaggggcctctgctggatgttagcttgcagggagcagtgtgggccaggaaccaggcagggcttggccatgcccatgaatttggccagggtgtctctaggcttgctctgggtttccgagggcctgcagggcacaggcacgctttggggaggctgtcaggccctggttctgagtcccatcctgtgagccaggcagtctctctgggaaagccctgtaggcagaagggcagtcccgggccaagtctgggctggctggctgggggctagcgtctgatttcaagattgcagtttcgacttgttttctgcctatgcacataaactgtggtatgaaccaaatttaagggagtttcatgaatgaaaaaaagtccaggctgtctacgataattaactttgtgtgtaaaattgagaaaagacttccgtattgtagctgaggggcagaacagctgagtttcactcgctggacacctgggctctgcagagcaggttctgagggcaggggacctgggccccagtttctgagctgcatgggggtgcctcccaacccctggggaaggggaggaacgttcatcgggccccggcttgccttattcatgccattggctcagccgagccctgggccaccccgtgggaaaggcacaccctccctcccaggtgggtacggctaggctcccagggcaaagccaggtgccccaggaaacccagctgccagcagagccaggcgaggctgccgccttctgaccccaggctcttgtggcttccttggggctctgcttctcagattctgaaacatttgttcagcgaaggcagttggtgaatcatcctagtcagggtttttttccagaaacaggtgcaccgccagtgagtgatgtggtctcgttcagactgtgcctctcatgcctgcactcatggcctgggaaggtcgtacccctgggcctgttgtgcacttctctttagcagtatgacaggggtgacctctgtgtgcttgggggtggcatgtgaactgccccacaggctcccatcagcattcagagaggcctcaggtgcggtggatgtgggggtctcggaccagagaagcagccagctgctggctcgctgggatgcccatggccccagaagtatctagcaaatcatagagagtttaaaacatactgccatctgttgttttcttccaactccttgctttgccatttattctgtcttgaagattatttcatatcagttaataaagcaatccctgattcttttaataaataacatatttctttttaattcttgaaataacacttgggtgttgtttctgtctaccaacatgtatattaatttctttgttcatcatgcttttttattgtggtaaaatatacataacataaatttataattctaagcattttgaagcgcacagttcagtggcagtaaatattttcccattgttgggcaaccatcaccaccatccattcccagaacgttttcatcttcccgaacagaaactccatacctagtaaacaatcctgtttccctccctctggctgcggcacccaccattcaccattctgctttctcagcgaatctgactcctctagggcccttctgtgaatggacttgtatttgtccttttgtgcgtggcttctttcacttggcataatgtgtcagggttcactcgtattgtggcatggtcagaatttggttcctaaaacttttaaggatgagcagtccattgtgtgcatacatcacatcttatttattccatctcttggtggacctttgggccgtcttaactttttggccattgtgactaatgctgctgtgaacatatgtgtacacacgtctctgagtccctgctttcacatcttttgggtatataccttggagcagaattgttgaatcctatgataattttgtgcttaatttattattatttttttttcatcccactctgttgcccagcctggagtacagtggtacaatctcggcttcctgcagcctctgtcccccggggttcaagtgactctcgtgcttcagcctcccgagtagctgggactacagacacccgccaccacgcccggttaatttttgtatttttagtagagatggggttttgccatgttgaccaggctggtctcgaactcctgaccacaggtgatccacccgtctcggcctcccaaagtgctgggattacaggcgtgagccaccacgcccagccctgtgtttaagtttttagaaaccaccaaagtgttttccacaacactgcaccattttatgttcctgcccaccacgtatgagggttccaatttcttcacatccgcaccaatattttttattttccaattttgaaataatagtcatcctagtgagtgtgaatggtatcttattgtggttgtgatttgtatttgcctaataattagtgatgttgaacatcttttcatgtacctattggccgttggcatattttctttggataaatgtctcttcacgtcttttgcccatatttgaattgggttgtttgtttttttgttgttgtgttgtaggggtacttcatatgttatagatatataatctgcaaatatctccttctattctgtaggttgtcatttcactctctggatggtgtcctgtggtgcacagaagtttttcattttgatgaagtgcagttaatctgttttttgttgcttggcctttgatgtcatatctaagaagccactgccaaatccaaggtcatgaagactaaccccctgtgttttcttctatgagttttatggttttagttcttatatttagatcattggtgtattctgccttaagttttgcatatggtatgaggtaggggttcaacttcattcctttgcctgtggcaatttgatggtccagcaccatttgttgaagaggatgttgcttgcctttagctgctgtaagagagcatgtgtcttagaggaaagatcttgctcatttctgaagttgtgctttggaagtgtctgagctgcagttgttcttccttcccaggtcggtgtagactctgctcttcctaagccagggcgctgcagccatattcagtctcttgttctttggctcccgtccctgtcgctgcgtccctacagcagcacctcgcccacgcccccttctgttatggcctctccaagggatggcgagtttaacaacaactgaccagggtttccacaggagacagagaacaggctttctgcagcgtgggttcccagttgtgctgtgagctgtggtgcctcgtgagtggggctcttccgaccatcctgtcaccacttgcgtcagagtcctgcgtgctatctgcctgggggtcctgagtgtgctggctgctgcactgaagcgggtgggctgctgagcaggaagccacagcatgccacgcaggcactttggctttgcttggcccctggagagcaaacacataatggcaataggctttacagggagtaggatttatttactttatctgaaggagtttaaaaattgctattgttctcttggcttttaattttcactctcaccagcctttctgttcaggatactgtgcggtgaggacctctttctccatgttaagttcgcactggtgagttgtggcaggattggttttcttgtaggatggctcagggctgtgtttctttcagctaattgtggctacatttttgcctttgcgtgtccaatttgggtttcaaattcaggattgtccaagtactctatgtttgaaaatattttccagagaccccagatttcttatttatgtgcgttagttactttttaattttttcagctgccttctagtttcacaccttcaattgtgctaatccttcgcattttaaaagttacaccagcctttgtcagtgtttcatcagtgcataccgtagcgcatgtggtcccgttcagatgcactttctgtggcctggattctaggggaagcaatagaggatatatttcattctgaaatttgcactgtttcttttttaagttaaatatttcaacagcaatggatgttcttgtctttttttagaaaaaataaaaatgaatgtttttgtggcgcttctgcctgcttgagtggcagcgttttttccctgtgcaggcccccaggtgtgtgtgattggctgccccggggccccgtgacaggggatgctttttgagctctcaccggcatcttcctccttaaatccagattgggcggagacatgaattcagcattacctctcccatgtccacacgtgaagaagcactttccaggcgcacacacctaagtcgttggccgcgggttcttggagggcgtggcctgagctcccagacgcctcctctctcacctagcactgcacagtgccttccacacacaggctctccgaggatctgccccatttattgctttgattttgttggatgaaagcagtttattaaataaatgggaaaatactccccttccccagtttcaaaagtta

SEQ ID NO: 99493 - DNA, 1054 bp, Homo sapiens
gggctagcccaggatcggctggtggggaggtagctgcactgggggggatgtggggggttggcattgcaggaccttccatgccgcctgcctccatctggggccaggagttggccctgggctctgcctgtgggtcctgggtgtgctgctgctgcctggtggcctgggcctggaggaaggagctcagcttacactcccagcctttcaggcaggttcgcagcagccaagtggtttcttaaaaagaattcctcctcccttgattaatttctggcatgctgcttcggggagctcttgcgtcagtaaatcgtcataaacccccagttgtctggatcagacataaacaccaagcccagctccaccgctcctgactcttggccagggctggcctgccctctgagctccgggctgggctgctggagataaagagggccagcgggcgcccgagaggtcaggcgtatggctgcacccgacaaagtccttttctcagaggtgccgagcctggcagttcggatgtgtgctgtgctcgctgggggaggatgccgggcacagatgtgatttatttcctgaaatgtttggtgtttctttttcctcccccaccagctccccactctcatggataggatgttttcctcgttgggagtatttgcctccttccagtgggcattctgtaggggttaagaaagatccctgtgtgtgaggcttgcacagtgttacattcaggtctgggaaactcaggggctggacagcaagtacctcactgtccagatctcaaggacagaatgccttacagaatgcttcctgttgctcacagcaaacctcatcttaaggccttttcagcagcgtttgagatcgtcaggaggtcccggactacattcatcctgcccttgtttttgtagaacatttttcatctggggtacccgtgaagaggccagaagcctgggagctgggttccccacagtcctgggttaccggggagcacacttgggccagcgccagggctcctccagggtggctagaagaaagaacttgggcctccagtcatttcagggctgattca

SEQ ID NO: 99494 - DNA, 2135 bp, Homo sapiens
catcattatagataaaatttgctataagttctgtgtagtccatgagatgaatgcagtttacttttgttcttagtttgctgagtttttctgataagcagctgttaaaatattagatggagtcatgtgaaattgcagatatttgatctttttccatctacaaaaaatggtattttcatttggttcaacttaatgtattagactttttctgcatctgttaatagtcttatgctttttttctttattttattgtgttgaattttctgattgacttgaatgttaagtcaaccttacacttctgtaataattattataatgtgttattctttttatatactgttgaatttacattgcttatagtcagtttaatttttatcatctaaagatatgagattgacgtgttattttttcttgaaatgctttgtcacattttaatattaaagttatactaatctcttaaaatatgaagttgctttcttcttctattcctaggattgccaaaatttttctgtagagagtcagtaaagacttcatgctttgtggaccacatatggtctctattgcacgtttttttcccttttttcttttctttcttcttttttttaccaaccacttaatgtaaaatcccatcttatttttcaggttatataaaatcaagccacagattgtacttggcccatgggccatagtttgctgacacctgtttgattttcttgaagagtttatgtaggaaagatgctatttctttcttaagttgggatggatttgcttatgaacttatcttggagttttctttgtgggaagatttgtaaattacaccctcaactgatataggactgtttagatttttaagattttcttgtgtcagtttttgtgtgtttagtttttcttggaattttttacattccatctgcatcttcaaatgtattgaaataaagttgtttaaataccttctcattatctttgtaatgactgtaggatttgtagtgtcatccccttttaaattcctgatattgtttgttctctcatttttccttcattggactttgctaggagcttatttattatattaatattttttaagaactgtgtttggttttcttgattttttaaaattgaatttaaaaaaataaatttctgttcttattgctattatttttgtttttgggatttaatttgctggggttgttgtttttactgattaaggtaaatatttagatcactgatttttttttttcagactttcttctgtaatccacgtgcttaaaactataaatttccacctatgtatggctttcgctagattatgtgagctttttaatgtcattttaattataatttggtttagaatattatctagtttctttttttgacttgtgttaattagaaatatatttctaaatttcagtgctttatgaatttgctagtattttgctttcattttgttattgatttctagtttaatttcactgtggtcactcattttatgtaatttcagtttttagaaattctttgaattttgctttattgattatatggtcagttttgtcaacattttatgtatacttgaagagaagaagtcagccgtggagatttgccagttctacatgtccatttaatcaaattaatcattgtgctcagatctcctgttatctttactattttattgtctgcttttctgtcagatagtgggaatggaatattaaaatccccctgatgtaactgtggattggcattgtttctctttttagctctgtcaggtttagcctttgtttattttgaagctattttaagcctaggcagatttagaattttatgcataaaattattccataaaattggaataactgcctttttgttactgtgaaatgtccacctttccctcttgtatcccttcttacgctcaagctgcggattctgtgaggactggtcaggtccgtgttgccctcactcctggcacggggctctcctcacccccacgctcagtctggcgttcgtttcccagggtccgagccgtccggtgctgctccgctcctcagcctctggaggacacgcgggccgagtgtgccctctttccacctcccttctctcccaggcctgggctcctcgtgcatcgccgtgttttagattgcatcctg

SEQ ID NO: 99495 - DNA, 1083 bp, Homo sapiens
tgtgtgccaaacagttcttcaaattgattgtaccaatttacactctgacctatagaatgttgctctgtccttgccaatacatggtactgtaattctttttcattttaactattgtagtttcatttgtatttcccagattactaaaaatgttgaataccttttcatacgtttattgaccaactagatgtcatctttggtggagaagtttctattcatttaagaaattggtttgtctttatttttcttactgagttgtaggagctatttctgtacactggctatgaatgagctttttgttgtttgttgctattttctatgtgtgtgctgcgttttccctttcttaatggtgttttttttttttttttttttttgctgaacagatgctcttaattttaatagtccaatttaatagttttatctatgcctatttgaagatattctatattatttttgataaacttcattgttctatcactcatttagatctgtgatccactgggaatttttttttttttatgtgtgaggtagggattgagagttacttttccgtttggaaattcagttggcctaacagtatttatttaaaagagtcatcctttcttctctgctatccaatgcaactttgtcataagtgaaataaattatataaatggatctgtttttgcactttattctagttcattggtctgtttgcatatctgtgtaccagtgcaacactgtcttaactaatagatttgcagttaaccatagtatctaataatgtaggtcttccaactttttaaaacttttcaaagcttgttttggttctttttagccctttgcatttccatatggattttttttttttttttttttgagatggagtcttgctctgtcttccaggctggagtgcagtggcacgatcttggctcactgcaagctccgcctcccaggttcacgccattctcctgccttagcctccccagcagctgggactacaggtgcacgccaccatgcccagctaatttttttgtattttttagtagaggggggtgtttcaccgtgttagccaggatggtcttgatctcctgaccttgtgatcca

SEQ ID NO: 99496 - DNA, 1620 bp, Homo sapiens
agtgtacaaaaacaagccagcatttcttgttctcttgctatttgtaattgtcccgagcctggactgggtccagtccgctcatttattctgccagggcccagtctgcagatctcagccgaagccggttgtcctgcctggctcgctctgttcctggaaagctttgtcacgcacagccaggggccactttgggtgcatcctgtctcccccgtcgccgtatgtttgggagcagaagttggctctggtcagatatgtggatgttaatttatcctcattcttggaagcaagttgggagctcagaggaaaggaagagccacaaaatgtcaaacccagcagcggccatctgactcggttgctcatcgctataatatgtgattaagatggaagtgtttgatttcctcgcttgccggatttaggcctcattttgcttactcccgtgagtcctgatttcttcctgttagagagaggaagtttgcagcgataaccgacttgcagtggggttttctgtgaatggagcttgtattggtgcgatgtgtggcgtgggagtccccaccggttagtggcttatgcagggtgtgagtttctctcaaagtggacgttttctgccttcccggagccaaaacgtttatttcgccggtgagtacagctgagtctcacgtgcatctgacagcagtgtctccgagccttgccatttcctccactccctcccttggagccgtttgtgtgacaacctgctgttcagtaaaaccagtttagtggagtgggtgtgtgttaattctagtccatgtgtttaaaaatcaattcatatgatgagaatggcactttcccccgtggtcttcctctcagtaacccatagccccagtccaaccatgggaaaaacatcagacaaattccagtagacacccttcctacagtctactcttgccaggcccactcgatatgccaaggtcatcagaaacaagcatcctttgagaaactgtcaccaccaggagggatctcaggacatgcgacacctaagtgtgatgtggaattcctggatgggatcctggatggatcttggaatacagtaaaagacattagtgggaaacttcaggaaatcctaaactctagaattttagttaatgacagtaatgtcagtattggttcccaattgtgactaacataccgtagtaaggtaggatgctaataatcgcggggaatgtgcaggtggtattggtagggtatatggcagctctctctactgtctactcaagttttaataaaatatgtcaagaattttgagttcacaaaatgaagtacatttatagatactctcttttgcttaatgtttgttcatgaatggctgtatactgtagttactttagcacctagcttttacagtttttcctttggggactcttttttttatggttgtgcatggatgtggtagagtaacttaacaagtcattgttggtggacagggagtttgttttcagcctttccattgttgttattataaacatgtagccttgaagaccgccaatgtctaagtgaactttttaactgaagtatcacaggcatccaggaaagtgcaagaatcatgactgcttagcttgatgaactctcccaaaaggaagatgcctg

SEQ ID NO: 99497 - DNA, 1460 bp, Homo sapiens
cagatcagagcatttaggcttcacctggggaatggacaggggcaggagctgggagatcactgcccaggggtggctctgtgtccggggtgacctggactgggcccattgcctcctggggctgaggttgcttcctttcatcgggccctgtttctttagaaagatactgggctttgacttttgccttctgtcggcacctggccctgcagctgatggaaactggcagagcaaaggacttcactgggacagtgagcagtggggcagccctgtgtttacaggcaaccccagaccctcttatgacagaaggggagggcagggcagccggccttcacctggataggaacagcaggtggctgatgtatctgagttggtatattcattcagagacattggttaaaattacttgtcaatataacatctttaccattgttttcttcaaagccagattctgtattttctgattttatgtaaactaaatacatagttttcttaaatacagatgacctctgccttcacagtttctttggatacctttcaagtcagtttaacacacatgctctccggaaacaaaactcagccactggggaaccgaacctacgcttttggtagaatctcagccttggggggagcctggaggccctgagccctggatgacacctgctctggaatcctccaccagtggcttttgaaatgtggttggtggctgaatctcacttctgccttggatgcttatggaatcttctggatggactgagctcagaatctcattgaatactgtggtcctctcagtctgaactttgtacctaaaaatccacgggaatctcatagcagctgctgaggatttggagaactcccttagaaaaataaaaggaatttattttttcctattttatgtagtggctatttaaattttgaacatcaaatggtagttttggattttaaaagctcagtgtgaataaactttgagctcagatgcagccgttcttttagtgtgtcaattttaataggtgtcatttgatgtttgcactagggggttggacgaaggtcggtgtgagaatctcagggataactgggctgctgcaggggtcagacaaggcctcctgtaatagggattttggggcactgatggaatgaagggaagcgggaggagagggtaacgagtagaggctgccgctgccccagttgtattagagggtggtgagggacgtggtggataggaagctgcatgggcctccaggaactcactgcactggctttgagtcgcgagagaggtgccacgggaggtctagaaaccgtgcattttgggactgagataaaacacgtccagctggtggcacagaccaagccagctgggagcggagttgtctctctgtgcttgtctggagtacctgcctgtgctctctgagcagcctctgcacctggctggtgggcggggctgagcctcaccttcaaggctgcagatt

SEQ ID NO: 99498 - DNA, 1055 bp, Homo sapiens
gcacggggagccctgtggctttgaagcagatgcttcattcaaggcaggtggttcttttctgaacacaaacatacacgtgagcatccccaaaggctgtttttgagagatggtgtgtgtctccatgtccaggctgttgtaacagaatgataaggtgcagaggccatctgacagctggaagggtacagaggcatctctaagcagcagcaccgatggagtacccagcctggaagtgctgacaccccaccatggtcctcctctgtcccatgcagcccagcctttaggagatgcaccaacaggcatttgggtggcagactggagctcagtggggctgcccccactggggcccctctgtagcttctgagaacagttgaattgtctatctgccttcacatctatctgtgatttggttcccttttgttcttcgccagtcctcagtaggatttggtaagacgtaatttctcgatggttcaggaagacgggtggggctgtgtccatgcttgcacagcctactgtgaacagctgagctcactgccctgtgactggcttggtgtagctgaggctcagggaagagctggggtgtcctggggtgagggagcagcagcaccagcaggaccccatgccccaactgctgcagggaccatcctggcctgaatgtgttagaaactaggagggtatctggggtggggacacatcccactcttcttgctttgtgttcaggcccccagcctctttctgtcatgatgtcttgatgtctccctactcagctgctagcacttctgctgagggaagcagtcacaaaggccggtggccctggcctgagcatggatgtggctttcttggttcttggctgcggtttccttgaactctctgtggtctgcaggacctgatgcatgagaatcacatgtggggagggtgtttcttgtgtttatcagtgtttccatttctttggaagttacctggatgctgttatgagtggatttggtggactgatttgcatgggtgtggcctcaaggactgcattttctaaggagatggtgtttttaatgccttagcca

SEQ ID NO: 99499 - DNA, 1102 bp, Homo sapiens
tacattctcaaaggttcaaattagctctttgagtttgtattcacttgagatgtcagaatttgttattatgaagccactgtcttcagagcctttccctaaaagaagttttgtgattggagccagttttttttttttaattttaaattttaaaatgcttagaccattttcttagaagattgcttccataatgtggttgtttaggtgatgcctttgttcgttcagcctgctatcataaaataccttagggtggatgatatgtaaataatagaaatttcttgctcacagttctgggggctgggaagtccaagatcaaggtgccagcggacttggtgtctggtgagggctgctctctgcttcacagatggtgccttcttgctgtgtcctcacctgttggaaggggtgaggggtctcacttgaacctctataataagggcactaatcctgttcctgagagtccataacttaatcactctccagaggccccacttcttaatactgtcacattgggtattagattttaacacgtgaattttgggggggacgccaacattcagaccacagcagctgctaaagccaagagaatacctttcattataagagctaatggttttctttcaattagtttgcattcatagccaaaggtattcctttttaaatacctatgagttttcctaggaaatatgtagaaattggatgcttattaacactgtgtttctcagtgacttgttgattcagtagggtttgtgaaatgctgttggagtttcaggcaaggatgtggagtctgttctgagcacactcagggtttccatgtgttgtcctgaaagcctttctcacctcttcacatctagggtaaggccgtattgaggggaagttcctccctccctgttaggtagtgtgatgcagaattcttgacactctttgttttcacatggactgaatccaaatcaggtggggctgattcttccagccctgtctcctcatcccggtctgacactgcacaacacaaaccttcctgctgcaggctcaccgaggtgctgcctggccctgtctttgcctgaacacctgcagtctcaatgtggctgtgcgggagcaaaggcggcct

SEQ ID NO: 99500 - DNA, 1002 bp, Homo sapiens
agattgaaccccgagaacgtgggagagtagaccagccctacatcaactggaggttttagagaaggacaacagaaatgcctggatagttccggctgatgttggggtgggagatgcttttgatccccatgtactgcttgcttccgctttctaaaggcaaggtttcaaaaatacttgtgtacgttttctgacgcacagcaccgcctgtctgaatgtgcatcctcccagccacccggcacggggcgtctgcagctctcagattgtcactagcctggattctccatgccatcattatctgggatcttaatcagtcaaggtttgttctggaaatcatgtagacataaggacttatttttcaacctacttttttttttgatcctcaaattgtgttttgtcttttaaaaatcacgagtactcagtcattatgaagagctcagaaaattcgctgtcaatggagcattgatggtttgttttggcaattctctgaaaattcttacacagtttgtggaacatttgcatttgtgtccctttttcaaagccactattgtagaaatgcaaatttctgagttctgagatgctgaatgttggatgattaatgatattgaaatttaagaatgaactcccggtatgtatttgacatagaaaacgcggtgtgagaatcattagaaaccattgagcacagcttggcggggaacagaaaggctgtgattgaggcacccggcagtgggggcaggtcgcacgtggacaggtgtgcaggtgcgtggctgcctccgggtgccaggctgtgtgaggcgggagctactgccatcaaaggtctggctctacttgaccataggtgttcaaaactcatcataataatacatcagccttgatgacttgcttgctcagtcaaccccactgcgcgtttaagagaacgaaatgaacagcaggtttgttctgagttttgcttgctgctactccatttgtgcttgcatatagcctgtgacgtgagctggacacgttatt

SEQ ID NO: 99501 - DNA, 1665 bp, Homo sapiens
ccttccgcccggaggtcccttgggaggcaggaccccttgtgcccaacacgtgcataccaccacctgcacacactggctggtggcccagcggcctctgcccacgtctcaggcgggggatggggcttgcccagaaccgtgccctccctcctgggcgaggcccactcgcttgtgtgccttcccaagcagctccatccccagagatctctagtttcgggaagttcctctgtgtttcttgtcagctgatgcacctgtccgtccgctcccaggcattgctggaagtgctttccaatcctgcttttcatcattttagtgggttttgggaggaagagaaatcattaatactaaaggattcagtttgctctcttgagcgggaaatttctaggtgtgtcagagcacagccacggaaccgctgtcccttttccttgagccgaggagccgagtcctggcaacgtggtgttcggggcctacctggctgcacctcccctccctccgtgtgtctctcgtgccgtcctctgctagctggccctgtccttcgccctgcccacccggctcactcttgcctgcctggctcacccttgcctgcccatctggcatgggggccctgctcctgtgtggcctggtgtgggtgcccgtgccgccctcactccctgggcaggccgggctgggggagtccagccgcccatgggccccctctcacatttgtcatgtgacttggctttgccctgctgatgaagtgcccttctagtgcagtgtgtgtggctttcctctcctgtgttctgtgaaagtcctctgctgctgggtgagttttgtgttacggttttattgctgttcccgctgaactttgccagagccaggccctggttctctgacgtcaaagctgcttaactgttgggattttattgctctaaagaacgatttctaatgatgtgagcggcctgagggaagaacctggattgacttagcctggaagggctctcctttgaaaggaggccctggagccttacgccccttgcccggccagccctccacaccctccctgaggggatgcgctgtggcagggcaggatgcgtttgtcaggacacagagcctctgccttgaagccagagtccctggcatgaaaccgggagtgtggacggaaagcccacgggggcctgctggcaggacaagctacgcctccttttttttctcccattcccttgttttcctccaaggacagttctccaagtaactgtccttgtctttccttgtggttaagggcttaggatactggtgacttgactggccagcaggaaaggcagacgttgttacttggccacccacttaacactaccccgtccctccagtgtcatttactttcccttccggaatgttcgtgcctagagaaagtcttgcccagaaaagttctcagtgtcaaggagccccgcagtggatttgctgggacgtggatttgctgggacgtgtctgtggtcagcgggatggtgctctcgataggaagcagtgcatttgctgggacgtggatttgctgggacgtgtctgtggtcagcgggatggtgctctcgataggaagcagtgcatttgctgggacgtggatttgctgggacgtgtctgtggtcaccgggatgatgctctcgataggaagcagtggatttgctgggacgtgtctgt

SEQ ID NO: 99502 - DNA, 1366 bp, Homo sapiens
tcccagcactttgggaggctgaggtgggtggatcacttgaggtcaggagtttgagaccagcctgggccaacatggcaaaaccccgtttctactaaaaatacaaaaattagctgtgcctggtggcatgcacctgtgttcccagctactcgggaggctgaggcaggagaattgctcgaacccagggttgcaggggtggtggaggttgcagtgagcccagatcgtgccaccacactccagcctgggcgatagagcaagattctgtctccaaaaaaaaagaggaagtcatcatttccctagttggatgttgttttccagatcggaacttccatgttgtaactccagtctcttttctccttctgaccttgcaggttcatctgcagaagccagcggacgcctctgttcaacttgtgggttacctggctcatgagaccttgccggcgaggctcggcgcttgaacgtctgtgacccagccctcaccgtcccggtacttgtatgtgttggtgggagtttggagctcgttggagctatcgtttccgtggaaattttgagccatttcgaatcacttaaaggagtggacattgctagcaatgagctcccaaagccatccaggtaaggccgggtcatttcttctctgggcacacagcggggctttctttgcccaaagtagaagttcttgtgactgcagcttgctttctggatttgagacttttgtttttcttgatagtggtcactgttggtttttgacagcacaaagtgcaaaatggatggtttattcttcctcttggtgaaagaagaatgataaaacctgggaggatgtggagtcaagtctgcgaccccggtttgcaggctgacttgagaggcacacaggtttcctcgatgctttttgacaagggtgatgttgaaaggtcaggttgtgatgtggagagctggtttcttgcccagtgtctttgttgtttcatgaggggttgtgtgaggggtgggagtgctcctccaactgggcgtctgggctgtctgggaagaagctcatgttcccactgaggtcgtggccacagttgctcctggtgtttgagggcctctgtgaggggctgcactaagcattttacaagcatttagtacagccccagatcatctcaggcctggagggaagaagtaatttgcctgaggtcacagagctggtaggtgggggacccacatgattgggaagcaagcttgtcctgctctgagcttcagaagcatgtcatgggcccatccatttacgacttcacactttctgtccttggaaagtcaccgagagcgtgcaccataatgaaacctcgaggcctgccgccgacctgcctgagtgtggggctcctgcagagccagtcct

SEQ ID NO: 99503 - DNA, 1046 bp, Homo sapiens
gaagccataaggaataaaatggatattgtggaaaatagcagcagtgaagtgaagaacatacttgagaggctgcctgggaatgcagaataaacaacagatgtgtcaccggtgaaagaggccagatctgatggggagacttcagccaaatagcataggaactctgaagaagccagaacaagtttaacaaaaataataatcagtgacataattgaagaacattttcctgagcagaaagaagacctatatttgttgaaagagtcatgttttgaacaaaataaaagactcttacttatgtatcttctgacaacgtttttgaattttaagattcaagaaaaaaatgccagtagattccaggcagaagaaaatggtaacaaccacaacatcaagactcggcccccaaagttttacctggaaagaagctgtaattgagctggacttaaacttccctacaatgttgaggggggaatgacatccaaaaattttgaggggggcatatttgtgatctaagatttttatacccagctgagatgtgtttttttgtgtgaaggatactgtcatctgagatttgtgagggtttgaaaaatatgccatctacattcccttcaagaaaatgtctctttctgaccaagagatgaataaacattctgaccctgaagacaaataagtcattgtcattcctaaggagataaccagatacagaacaacagtcatgaagatattaatcagagttgtagatacaatgaacataaagttggaaagcatctagatagccagccttgggggcgggggtgattctttacatgatgaactggttagagttctttggttataagcaattggcaaaaaaaaaaaaaaaaaaaaaaaaaaaatttctagactaattaaatcaagaaaaggaattggtcacacttttaaagaaagatgaacacagaagcctctgaaagcacttgagctgggatcagccagggactctcagtggtaggagtgctgagacttgtctcttttgggttcatctagtgactgatctattgaagaggcaggccttg

SEQ ID NO: 99504 - DNA, 1014 bp, Homo sapiens
ttgtaaaatcagaaagtaagcaaatgctcaaaaacaaacaaacaaaagactggattggaggcttgccagaaaaacctaggagctggtttgcaggagctcccgacggccggcgctttagcaccaacaccaatggtggcagtatgggactaataacacagcggataacgtaactatctgtgagtccacacgaacggaagcagattactgagtcactgggaagatggagcagtgaaagctcatccttgccttggaattctaagtaataagtgcagcaaaaaggaggtgatttggatgtcaccactaggcaaacatcatgacagtgagtgtcacagcccggctgctctgatggattcaggcccacgaagacgtgtgttgatatgtgtctctctccagtgagcttcggtagcttgggcttttcaaggcacttgtttatttcatctaagttgtcaaatttattggcataaagtttttcataatattccccattgtccttttaatatttgtgcaatctgtagttaattcccactctctttttttttttttttttttttttttttttggaacagaggcttgctctgtcacccaggctggggtacagtggcgtgattttggctcactgcagccttgacctcccgggttcaagtgatcctcccacctcagcctcccgagtagctgggactacaggcatgcaccaccatgcccagcttatttttttttattattttttgtcgagacagggtttcacaatgttgcccaggctgctctcgaactcctgagctcaagcaatccccccacctcggcctcccaaagtgctacaattacaggtgtgagccaccacacctggccccctctctcattctcgatattgttaatctttgtcttttctctttatcagctctgctagaagtttatcaattttatagtctcaaagaatcagcttttagtttcattgatttttctctgttctgttgtcttctgttactgttttttttttcttattttgagtttaatttg

SEQ ID NO: 99505 - DNA, 1006 bp, Homo sapiens
gaggacacaagattctgagaagccctcttgttcatgacacagccggattctggccacatcatgtgaaacatgtttcccattagcttggctgtgcgtgtaaaagtgaggaggaactcacatggtaatagagttacatgggtatatgcattttcaaaatagtgccgttaactttcggacgtttcagtgtaggtggaaggaggtaccgacgcagcgtgaatgccagggtgttggctggcgttgaagctagatgccgtgggctgtcacacagttctctttactctgtatatgtttgaagttttcataatataaaagctttgtttttaaagagaaattcatgttaaaacctgtgaaatcttaaattgcaaatatcaatatgaaaacactttttttttacttaaaatatttgtactttttacatatccaaaaaataaacaaatgactaaaaccaaccagtatgtggggaactcaacatgaaatacatatgctaaccaaggaatttaactctcttacaaatgcactcacctgataactttggaaaccagtgtcttacctggatacggtaaggctgagaacaaggagaatcgtgtataaatggtggtcttgtgaatgtgtttctcatgtgtagaggttagcgattctgaaatgactttgtgtgtgtaccggaattaaacaaatgagaaaagatactgtagataataggaaccaggtttcccactgttagaaagatatttaataaaaacaaggaaagaggaagactaaaatacaccttgtgatgttgggatctgaggtctcagtatagactcatgattattcaagtgtaaactcatacagagatactgaggtgtgagtgagtccctacgcgcgctgcctgctgagagggccctgcgtgctctgtcgcccagcagcagttagcacacctagcactagattgggtccgaacacagttctcccaaacatggatccagggttccctggagaagccattgattccgggactgtgacaggg

SEQ ID NO: 99506 - DNA, 1059 bp, Homo sapiens
ttttactgctgtatggtgttctgtggtatgatgacatcacaaggtatttattcgtgcagcttttggcacgtttgggaggtttctggtttttgactgttacagataatgctgccgtgtcttcgtagatgtctttctgttgggtagatgcctcgggctggcattgctggggcatggcacttgtgtggctgtagtacctgccaccgaggggtttcccacagggtgtgtgccgttgactgttttgtaacctcgtgtgtgagtgccggccaaccacatccttaccaacacatggtatcctttcgtttatagattttagccattttggtgggtatggagtgttccgttgtggctttatcgcgtttccctgcagtcacacatgcgcaggaccttgtgtgtgttgattgaccacttggaatcctgtcttgtaaagtacctgttgatgtgttttgcttatttttcattcaggttgtctgcctttttcttagtgatttgtaagaattatttatacattttgaatatccgtcccttgctgggtgtatgtgtggcagggtctcttctattttgtggcttgccttttccctcttctgcatcttttgataaatgagtgttcttaattgagtgcagcacaatttatcattttctttccttcatggtcagtacctttttaacatctgtctatctttgcccacctgaagatattttttgttgttgtcttttagaccaggcctcattgcttacctttaacatttaggtctgtgatccagctcatactaatttccatcatggcgggctgtatgggctgtggttcatttagcatcaaagagcagctgacgcaagcactgcatattgaaaagaccctgttttccctatggatttggggtggaatcctcacaataatcagatgactctgtgttggtctcattctagcatattctccttggtttactttaattacacaagtttagaagaagtcttgatatttggtagtgtgagtcccccaagcttgtttctcttccagattgctatttcaggttctttgtgcttccatttaaaatgtaaaat

SEQ ID NO: 99507 - DNA, 1096 bp, Homo sapiens
ccggctggatggcaggctggccacactccaccacgggccagatggagcctgcagtctgcatccgcttccccccgagtcaccccgcagccaggtccggagcattccactgtctccctatcccactgtcagtgtctgcgtgcaggtgctgagcctggcttggtgttcttctgtcctttgtttcctgtgaccctgtggtgagtgtgaccccgtggtggggcaggggctgctctctggccttcccagtggagaggatgagcaaggggccccggcagccgatggggggcttggagaaagggcgcttaccccaccctggggctccttggggctgccaggggaatggtgcccaggctggctctgaagatagggtaagatgactgggccaccaaggtgggggctgtggggagcgctagggaggccctgccaggagccggtgccctgagagcagggcgggcactgggccagctcaggccgaggggacctgccagacccctcctgggagcttggacctccttgggtaagaaggagcagaccttgatggggctgggctggggctgtgcttgagggactggagggtgacaggcagaagagggcagtggctccacaacgggtagacggggtgagtcttggtgtctgtcagtgactgccagcatgcccagcatcatcacacgctctgctttctcctggcaccggcctggtgcgtctccccggggctcgcccacctgcgcgggagccagcacttgcagggacccaccttcctgggttggtcacctggcttccttcctctccacccccagcgcccactccccctggctggactctccctctgtcctccgaggaacagcttttcttggcggcctccacccccagctcctgccttcctggagtgacttgcccctgggctccctgtcacttctgaattacttagcctgaggagcgtttcttccctttgtgtctccttccctagggcacttcctctttaccttcccgtcccacccctgcggctgacactgaagattctgctgtgtgccagtgagtgagcgggcccagcatgggacacttttccttggaaatgaggggaaagagggctgcttcctgg

SEQ ID NO: 99508 - DNA, 2774 bp, Homo sapiens
ctcctctggcgtgattcctggtgaacccagaacagccactcacctctgatcgctgccacctaatgaggaagggtggagtttctctaaaatgggtacatctgatggtggtgagggtggcgaaatcctctctcatgcacagttctcacccagcttctcttctctccagggagaccactgtgttttcactgttagaactgggctgtctctggacaagggccagccttgttacgagcagaagttctcggtactgtgtctgggatgtggctcttgctcctctaggtcgtgactacgttgtttatgaaagtcaagctcttacacctaaagccggtgctcatgggatttccttacagtgcattacattgttaaatttcaggcccagacgtggtctggcggcttgtctggaacacacagtggtgctccaagcatgcctctgcatggacgccttacccaccaacatccgtgggctccagaggcctcgcaccctcccctggccggccaccccgggatgcccccaggacctgcaccctcagctgacgctcctcttgggaaggtggttttgaacctctgtcatgtggttcctcccgtggttgggacacactcatctgcctctggtgtgacccatctctctttggtctttcctcgtccctccagtgccacccattttcgtacagaaactgaggatgcctctaattccgtttgagcatttgagtctcagtgtctgtgaccttgactccccctgtgcggccgccccagccccagcagcacagtcaggactgggacctgacagtggctctgaacctccgagacacaggccccagcctctcttccctgtgctccgactctcagccttccttctctgccctggtcctggcatcctgtggctcatcattgtctagagtaaaacgcaggcccctctgccttgcctgccgggtcttccagggtttggcccagcctccccgacccagattccttctccctcatccttgggtctggccacattgtttagcccttgtttagggcacacctgagctttcctgtccctgggcctctgtttaccttgcctccggggcttgtttggggctcccagagcagagctgtaggagactgtcttggaccgctttccggggcccagtggcctctttttgattctgtaccggcaggaagggtcatcacagcctccgtggcttcctcggcactcaccgtggcttgcctggcctcctgtcccctttgtgagttgtagtgagtaatggacgaggctgcagtcaggctccctgtgtcctgttgtatcacatggtccttctggggctcctggggtggcgtctgtagaatcagggacaggcgtgtgcgtgttccttatcacaggccggctttgcccactggtaggctgtgctgtgcacgtgaagctgcaagggctcctggcacaggcaggcagggggcttgaggctgagacttcagagggaacaggggcccctgtggccactcatttccatgctctagctctgccttcccgctctggccaccaacagggagccgggtggaggcagagcttccccgctgctgagctgggcagagtcgtgggccaggagcctccttttcttcagtcctcggaggtgacccggaggcccccggaacctcctgacactgccagccagtgcttcctcctgctgagagcagccagcccgctgtgtgcccccatgtactgagctccaagagtgtcgcctctggctaagggaagctgagggcaaggcttcttcctgaggcttggaggagacctttcagctgaggtgctggggatgctggggagagggcctccacgcaaagcagtcaggggctatgggcctccgattgtgccagtcctgtggaggcggccgggaagcaaggtgcccttctcaggagagagagccaagatggaagggaagggatgggaagggctcttccatggaagccttgtccctgtccctgtgcacaaaatgtccgcagttctgttctcctgtatcctggctcgctggagcccttgggtgtgcacctccccatcagtttctgggcccggtggggtgcagagaggagccctgagcccctcctcaggtcctgcctgtgtctcatcttcctggtgcttggtccgagggctgatgtatttggaagttttatttaagctgttgtattgttaaagtgtcatctttgtatgtgtttgaatacaaatcggcattttagggatcagaagcaggggacagagccgtggggtatatggtgctggggccatgtccactgaaacaaagcagactcattgttgccgcctaggacccattccttcggatgcagggcagttttcccttctctttcttttcttccgtttcctttgcctttttctgagatagagccttgatctgttgtgcaggccggagtgcagtgggacaatcatggctcactgccgccttgacctcttgggctctctccatctgcctgcctcagcctcctgagtagctgggactacaggcgtgcaccaccacatctggctttttttttttttttttttgtagagacaggggtctcactatgttgtccaggctggtcttgagctcctggtctcaagggatcctcccacctaggccacctaaagttctgggattacaggtgtaagccaccatgcctagcctcagttttctttttcattaaacatttccatatgatagagagaggtactaaaatatgtcatttcgaatgtggctttagggagatcatggatcttttcagcccacgcaggtatcccagattac

SEQ ID NO: 99509 - DNA, 1028 bp, Homo sapiens
tcacttcttatttagcgtcataattttaatatgatacattaatatgtttgtgtacataaacattttggagtctgctctgtttaaaaatgtgagtgttgggctttgtgagtttactgttgtttatgaagtactccgtctgtgtgagtcaagtgcttttgctggattgatgtttaagcttgaaacaataaatcagttcttaggacctgaaagtctgaaccagcattccaagtgggagtattgttcaagcggtgatggaattgcattttcccttgggaatggcccatcatctggtttatgtgttgctatttgctggagcggttcttttttaaactgaggaagagaagtttctgtggtatctccactggcctccctggtggtggggttgggggtggagggggggtggtccttgggggccatgttccctgaatatttctaattgattagttattattttgcaaatactcattttacaccccagcccaagtactaggttttacatgagatgagactcagttgaacacattctctgtgccagacgcagtggccagccccatgaccccaggcttgatcaggaaaactggcctctgcccacaagaggctttggtgttggtagggacagaggagaaaaaggagctaaacaggcaggtgcacacgggtcaccatcctgagaaccagggctgtggctggagggcttgcttggtagggagagccgtggtgcaggagccaggcccagatgaggaggaggaaggggaggctgggtgggtgggaatggggtgtggtcctttttagccagagccagagtttcggggctgcattgtgaaaagggcattgtggccagatggtggcctggtgactgaggtctctgaggccagagtgcgtgagccagtgatgagccgggccaactggcaggctgcctgggtggggtggaggtgtggtctgcacaaaggacttccttgcgttttcatgtatgtgtagtcttcttgcatttaatggagagtttgcttctgttctttctattttgtgcactg

SEQ ID NO: 99510 - DNA, 1774 bp, Homo sapiens
tgctgtgttgactgttcttggcgctgttacaggcgcgtttcataggtctgggcagtacttctggctttctcatgctgtcttatgtcacgtgtgggactgcagaactagaagacatcatgttcttctcctgcaaagtccccaggacgcctggaggcaggtgggggtgacggaagggagctaatgctccaagtccacttcagccggagcagcttttagtgtttgttgttcggtctgttgattaccttggaagattttattggaagaaagcatttgaggaccaagttaatctactctttcaataccaacccagaaaccttaaagaaaatcttgacagatttaataggataagagttttttaaaaaatctctttggcaaaagactccgtcagccgggctaagagacgagagagaaaatacataccacattatgcctgtgtaagcttaacagtcaatatataaagagcttttacagaccaataaggagagcatgagatcaccattgcaagatgagcagaacgtatgaacattgaatcattgtgccagtgatgaaaggttagcattactaatcaattcagtgtgaaggagattccctttatgcctatcatattggcgagtttgatgatacctgttgctggtcataataataatttctattttgtaaggtttttgcaaagtttaagttaatgtatggaaatttccttgaatagggcctggcatgtagtaagcatgatataaatgttggctgttatttattatcatttgctctctggagagacccatatgtattattatataaaatataatagggctgggcgaggtaccttatgcctgtaatcccagaactttgggaggccaaggtgagaggatcacttgagcccaggagttcaagaccagcctgggcaacatagtgagaccctcatctctacaaaaaaaaaaaaaaaatcaggcatgacgtcgtgtgcctgtagtccccattacttgggaggctgtggcaggagaatcacgtgagcctggaaagtcaaggttgcagtgaggtgtgattttgccactgcacttcagcctgagtgacacagcgagaccctgggctgtcccccccaaaaaagtttatatatgtaatgtataaacataaaatagtgattaccgaattgctctctagaaaagtcttaagtgtcaaaatcttaaatgccattctccttgtccccacagttctacattttgaaatctattctaaggaaagaagataagtgtgtagatatccagacgtgtgtggaggtcggggctgcattatttataaaaggagtacttgttaaacctgctggcatttctgcactgtggcatcctccatgtgtagacaggcagaagtgtgcagtgtaagagggaaaggcggggtctggagcagtccccgggccactcctggttttaagtacatgggtctctaaggtaaccatcagaggtgaggagacggggtacacttttcttttatacatggtggtattgtagagattcttttggtaagcgtgtattacttttttacagtagtaatttgaaaacatttagatatcttcattggaaagaaaagtactctttaagtccttggcaagttgataaatatgctttgcaatagaagaatttaggggcatttgtttttctaactcacatgtaagctcttcaaggtggggactgaccctcggggtctgagcgggctctgctacagcccatcctacaaacagtctcccaggtttccaccagaagcaggtttgtacctctcattccct

SEQ ID NO: 99511 - DNA, 1042 bp, Homo sapiens
aatgttctgtgttcagcagcttcctagccatgcaaaataaaaatccccaaatgccatattctcggaggccttgggggctgttgctgtagcaagatggacaggacaacctggcacgctggccacgtgcggctcaggcagcccatctggactctgtggccagagacctcgttgagaagaatgccctatggatgtttaccaggaggactctagtgctggaagtttccacacattgtggggttgctgcagtttaattttgttataactctttccttttaactactgcatatttatgcccagtaatcgacttccattctccagcttcattgtgaggtttcaatgcagcatgaatggctttgaattccaatcctttaatgttgggggtggcaccaaaggaaaggcgactttatgctgtcttaattgccggagcagaagaaacatttcatcactcctgtagaattcatccataccattctctattgaaaacggctgggctttcatagctcagaagctgccatgagtaatatattaatacctgatgtagggcgcgaaggagccgcagaggccgagagaactgccgttgctgagaggcagcggggcgacaggctgtggccgggctttcctccgaggctcagaattgatgactagctggggatgggggaactgaagggcgaaggggcccagtctccacctaagcttggggctgtggaaccgagactgagcccctgccctgttgttggcagcccccagtctgtcctggggtaaggagtcggaaaggatggatttggagggagtgtttgttttgatttcaggtggtcagcatatgccctgccgtgtggtgggctctgggtttttggccttgacgttagaggcgggtactgcaccttctggttcaggtcagatgaggggtgccatgtcaaaagtgatgctacctttgaacagaccttaactcattcataagcgtttctgtgggaacaagtgtcactaaggtcagtaagttctcttcatacggtcagttttcttctcttgggcttctgtgcgtggg

SEQ ID NO: 99512 - DNA, 1019 bp, Homo sapiens
gcggggggctgcccgggacccgctcggctcagcccgcagggcgccagcaggccgagacggggcccggtcccgctcgggggtgggatccgcgtttgccggcgttgcgaaaacacaccacggaatcataagcaaattatctcgtatttacattgagcgttgaattatttgacactgttataggaggagaccgtgcgtatcagttggaaaggccgggggtggaacccagtgtactcatttaatgcacatcaaaaatttgtaataacttgaggcagctgatatgagtgttttctttattgcatgttgtaaattgacctgctgtgacacagttttcaaataaagcgttgcagaaattaaacttaagttattttaaaactaatgactttcttcactaaatcctaattgcatgactgtagagacctacctaattgcttgctgagagcagttctgcttgctctccgtgagggaggaaagggcctgtgcagtcactttgccgccccgtttttctctgttcaggcttttctgtttattcccacaaatcaccgaagcagttaaggcctgggagtaagcctgtaaacagtcctggcccagcgccagcccagcaggactggggggatactggcaggtttgcaccttgacctggtttcactttttcttttgtaatatgatcgtggttgcctggagttttaattgcttctgataattctgtgcattattttcgggactgtccaaagaaggctggtgtggtggtttcaggacctagccaggaaaggtggtggtggtggctggggagagggagggtggaagggagggagatcgaattaagaaaactcagctgcttgtacacaaatatacactacagcagttacaaagcaacaaaagttattgcagaattttgcagtaactatggcaacacaattactctattataattggaaatgcaaaatgccaccgagttagaagtttcatcagaatggagttttggatatcaaaaatatgtgaaatttaattttttttcaggt

SEQ ID NO: 99513 - DNA, 1013 bp, Homo sapiens
ctcacttcagtccatctccaacaccgcctccctcacggagtccccccaacaaccaccaggacccaccacggattcctgctgtactggctaaaggcacaggcccctcactctctgctcctggacctctcccacatcactgttgctccttgctgaccaccggctgtgtcccagctgacctcgcgctgtcccccagctgaccctggaccatctccctgctgaccttgggctgtccgccagctgaccttggaccatctccctgctgaccttgggctgtcccccagctgaccttggaccatctccctgctgaccttgggctgtccgccagctgaccttggaccatctccctgctgaccttgggctgtcccccagctgaccatggaccatctccctgctgaccttgggctgttccccagctgaccttggaccatctccctgctgaccttgggctgtccgccagctgaccttgggccgtctccctgctgaccttgggctgttccccagctgaccttggaccatctccctgctgaccttgggctgtccgccagctgaccttgggccgtctccctgctgaccttggaccatctccctgctgaccttgggctatcccccagctgacccagggctgtctccctgctgaccttgggccatgtccctgctaacgttgggctgtcaaccttgtcctcttcacctcagccctccagggtccttgaagcccgcagctggatccctccttccagctcctctgatgctgggaatctcagtgggaacagtctgtgtggggagcactgcagtttaccctactccagcccagtgagaggggcgcatggtgttttgtgtgaattgcttccccccgccaagtccattgctagggccacacagacacatggacggcgccctcgagtctccgtgccatgtccagggaggtctacactctgatgtggttcgaaggccaggcgaggctcttggcctgcagcatccctcagcacacctgcccctgcctgtctcaagctctc

SEQ ID NO: 99514 - DNA, 1436 bp, Homo sapiens
gggatggccacccaactggacagtcacctggatggacggacacctggatagacggtcaccccgccagacagtcacctagatggtcacctcgctagacaatcacctggctgggtggacacctggatggatggtcagccagctagacagtcacctggatggtcacccatctagacagtcacctggatggatggtcacctagatggatggtcacctggatggacagtcacccggctggatggccacctggatggacggtcacctggacggatggtcacctggatagatggtcacctggctagacagtcacctggatggatgttcacctggatagatggtcacctggatggatggtcacctggatagatggtcacccggctagatagtcacctggatggatggtcacctggatggatggtcacctggatagatggtcacccagctagatagtcacctggatggatggtcacctggatggacagtcacctggacggatggtcacctggatagatggtcacccagctagacagtcgcctggatggatgtttacctggatagatggtcacccagctagatagtcacctggatggatggtcacctggacggatggtcacctggatggacagtcacctggacggatggtcacctggatagatggtagcctggctagacagtcacctggatggatggtcacctgacagacagtcacctggatggatggtcatctggatggatggtcacctggatggatggtcacctggatggatggtcacatggatagatggtcacccggctatacagtcacctggatggatgttcacctggatagatggtcacccggctagatagtcacctggatggatggccacctggatggacagtcacctggacggatggtcacctggatagatagtcacccggctagacagtcacctggatgtatgttcacctggatagatggtcacccggctagatagtcacctggatggatggtcacctggatagatggtcacccggctagacagtcacctggatatatgttcacctggatagatggtcacctggctagatagtcacctggatggacagtcacctggacagatggtcgcctggctagacagtcacctggatggatgttcacctggatagatggtcacccagctagatagtcacctggatggatggtcacctggatggatggtcacctggatggacagtcacctggacggatggtcacctggattgatggtcacatgactagacagtcacctggatggatggtcacctggatagatggtcgcctggctagacagtcacctggatggatggttatctggatagatggtcacccggctatacagtcacctggatggatggtcacctggatagatggtcacccggctagacagtcacctgaatggattgtcaaccagctagac

SEQ ID NO: 99515 - DNA, 1009 bp, Homo sapiens
gctcagggcctcccctaagtgccacccattgctctctgtccccctcctgtggctcttgtcaccctcctgacattaatgagaacactcagtagttcgtttccatttgtggctcccagccctaggacagaagcttctggcaggcagggctgggttgtggtttgtgtacctgtggcatccttgcactcacaggagacacctgccacagatcatgtgctcaccagcattgctgaaggaactcatgaagtacaggcatctgccgggtagacattgaactatgagctggggaaacattcattcacgttaaacagaatgcaccaatgcctttttcccccacagctgccgggccgcaagtacagccctgggtacaacaccgaggtgggagacaagtggatctggctgaagtgaacgggccgccttctgctccagctgcatcacagtgatggccaagctgcatcagccgcactctcctggacgccatatagctttaagatcgggggagggtaaataatgcaaaaattgcacagtggaagaaggggtctcacaaaaagcaatccatcctgtagtataggtaatggagttgggggaagcagcttccattctggatgtttggaaccctttagctttgttttggaatggcccaccattctcactggaaaacagtggtctgctgtgaaaggccagctctcggcagcccctgtggtttcagcgctgccgctctgtgtcattcaggttgtgcacattgtttttcttctgacttccagaaataaaagtgtttccatgggaatttccccatcgtacgtctatgtgcgtgcgggcacgtcgaaactgcacacgtgcacacacgctgctctgggccctgtttggtgtggtgtggtttaattgaggcttacattatgctgaagagtttttctaaaggcctactgtatttattttagtaatgtgctacattagagtagaaaaaataagaacgtgaagaagaaatagcaaaaggagaaaattaccacagatt

SEQ ID NO: 99516 - DNA, 1069 bp, Homo sapiens
tcagcatacagaacagagcagtaagacgctggctgcaaccccagagggactgaagctactcaccgttcctgccccaagatccactcatctggaaaattgttaatgggggcatgctttgtgtgtagcactgtcatgtaaccatttgcttctagctttttgttcctgctattcctgtgtttaaagcacactttgcctcctttttctatgtctccaaaacagcatccattcccagaaggtcgtcctatgtaggtactgaggcttttaaaagatgctacctcaggttctgagagtaatattaaaaagcagctccagatcgaccatgtggtctttgggaggaaggctttgctgctgggatgattgcttggcaacgaatagcatttattgggatatatagattttttatatggatgtttaaaaaaaatcggacttacacttcttttattgtatttattttgatggtttggtgtgatccacatgtgtcttattttttagggttcaggataagtttgaggtgctgaattacacaagcattcctatctttctcccggaagtcaccattggagctcatcagactgaccgtgtcttacatcagttcagagaggtaagactgtggaaatggagaaagctggccagtggatgagtctgcagcacctggggacaatgcagtcacttctccagaaaggagtttttgttgttgctgtgttttgtttgttttagtgaaggagcctctttttcattgaaataattctcccttttccccgtatttctgtgtggaaagctgatgaagtcctcagatgacagccccagagcagagatgttcttctggaaggttcttcatcaggcatattatcttgataggagaacactctgttcatcagctgttatgtcagtttctttactgtcagatgttacttctggtattttcttactctttgtctgtaaataatgagggttccatttctgcagaaggcccttaggccatatgggaggacatagggagggcaggcagagcttgggacagacagcgagggtggaagttggtaggggcaactgtgtcattgatcttctt

SEQ ID NO: 99517 - DNA, 1005 bp, Homo sapiens
tactcagagttggggtcatcggtctccttacggattttctctctgctggatctgtcggttactgagagttgggtttaaatttccaacagcgctggatttgtctatttctcccttgggttctattagtttttgcatcatatattttgaggtactgttgttaggtacatagtttattatcttaggttattatcttcttgaagaattggccgctttatcgttatgtaatgcccctctttttcgctgatgtttgtccttgtttgaagtcagctctatctgaatttaatatagccactgcagctttcaattagtgtgggcatggtgtgtcttttttcctcttctatctcgagtctttagttttcttgtagatagtaagtagtaattgggtcttgtgttttaatctactctgacagtctctgtcttttaattgctgtatttggaccattcatgttagaagtgagcgtgaagataatcaagttccattttaccatgcttttccctgttttctgtttgctgcatttgttgtttctccctgcctctttttctgccttctctggatttcattgagcattttataagattctcttttatcttttcccttaacatcttgattgtactttaaaaaaatgtttgtagtggttgctgtggagtttccagtatacatttacaacccatctaggtctacttcgtgatggtgctgctgctccatggggctgcaggtaccgacggcacagtcttcttggctcctcctgctgtcactgtgacatggctgccattccttccacttttttttttctttgagacagggtcttgctctgttgcccatcgcccaggctgcagtggcatgatcttggctcactgcagcctccccttcctgggttccagcagttcttatgtatcagcctcccaagtagctgatactacaggcgtgcaccaccacacctggctaatttttgtatttttagtaggaatggggttttgccatgttgcccacctagtcacaaactc

SEQ ID NO: 99518 - DNA, 1046 bp, Homo sapiens
accatttcattaaaggtcagccagcttcacttccattctgactgttacggtgtgattcttcctgccaaatattcatagcttataatgtattaaaatgttacctcttggccagccatggtggctcacgtctataatcccagcactttgggaggctgaggcaggaggatcgcttgagcccaggagtttgagaccagcctgggcaacgtggtgagaccccatctctactaaaaatacaaacatcagccaggtgtggtggcatatgcctgtagtcccagcaactcgggaggctgaggtgctgaggtgggaggattgcttgagcccagcaggccaaggctgcagtgtgctgtgattgtgccactactttccagcctggatgatagagccggaccctgtctcaaaaaaaagttatttcatttaaatttctaaaatggggttctctgtttaaattggaatttttcctgtcttaggtggtagaggacattgaatacctgaagttcgataaagggccgtggctcaagcaggacaatcgcactttataccacctgcgattactgtaagtgcatctgtgtgggggctgctgcatgtctggggtctacttgcatgatggggaaacttagggaagtttgaaataattatgtttcaagttaggtgttagcagcaccaacccaatacttagaggtattttttcttccaaacagctcctgaatcccctggtctgatacttaatttattgagtgccattattaatttaacaggcattttgcttccactatgtgcaacaccgttccagatttaagagatatagtgtcagataaaattcttgatgtctttgaaaatgtgttttagtaggtgagacagagtaaacaaatagataaaactgcgtcaggtcacaaaggccagggagagaagtaaccctgagtaacagggtggtgagtagctaggggtgacaaagggcctctctcgggatgaggcctaagtgaggccaggattgggtcctgtgggccgtggggtgagcagagggcaggggcttggcaggtgcagaggct

SEQ ID NO: 99519 - DNA, 2015 bp, Homo sapiens
aattgggcctaaggtgggtatttcacatttttgtttattgaaaaagctgttttataaaacgaaacaagaaaaagctgtttttaatcttttatgtttggaaaatttgtgaaaatccatgctggttgtcaatttgaattggaattttatgtgggcagtgtaagcagggcacttccacataaactgtcgtgtttgaactttgtgacagcctctgaaatagagccgaggatggtactcactcacagatgggtgtactcctgagtgagcagatgccacatagctgggtcccaaagccaaggttagagccccttcctgactcctggtgcagctgagtgtccattgtacctttctgtagcacctgcatgacagcagctgcccgctagagggggctcctgtggttacagggagcagtcctttcaggaggaacctggataagggcactgtgcaagctctttcgctcacatgcttgcttgtatatgttgtgtgttcccttcatacgtgatgaaacccaggcatgtaggtgactttctctaggtcattggctccatccctggcggtgagattcgggcgggctgtgtgttttggctagtccccactgctccctgcggggagtgagtgatgtgcatcagactgcatccgactgtttctcttttcaggcttcaagcactttcctgaagcggggattcattatccagacagtaccacaggagatgggaagcccctcgccaccgactataatggcaactgtagtttggagaaattttacgatgatccgagaagcaatgatggcaacagttaccgcctgcagtcctggttgtacagcagtcgcctgctgcagtactcagatgccttggagcacttgctgaccacaggtgcagtatttctgggcagttagatctgttctgtacttgaacactattctagaattcaaccacgttaaattgccactgagtcgagctttcctttaagggtgtttgatgaggtgagttctgtctttccaacaagatcatgaatttcttgagattgtgttatttttgcttcagaattaatttaatgctgtttcactatggatactggagtgagatttatggattgtatagaattctcaaggcactactttaagcttctatacttacatattcatttatatatgaaatgtgtcaaaacaaaggggtaaagagagcacagaagtgtccaggaggaaacgggatcacacttatgaagactgtgcatgtgccatgcagacagagatgtggatgccaacaacatagggttgtcccggagggcccagagataggccggaatcaccataaagccacgaggcagacgtgaatcttgataagatgacggggggaggcagaacacacagggtcccataggccagtgcagtaggggaggatgcttcccttgaaggtatccaaagcagaaaggaagagctgtgtactggggagcctgggagacggaaacagggatcagaaagtatagttaggagaggaagggaaggtggatgaaagggcatgaacatggactacttgtgtgcagaatgaggttagggtccagcgacgggttactgtaatcattctgggaaacagcagtgcatgctagacatcctgagagttggaccgcagatgcactgccaatttttggtcaaagctaccatgccacggcggtcctcagttcacaggtagcagcaaatggcacatctgtgtgcggagagagggagatgggtggactcttagggccttcgtgtctgttttatattgcagtgcttgctgctttcgttgattggcagtgcccctgatgagcttctcacgcacaagctcagccgccactagggttggcttcatggggtctgagccgtgagaacaagaatgtggttttcactgggagtggccggctcacaggcttcttctcagagctgagctaggagccgctgcctatgctccttcaggtctccacggatgcagtgtgtgtccatgacacgtatctacacagttgtacggtggtggagttattgt

SEQ ID NO: 99520 - DNA, 1035 bp, Homo sapiens
tgcccgtgcactcgtgggtgcagacacggcactggcgtgtcctgagtgctgagttgtggctgtgcggtggtgtccgtgggactcagaacagccctgcatgcattttcttaggattgtcttttaaatgaaagctagaaagcactctagccaacactctccccttggactacatgtacgagccctggttggctgaaactgaaagtctgttacgggaaaagtcttttatttcattggatcattgacgattatctctgtattttggactactatataattcattctgaagtgatttcttcagcccttacccttgtaggtgtaactacgtggttttgcttatttccctagattttgaagatctttttgatgatgatgacatccagtgagatgccctctggctgcaggcggggccaagcccttggtacagagccgcagtgtgagcctgcgcaggacagtttcaggtggttttaaagaacacgtggaaatcccttgaatttaggacctggttaaccagaaagataagactgttcttaacgacctagatgattctgttcatctctgaacgggatcaggttttgtcctcactccaattaaaagaaagcaatgtcacatgtggagtgatctctttcttgcacttatgagtgaatgttgcagtccctaaacgtctctgtgtgtttgtgtgtgcatgcatgtgcgtgcatctgtcagcacgctgagagaaccacatttgtctggtagcagataccttgtgttaaggtgctgtatgtgctggagcaggaggcagcgcggcccgtgcacagctgggcctgctgacagcacttggaggaccttgccacggggccgcccctctgctgtgtgggcaggttcccactgtgtgtgtctgtcagcacagtcgtccttatgctgtcctctggcctccacgtcagggcagctgcccctaggcttaagaactaggacgacaggatgcgactgcaggagacgccttctacgtggaaatgcacattggtccatttcaaaggagagtgtaacgcccatgtg

SEQ ID NO: 99521 - DNA, 1082 bp, Homo sapiens
aaaacatgggtaaaccaaatgaacagtgaaaagcaaattttctgtaacatcttcagacctgctagagggaatatttctcattctcttctgatttcttcaggccttattcctatagatgatattaacctttactaagggttcaaataataagtaaataagataggtttcttactccagagagtgaggtggcatttttcatcctggtttaatccatggtgcttttctctacagaaagctcttgttactagttaacagctaggacctgagcttgccacatcggtttctaatttaccagagaccccctgccatcctgagtccctgctgcttcatcaggcttactgtcaggcagccattgcctgaggggagcagccaagctgctgagttggggtgcaggctttcccagggtgcctggccatgcccctgaggcagcattcttactgctaccaactggagtcagaactgaggcagatgacatttgagatgagcctggagaactgaatagcatttatttcaattctttatgccagagcgaggtgggagaagggtgttgccttcagagggaacaaattgtacaaagctgcagagcgctctccaaagctgctttgcaaaaacaccagctcaccagggcgactttgaagcttttcacgtgggcaggattgggcagttgctaatgctggcaccacacgcttgcattttgatgatctccttcaaagtcccatttatcctctgccagcccattggttagaggcgattgctgtgttctagtgtttgagttcacatgacttccagagtcagcccttgaatcctgacgggaaagcatctctgagagggacccaggtcctacccgtcaggtgagcgcccagcaacctgagcattgtgggcgcgtgtctgcctttgagccacggccggtcagggaggggacgcaggagagctctgtgtcccctgcctgcccacccactaagttcacaaagcactcactgtcccatcaggttgtgacaaccccatgtgttcaagaagccatttactttgagagacctctgtgggctgtggatgaggcttttgctaagtcctttttactcgtc

SEQ ID NO: 99522 - DNA, 1088 bp, Homo sapiens
aacctctctccctgcaccccctatggctgcagaagtggggagtaaccttcgggacccagggtacagaagacagtgtgggagccacgtgggctgagggaaacagggtgactccctcgggtcgcagcagtcctggggcagccaagcccagtgtcccctcctgctttgtcggctgggcctgggctccgtggaacgggcgccctctggtggcccctgggcggcagatcctcccaggagccctggaccctctgtggcctagtaggcaccattctcagtcccctctctcctgcatccagacttctccagggggacctcctcagagggaatgcgaaccccctggggttgggcacctcgctggcccggagcaggtggggtagagatctgatacttcctcgtgggaaggagagcagttggccctgggtgtgtggcgggccttcccagcctctgccccagggaccagaaaaggcagtgggtgacaggagacttagctcatgaaagagggcagtgtcgggacatattgggctcccttttgagacttcctttgtcctctggacagccaggccaggctgcagtgacagcagtggtcatcccattttatgggcaaggaagcaggcctgggtgccaccagctggacggtggcactgcagcagggcacccggccaccctccctttatgccagggcacggcacagaaggcaagggcggagccgagtggcaccccgggtgcccctgcgctgccaggagccctcatgctgaatcactgcccgcgtgccagcaggcctcctgcttttgcttgcaaggttgtgtctgggcataggtgttcccagagcacctgtctggcctcctgatgtctgatgtgatgtgatgtgtgtctgtttgctcctttgctggggtctcagcgccccaccttggcacctgagctccctggtcgctgggaccacctctaactgtttccctgttgtagccacagaacccggctggctcccggcccaggatagcttctcggaggacacccccaggccttcctggctttatacctggctgtgctgggtggggagcgggacatggagggtagaggagggtctccttgga

SEQ ID NO: 99523 - DNA, 1077 bp, Homo sapiens
ggtctagttttgggggcagaagtcagagtggggcatgggactgtcggtggcacagaaactgcccagccgctcctgtgcccagagtggcagcccgcctaccagctggagcgggcaccagcgtgccctggagcctgtaccaagcacccactcgttgggcccctccgaaggaatcttttcttctctgtgccacttttgaccgcctgggtggttggcacacagactctggggaaccatcctcagagggcctggacctctccttcccacatccctgaaagggtgtttccggctgggcccgggagagcccaccagcatctgcttctcagtcctgctcagcgggcctctcggaggctgcctggcacacagcccctcaccagaccagacagttccctgtgccctgtcctgtccaggtggctcagcgtggttcccaggtggtcctcagcctttgctgtgtcgctgctcttccctccatgagaggagctcatcatccccagcgtgaggaccgagcggagcccaggggagccctgatccgacagggccacctgcgtgatgcaatggcctgggtccctgctggaccgccaagcctcccatgccaggcaggccacagcactcctcaggcacagatgcccccacccccatcccatccccggtgtccccgggccttttcacaggagagaaagggaataatcgtgacctcctgtgaaggtggccaggagggagaaggtgctggggctgtgcacctcgtgggcagcctcgggctgtgtcccccctctccccggacaccctctgcaaaggcccacacacacccctctcagttaatggcatccggtaccctaagagcactcatgaacccgggtgctcttagaacacggggaaacccggcttgtggagcgtttcccatgactgtctggttaacacatcagacggaaggggtctttgtagacctgttttacaaatgagtaaaccgaagcctggtgaagcgctcctcttagggccagatctggctacagcattgaccactgcccagtaaagccaggccaggctgcttgtcccaggctctgcacttcttggaaggctcgt

SEQ ID NO: 99524 - DNA, 1102 bp, Homo sapiens
agtaccagggtaccagggccggcctgggtgccaggtagggaggcaggagcaagaaagtggaggctcccctggcagaggttccctctggaaggagcatggcttgttgggactggaggccagaggctggggaggcttcctgagggaggtgaggggaaagcatgtgagatggagggaagtggcaggtcacagctgggtggggtgactgggtggagtgactgggtggtgggggtgggcgcagggagagccaggcctgggaccaccatgaccacagagatggcttctcgggaagtggttgggtcggaggtgagcggccgagttcctttgctccctccccttctgttccttccccagtgtttatgagccatccctcttggcgggctccctccagaggcacccaagggtttgctctgggatccggcccagcctcagctgtatgtgtgtctctgcctggttggcattcacggggcagatggacgggcctgcgcggcgtctttgtggactggaatgtggctgctgcgtccccttctgcgtttctagcgtgccccctgtgggtgtagcagacagggagggccagtccatcttccaggcctccttgggtgcctgtggcccctgcagtgggtgtacgggaagctagatgggagagctgggcagagccccaggaggacaaccccaccctcccacagcctgcctgaatttccaccctgctggcagggttgggcatagagatgtgagtgccctcttcagctccaccaagccaaggaggagaaaggctgagccaggcctgggggcacggcctctggggagcacctcatcctgggttcgaagagtgggctctgccttacagccaagacaccgggtcctgggtgtggcaggaggttcgtgacacaaattctgaatcccctttcatccccagtctgaggccacagcatgagcctcagacagtggagcaggctggcatggggggaggcctgcacagggcacgcggcttcttggcccgagctgtgactaggctcccatctgatggacccctgccgtcgtgccatgccagggccggcaccgcccagacctggcgtctgccggcaggatggcctgctcaggggtt

SEQ ID NO: 99525 - DNA, 1088 bp, Homo sapiens
gcccggcgcccctcgcccgcggcccggcgcggccgccgcccatggatttcacctagtgccggcggccatggccgcgcagtgctgctgccgccaggcgcccggcgccgaggccgcgcccgtccgcccgccgcccgagccgccgcccgccctggacgtggcctcggcctccagcgcgcagctcttccgcctccgccacctgcagctgggcctggagctgcggcccgaggcgcgcgagttggccggctgcctggtgctcgagctgtgcgcgctgcggcccgcgccccgcgcgctcgtgctcgacgcgcacccggctctgcgcctgcactcagccgccttccgtcgcgcccccgccgccgccgccgagacgccctgcgccttcgccttctccgcccccgggccggggcccgcgccgccgcccccgctgcccgccttccccgaggcgcccggctccgagcccgcctgctgtccgctggccttcagggtggacccgttcaccgactacggctcctcgctcaccgtcacgctgccgcccgagctgcaggcgcaccagcccttccaggtcatcctgcggtacacctcgaccgacgcccccgccgtgagtccggggcgggcgccggggctgcgggccggtccgcagggcgctgctagcggcctctcgccgcacggccaggctgagggacgcgaatctgcgccctacaggtgcccccctccccccaccccggtgattcccagctgttgcctgtgagcccttaggaccctcggatagaagccggagtcctgcggggacacgggacagcatgtcactccgggaagcctcccgttcaggtgtctggtccctgcctggggacatgagcagcttctgtcacccaccgaggtgtacatctgcaggatcctggcaccaagggttgggctggagtgtcagctgcggaagggcctccatgtgaccagtgcgtgcagatgagtccaagccagaggcagaggaaagggccatggagattgtgatgctcggtttggggcttccttggccagcactggtggagtgttgagaccagtgggccccgcgaccccaacatagacacacataggct

SEQ ID NO: 99526 - DNA, 1054 bp, Homo sapiens
catcaggaggctctggcttcccaggttccacatcccagcctccttttcctgaccatgaccaaatcaactgctgggaatttggactgagtgtgtccctactgtgcctcagtttccctatggaagctaagataatgcaatgatgggctattcccttttttcgccttggcgttagctgggagatgcccctatcggctacctgacacagggcctcctgcctgggttggggtctggccctgatgacacagtgcaggccacaccctgggtcacctgccctggatgtctccctgcccaggcaggcaagtgaaggctaaggggtggctattggccctcgaacccagcaagataatctggccattgtcccctcccagagcctcctgccttctctcaggctgctgcccagtggctagggcccagcaccctagctgggtggccgtctgctgatgggccatcctgcccacagatctggtggctggacccagagctgacctatggctgcgccaagcccttcgtcttcacccagggccactccgtgtgcaaccgctccttcttcccgtgcttcgacacacctgccgtgaagtgcacctactctgccgtcgtcaaggtcaggggccgccagctgccgtcaccttgctcccaggacagcccagtggcctggccacgccgcctcccccttgctcctacctgcctgggctgtggccccagctgccagcaggccacagtgctagcaggagcccaccctccctactctatgggaggagccgctttgcagggaacgggggaagccgggctgcctccaacgggcctgaggggtcggggtcctggacccggggtgagtccccagtggcactgcagggtccccagacaaggggtctcccgacagagctgctgatccccagtggggtctgtgggtcaccgggcccgaacttggcagcaccctctgtgctgggacgaggtttgcaggctgggagctaggggttccgaatggagggtggcagttcttcggagagaagttctctgacagaaacgttccctgatggggatgtagggtttcctg

SEQ ID NO: 99527 - DNA, 1035 bp, Homo sapiens
agtggcagtgctggctggagctgactccgccttcctgaacagcccacgtccctggaacaggccacctgcctggaacacactcagggtctggggtctcctgggcagattgctcaggcagccccttcctagcctgggcagggaccccagggtcacttctcccctctagggctggaattcgagcgctggctcaatgccacaggcccgccgctggctgagccggacctgtctcagggatccagcctgacccggcccgtggaggcccttttccagctgtggaccgcagaacctctggaccaggcagctgcctcggccagcgccattgacatctccaagtggaggaccttccagacagcactcttcctggaccggctcctggatgggtccccgctgccgcagggtgagtccctgcagctgatgggggcggcccaggggctggggtgcaacagcggcccagccctgacctgccccctgcgctgcagaggtggtgatgagcctgtccaagtgctactcctccctgctggactcgatgaacgctgagatccgcatccgctggctgcagattgtggtccgcaacgactactatcctgacctccacagggtgcggcgcttcctggagagccaggtgcggtcacctgcccagggggccagcctggaacggcctagccgtgcggactgggagtcccacccgactccctagtctgagcccttggggcaggccaggcacattctggagaatggggcggggaagacgtaggggtctgttgggagtgggggcatgcaccgggtgcaggtaccagagggcagcctggactccaccagttcttggagaaactgtggaagggaccagctgggagcaggagtttagggtccaggccaccacagcctgctgggccctgggccttcagcgtcctggtctgggcagaggggacgtcccagctcctcagagggaggccagagccctcaggcccgtgggccctggctgccctgctccctgtatgtgctccctccagcccaggttccctggagatggggcct

SEQ ID NO: 99528 - DNA, 1920 bp, Homo sapiens
ggtggagccaggtagatgcagcggtagcatctgagctcctgtcccagctccaggaaggggagttctgggtggaggaggaggagttcctcagggagtttgacgagctcaccgttggctacccggtcacggaggccggccacctgcagagcctctacacaggtagtgccccgaggggctgtgctgggcacgtgctctgcctgccgaagtgaggaggctgggcaggtgcctgggttccccctgcccaggcccagtttggttctcttcagcgtggagagatgattctgtcccaggagccgggaggagggtgatgattctgtcccaggagctgggaggagggtgggcttgtgggaggggctggctctgtctgtggccgtagctgctgcttagaccctgccagggttcatgaggccaccatggcgggaggccagcgaggagccgtgtcccacagctgatgcctggtgttttctcactagagaggctgctctgccatacgcgggcgctgcctggggcctgggtcaagggccagtcagcaggaggctgccggaacaacagcggctttcccagcaaccccaaattctggctgcgggtctcagaaccgagtgaggtgtacattgccgtcctgcagagatccaggctgcacgcggcggactgggcaggccgggcccgggcactggtgggtgacagtcatacttcgtggagcccagcgagcatcccgggcaagcactaccaggctgtgggtctgcacctctggaaggtaactcagccccgtctggctcacgctcggttcagcaggtggtgtggaggcccatggaggtctgggttctaggactggctctgccgggacacatgtgactctgccacgggccccaccagtctcccccctccttgggctgttgcacggggttgacgtctgctggtgctcccagacccggctctgacctgagactgcaggtctttctgccttgccgtgtgcctcattggccaaaggaaagcaacagagtctgcagccagggcaggacccgcaggaggggcctggacccggggggctcctggcagcgccgtgcctttctgaggcaaggaggtagagccagcggctgaggacctgtcagggccagtcccagctctgcagcttgctgtgtgacctggcacacatcctctccctgcctccctcagtctcttcccctgcaagacggggtcctgacacggatctcatgggattgctctgaggcccaggcagtcccaggctcaaccactggttcacaaagtgtgttgtttccaggaagaacagatgggggcgcctgagggcaaagggcctgagtgtgggtcgaggatatgccggctgctcgctcaggggctgggttttcatcttgtgtgtcttgacagggtgtgacacttggcaccacactgttccctgtcccttcatggatgtggcccacatgatgttcctttcctcttgcaaaagaagttgctggaaggcccactgtccagcagcccccaggttgcctgggccacggtgcctttgtgggcccagctacaaggaggacttgcaggctcgtgtctgggacagatactggcgccagggccaagtgaagcccgggattggtgggcatctctagctggtccctgagagagggtggagggtgctgacaggccttggcgctttcatctgtcaactccagaggcccttgtgcttgcagcagggaggtcaaggccagggcgtctgaccccggccgctcctccacactgagcctcctgcacgtgctcacaggtagagaagcggcgggtcaatctgcctagggtcctgtccatgccccccgtggctggcaccgcgtgccatgcatacgaccgggaggtccacctgcgttgtgagctctcaccgggctactacctggctgtccccagcaccttcctgaaggacgc

SEQ ID NO: 99529 - DNA, 1023 bp, Homo sapiens
ccattcacagccaggagatgctgggccagttcctccaagaggtgtgtatgcagccccgccagcccggctcacctgcctggggctgcctggtggcctagggtctacctgcaacctcaggcaggtggtttctgcctgggacgtgaggtgcccttgactcttcctgtgagagccccgggcggtgccttgaagggcagggggagctgaggctgcgtcccattccctggctgcactcggggtggggtgtgagaaggggcgagtgccaccgctgcccgggccccccatctgtctttgcaggtctccatcatggcagtgatgaaaacctaacagggtggccccctgtgccagctcaggtgactggagcccgagggcctgacaggttcccagcagctgggccggccagccttgcactgtgggggctggtcctgagtcttggcctgcctcccagccctgccaggaggctgcggcctaggggtccacgggaagcctccgtcaggagagacgcagccctgggggccagctggtgctgcaaggaagggtgggaagcttgctggcttctgttgcgccactgagacggcagagaccccaggatcccagagcttcccaggatccctcccagatcctctgctgactccatatggaggcctcacacccagagggtagggcagcagatcttctttataactatttattgttcgaatcacttttaggatgtaactttataaataaacatgagcgctgatgatttgcagatcagtcttgctccaggtagttccaggctgtgcctgctcttgccaagcaggctgtggggagggctgggtgcctgccgagatggtgaggatgaggatggcctctggaggggctgggggcctgggaggtgggcagagccaacccaggcagggcaggtttcagggggagatggtgagtggggaggaggggagaagtttggaggggcgggcccagggcatgccccaggccagggggctgaggttgaggctggccggggcaggtcaagccctggtcttg

SEQ ID NO: 99530 - DNA, 1054 bp, Homo sapiens
accagaaagggggagctccttccgctgcggctccagatagatggggatgccgggctccaggccgaccagcacttgggatctgatgggacacggccagtgcctaggggtgccaagtccaaggcctcccactgggagtcatcgctgagaagatgccaatgtttcatccaccggctgcacaggcacaaactcccccacccaggacggctgtgatgaggtggccctccctgtcaaccctggtccctggagtccccagcacctggggccctggtggggctgatgtcacaggtgtttactgtgctgctgcactggtcctatgccagcctcacccatgtggggaccacggaaggcacactcccttacccccggtgccgggccgtgcggtcccccagacggacagcagctgtggcgacctgcgtttctccctgggcctgtgcttcctgtagttagtccgtcccctggttcccctgtggctcagaggccgcgtccctggcttgtacatatgtgattgctgtgggcacaccccagaccccatgtcatagctgccgtcccgacgtcacgacgcctgtcccgatgtcttacacccgagtgttagccctaggctcctgtactgtgcgtgcacttgaggctctgtccaattaagaaataaatgtggctcttactcaacacagtcccatgggctctgctgtggctttatttgcgtgttacgtgtgttgcagggccccggaaaatggctgtaggtgcatgcatccagcgtggtccagagacagtacccctctcccagtgatgaggcagggaggggctggctctcgaggtgggcatggggaggtggtggggaaggtgtcgaagactgagtgtacacagggtgctggtcttggaggatcaacctccacctgcctcccgtgaccggttgcacccctgtgaaccagccccaggcacctccccagggacacagcacctaccaccctcataccaggccactgcacccatcccaggcagcctcaggcctggacccttcagagtctctagtccatggggtctgcgcctgggcccagat

SEQ ID NO: 99531 - DNA, 2287 bp, Homo sapiens
ggtgggttcctggcctgctcaacctctgcccacttggggtgaccacagcgaagctgccatttgcagggggatccctcacagaacccaagcactcaccttgtggcttctggagttgttctgagatgggaggagagcgagggaggagagtcaggcctgctggcttccttgggttcccagggcacagccgagatggccatgggacgccgggctggataacttcctatggaagaggcctacatggctctttgggccccagggtggaccaaggaccaggggaagcccatctccactccagaggggagacagcttcacagatgggcggacctctaggatgggtgggaggagcagccacccatcaggtaggggtggaatgtccacgtgccccatgcagggatgcagcgccggcgccgacgagtcctggacacatctgtggcctatgtccggggcgaggagaacctggcaggctggaggccccggagtgacagtctcattctggaccaccagtgggagctggagaagctgagcctcctgcaggaggtgaggcagcctcagaggatgaggcccgcacggtggtgtccatgtggctttgtgtgcagagcaaaagctggagagggcccagggcctggtgcctactggggggcagcacagctgcttgggagtcacagccacctgcaggaggagcatgtgatgctccagtgtgcactgcggggctgcgtggtgtatgacagaaacatggccagtgtagcacagaggcatgctctggaattagccgaggaagactatcgggcatatagacagaggccagaaagggacccggaaggagagtcgcggggctgggctgccctctgcggctttgatcagggaaaccaacatgcagcatctaggcactgcctcgggccgagtgtgtgtgtgacacgtgacgcgtgacgtgtgagatgcgtgaggccagggctctgcccacccctcggccctctcctgaggcctccagcactgcaaggcagcacagccctgccccagaacctggcgcgtgagatggatgtgtctgagaggagcagcttgcttgctgcccatgaaggtggcagggctggggtgggggctgagggctgtcagccccggggcgccagggtctgttccctcatttcacagctgagggctgtcagtcttcagtcttagcccaggggagggtgggctctccggggtctgcccagagggtcatgctgctgctgaggctgagcacaactccggaggtcacccctgaggtgcagcaggtaaggccttgtgtcctgtctgaaggtggagaagactaggcactacctgctcctgcgggagaagctggagaccgcccagcggcctgtcccggaggcactgtccccggccttcagcgaggactctgagtcccatggctcctccagcgcctcctccccgctctcggctgagggccgcccatcacccctggaggctcccaacgagaggcagcgggagctggccgtcaaggtgggtccagctggtgggcagtacagccgtagccccaggccctcaagggccctgagtcatttctgggcaactccagcaacccggccttgcccatggctgctctggttagcaccaccaggagctaggagcttgaggggtccctagggtccccttgcccactgactgcaccccacctgcactgaaagttgggtgccttttgcagcctcccttcccaagcgatgaatcactctcttgaatacctgtgctgatggggagctcaccacttccacccacaagtggctcttttggcggctgaacgggcctctgggaaggcttcctgcgcctcctgcactggaggcagcacagcctctggccctcacaccaggccctcagccggtgcctgaccctgggagacttcctgggctcacccgatgacctgggcggggtggaggtgctgcccaccttgacccactgtgctctggcgtcggaacccacctgtgtctggggaggggtgggtagaagagcctgcaaggctgtctgagcagggtcccgggaggcctggcccctgaccacgcgtgtgctctgtccacagtgcttgcgcctgctcacgcacacattcaacagagagtacacacacagccacgtctgcgtcagtgccagcgagagcaaggtgggtgcagaggggctgcaccaggctgccccgcagggctcgggctcccataggcagtggtccctgaggaaaactcccattccaagtgggaaaaggcagttaagagtttcctaggaacacgtctcagtgcagagggacacctca

SEQ ID NO: 99532 - DNA, 2776 bp, Homo sapiens
gctcttctttccctccctcccttcctccctccctccctccctccctttccttgttattatcatgactttttggtgtaagaagaagcaggaacattcctcctctgtgtcttgcttagccttccttttccagcagtcaggaaggccggtggtttccaggctaagcacctgcatttgtcagtgtgtgtatacgggggtgttcactgtggccgagagacagacaagaaagaccgtggagcagcaactacacatggcacctgggttgctgaggaccctgtagggcctccctgttccccctggcaccgcctttgacagacgctctagtgaccatgtggggagctggcttgctgacaggacccccacctgaggcagccccccagggtcccacctgccccctgggaagtgacctgtggcccgttgccttttctgcaggccgcatccgaaacactccagagaccgacgagtccctgatcgaccccaacatcttgtctctcaacatcctctcttccggatacatccacccagcccaagatgaccggtgagtcggagactccctggagacagggcccagggcatgttcccagcctgccaggccctcagccaacccggcacagggttcagccacacaaggtgacccgctcaacgctctcccggccctccctcctggcacctgcaggagctgtgcggtgaggggctggtggcctctgcacccccggctcctcgtttgtgcacctcgttgctggttcaggcatccccatgcccatttgtttatcaccaagcagaggggccagcgcaggggttggaagatgagctgagttctgtcctcgggagttttgtggttgcgtggtgtggggacaagtggctgtatgtccaaggaccatgctgctgtggatgagtcagtggcctctggcaggcatcctggggctagaggtggagcagctggggtgggcgcccataggcactgcttggcacaggcccctcatcaccaggctgctccttcctacactccttgcacggccaagaccccacagtctgggcggtcccagcccgaccgcatttaggctggggttttggcgctctgggatgtctgtggcagccctatcggggtctgctggggttaggggatgggagagggaggcagcccctgcggttggcctgggcaggtggctcagcactgccaggggcagccctggtgggtggggacgtcccgcgggctccactgcgtcccagacgctgccttccaggggcttggggaaagtgaggcgggggctccagtgtccagtcctggctgctccctgggggctcgacctggctcatgatgcacaagcccagagtggaccctcagagctgaagccgcaggtgtctccatggctgtgtttgtaggaaaacgtctttgagggcctccctgcaaggagggtcagggtcataaggaaggagggtcctggcgggcgtcgtctcctattcttctgacttgggtccacacaaagctttggtttcatcagcaacacccagaaagtgggctatcggggcttagcactgcagtaaggagggcactgcaggggcagccagggcagggggcagctggatagtcagggtgggcacagcgctgaacagtggggggtgggggttgggcacagacctgggcagggtggatgcagctctggtcccagccctgcctgtggccttccagagggaacttgccctgcactcatgtccataggagggtggagaatccggggggtgttctatgtggaggtggtgccatgaggggggagcacgtctgggagagggagaggtgaggcagaccaggtgggacgggccggggcttggggcttccccgtgccttgcttctcctgccgccatgagaatgctccctggtgaggtgtggagaaggcctggagcccccagcacgggcgctgcctgcagagtgtgggctgctgtgcctgggccatgggggaccaggaattggagtagggggtggggcccggaagggcgggtctgccatgtgagatgtgctttggagcctgggagatgacctcattaccttattttcctgacctctgacccccctcagcccaggcagctcctggggtggggtgggcaggggctccagccccccaaccccacctgctatctctctgcacagagggctgagtttctgaggtcttcctcagaagaccagctgccatgggtgacgtaggagggagcggctcatggctggacctcaggccaccctgttcctggatgcctgagaacctgtcactgaaggggctttggccccacaccctgagggctgagacatgaggccggtcccagggtgcctctggggttgaggcagccctgttctggggtcaaggccctgggtctgagaaaggaggaaggcgcgttgcgtgggcgcggcctccccgaagcggctttggccctcgcttggctcctgcccgtgctggcagctcccacccctagccctgccctggagcagtcttggggactgtcctctgctggcacccccaggcaggcaccgtcctgtggcttggctgaccaggccagtgggccttcctgtgccatggacggtgctggcgtcctcagccccatgatgggccgggctgctccaaggccgctctccctgacgtgcggaggctcaggatccccggcttctggctccagcctggggccttggccttccatgcgcttttccatggccttgcctcctgcccgctcccaggccccacgctttgcagcctccctggctcagagtgggcctgtggccacaggccgcttc

SEQ ID NO: 99533 - DNA, 1036 bp, Homo sapiens
gccggtcctaggaaagggggatcttggtgctctgggtctctgacagggcaggctgggccgcaccgtggccctgggggtgtcctcagggctccattcagcacctccctgggccctgggctgggggtgcctcatcttggccaactcacctcggagctcccacctgccgagtttctgtctggggaaggggttctgcggggtccgtgagcatcagggacccctgggaagtgggcaggaggcagagcgatgctggccatcagtgccagtgtgaaaaggggggcagtgcagtgtggtctgggtcctggtctggcccccgtcctccttgaagcaggctgaaacctccctcctcggctgctcccttctcaggcagccaggtccgggcccagctggactgtgcctctgctctccgcagctcattcctcgtcctcctctctgtccctccacctcctgtctcctgtgagtgcctgccctgcctgtccccgcccgctcttgctgtcctggccttggctgtcctgtccggcggcttccctctgctttgcagctccatgttgtgtcgtgagccaggccatgctgccaccgctgccgttcagaacatgcgtggaggggtggcccatgaccgccgcctctgcttctccccagggccttcgtgtacctgagcaacctgctgtaccccgttcccctggtacaccgtgtggcaatcgtcagcgagaagggcgaggtgaagggcttcctccgcgtggccgtccaggccatctcaggtgcgtgtgggccaaaggccgtgtgtggcattggagcccctggggctggctctgacctttgcaggcagaggcgtgggcccaagaagggccttctggcatcatgtagtggttagtgggaagctggcctcagctggccctccactctccctggggtcaacctgaagctgtttttccacgctgtcctgggctggcgccccgggctgctgccccgcagtgggccctggaggggaagcccctgctgcccagctcttggctctggactccccagggtcagctggagg

SEQ ID NO: 99534 - DNA, 1045 bp, Homo sapiens
gcccccgggccctgcatccttgcagtggggctgctcacccatcctggagacggtcgctttgggccggcagggaagagtctgggttccaggtacagaagaggtagtgcaccccggagcttgcagctgtggccccaggcaggtgggactatttctgcagagaggccgtaggaaccccggagtggctcaggcacccaatggccgagttcctccctgaaagtcccagtgcagggcccaaggggcatttgataggtgagggccagccgcccccaagcaggatgcccgtcctgtcattctcctgggaatcaacactgtcctagcggaggcagcctcaccccagctcagctgtcatccagaagagacagaggctcccggctgctctcagtgctctccactctctttggggaaaggagctgaactcagaggcagccatcctgaggccacttttaggagtgggaggcagctgctaaccctcccatctccctctgaaatgatggggcctgggcaaaacatgcctgtctaaaggtgaggactactccatccctcctgacctcctcggttgtcatggccagagatggcggcatgtggcccaatgccctcatggaatgtgccctttgcagagagaagctggttatcacgttgcccaaatggatgagaagccacggttgggagacagaatggaggctggggaagcccagacccagggagcagacgtcccaccctgctggcagatttggcaaatccagctgcctttctgttatcatggaagggaagtcaggtgaaggaaagatctagaaacctggctgtagtagtcagaaggtcagctcacgaaacagctgaatttatatattttacatatatgaatgtcataagataattcttaatagcaacctttttttggcgattaagattgcttccctgggctaggccagtggaagttttcaaaagtctggagcttggagcagcagtgctgacagctgaaggctaagggtggccccagatcgcagggtttacacgggctttactctgtccttgggtggagatggtg

SEQ ID NO: 99535 - DNA, 1050 bp, Homo sapiens
ggtgggctgcccactggctgtaccgtttcctgttggagagagtgtgtcacctcactcatgacggggacagctacttgggactcagcacttggctctctgccggccccgggggtggcatagcagccctgcctgacctggccccccagaagggtgggcagtgagggagcccagacctggccaggtgggacttggctgctcacgggagacggcggccgggtgggcaggcaggaagtaggtggtcccccctggcggctgtctgaaaggttccagtgaaccattgtggggcaggcagctgaaatctccagaaggtgggaaggaagcctttttggggacctggcaccctgtcccccaaggagctgacgagtggtcatcttcccctgtcacaggtacaattccagtttgtcctcctgacggacacactctactcccctctgccacccgacctgctgcccccagaggccgccaaagaccgagagacgcggcccttcccccgcaccattgtggccgtggaggtccaggaccagaagaacggggccacccactactggacgctggagaagctcaggtggggctggagggccgctgggtggatggtgggagggtcctcctgggcagggctgaagccacaggagcggtggtaggcacaggcttcacagcgagtacctgcagacaccgctgttcctcctgttccaattattttaaaatcagaagaaaaatgtgaatagagtccagccttgtagaatcctcattctctttctaccaatgcagcaatcatacataaaaatagatttggacattttctttcggaggaaaggacagatgaggggaatgctccctaggcccacaggggtcaggacggtgcagtggaggggagggcaggctgtggcaccgacagaacaggctggcggagcgccaagagcgggtacagcagggcctgaagggtggctccccagagggactgggagaggtggtgggggatggaaggaatgcccccttgctcctccattcaggaagctgccgggaggtggatcccttagctgagcccagtgg

SEQ ID NO: 99536 - DNA, 1066 bp, Homo sapiens
ttcaaccaccccgagcaggcccggcaggagcgtgagcgcacgccttgtgcggagacgccagctgagcctgtggactgggccttcgcccagcgtgagctgctggagaagcagggcatcgacatgaagcaggagatggagcagaggtgaggcggaggccacccccaactgcctgctgcccctcctgccctcccgtgctcaccccaatgcccccttgcaggctccaggaactggaggaccagtaccgccgcgagcgggaggaggccacctacctgctggagcagcagcggctggtgagtgacgtggccccgccctccctgcccagcccccacccacaccaggggacccctgtcctcccacgcccccactcctccctgcttgcctggccccatctcttgcatctaaacagtgggatgtggtgaggcccactgtctaggcgcagtgtgagaggcccaggcaggtagggccgtagtggagtcacaggccttgctttctgcaggactatgagagcaagctggaggctctgcagaagcagatggactccaggtactacccggaggtgaacgaggaggaggaggagcccgaggatgaaggtgaggggtcactgggccagcacctgctgcgtcaggagggtctcagcatggaggtgggcagccctgggcctctccctggaggtcactggtcagcacttttgccctggggtctggacctgtctctttagggaaagacctccttgccctgggaagcaccgtggaagcagcattgggggaggggggatactgtgccacagctggcaagcagctctgcacactcacgcactggcgtgtgtacacacatgcacacattcacgtgcacacatgtacacacgtgcacacacatgctgcctctaacaggagtggctggatgatgatggggaatggggctggtaggggctcaccatgctcatgcgtccactcttcccatcctgctgaccacaaggctcatggggcccccgaggaagagtccactgtgcacatcacctcaggattccctcagtgagcatgtgctccgggggccaacccagctgacc

SEQ ID NO: 99537 - DNA, 1063 bp, Homo sapiens
gaccatggtgcagaggggccagtcccatcagcagatgccctaacccagtgaccagatgggacacgcatgggcaccacccaggccacggtggccacaggcccgctgcccccattggtcagccagggctgaggccagtgctggaagccttgtggagcttgtgctgacctcagctctgttcccccagggaagccctgctggccgagatgggtgtggccatgagggaggatggcggcaccttgggcgtattctctcccaaaaaggtaggagctatctcagttctgtggtactgccctcatctgaacaggaccaggtgaggtgctgtctcaggtagagccagagggggctcctggaagtaggggagcacggtggggctctggcccaggcactggggctgtgaagctcacccatagtcacactttgctttttgtggagaattctgtccccacattctcatggtggggcatgctggtggctttgggacatcagatgggtctcttagtggcctggagtgtggactgggctctccaaggtcagagcaaggctgaggagccaacacccaggctggagactgagacacgaggggcctggacctgccctggagcctgggctgctcacagagctgggtgccagctgccttcttggaactcagctagagtcaggtctgactgttccagtggggacccctcttttcccaccaggccaggcctaaggggtctttcagctggaggccctcacatggcacagaacccctgggcagctgcttcagagtgtatatgactcctgtgcccccatccagcagcccaggtggggcatggcacagcagcccaggtggggcatgacacacacacttgggaaaaagtctttcttgtggttctagtccccaacccccacacacccaccccaaagatggccaggacatggggacagacacctgtgtgtccatagcttgggaggggctgggcagggctgtgctccaggccgccggcccagcacgcgctgaggtccggagacaggaagggcctgagaagagctgtagggagattccagtcccaggcagggccgg

SEQ ID NO: 99538 - DNA, 1949 bp, Homo sapiens
cgcccagggtcttggcgacatcactgacagtgagtgcctgctccagcctgtcctggacagggttgtggggcctcaggctcaggggcctcgcaggtcatcacatcctctctcctggggccaccactttgctggctgcaccctgggctgtggcagctccacaccgctcccagagcccctctgggccaaatccctgtccctgctccacgttcctgggcagaaatgcctctgggtgggaggccgggcgggggccctggacaagggcaagtttcctggccttggcctggatggtaccacatggtttgggttcaatgctgatgcaagtgggccagagacggctcccctggaagccccataggcaggctgtgggtgctggggtcaccgaggtcccccgcgttctggagctgaagaccttcaccaccctgcttgtggccacacacccactgctggccaccctggcctgtgaaaggcgtgcctgaccctctggagacaaacctgttcttctgtttctctgtctctccccctcccccacgcttccctcccccatagccaacactgtgcctggaggacccaaatgtgtgtattccctttgctgctctctgcatctctgcttccagccccagccagcatgagggcctagggtggcatggtcagggaggggtgaaccccagggtacctgctctgctttcttctcctttttggggggcagaaagcactgctctccctcagccacagggccctgctcgtagatgtgggattctgtctgcctctgagcccacactcctggctccttcccacccatatggtctacatgagaaaccaaagcaacgggggagtcagggtgtcgctgaggccttctcaggctaaacatggccgagatcaggtcctctgaccccctgtgcacccaaaggcctgcgaaggtcaggatatcagcaccaaagggccaggagggctggagggactgtcctgtccccagctcttggctcaggcctccatctgcaatgccatttctccagctgacctgaccccccacgcccaggccctcaactctggaaatgccagaagctcagctttcacagcggatactgccaaatcccacccaacctttgtgcctcctggcctcgggtctggctccatggggctcagtgcctccccgagcttggctgcagggcgccctccacttcccccacaccccgtgtggtcccgtgcttgctgctgctctgctgtgtgttcgcttccgctaggagacccctggcaccacccacttcagagatgtcacagccccacctcccgggccttagggatgcatgaggcctaggctggtgggtgagctcctcgtggtggaggggaagggcctccctcatgagggtcccatgttcacctcctccaggatggtctctgggccaatttccatgtcagtgggctgaaggttagcacagcctggccccacagctcgggggtgtgtggtgtcccaggctgacggtggatgtgaggggtgggaggacaagcgtgggggtctgcacggggcgctgctgggtgaccacgccaagccagtggacagggtgggaagatgcagggaggactggctcccagccctcaggtgtgggggctgtagggtggcctggcagtggggcctggagtgcagctgtgggaaagcaagaagcctggcgcagggggtgcaggggagctccagagtgcctaggtctgtgccatgctgctgctggggagggcaggcctggggggcaggcgggcaagtgcgcgccactgctggccccgtcccatcgtaggcaaggggtggcaggaaggccttgcatgcgcttgtcctgggcctggcagggctgctgtgcctcgttgatggtttctgtttcttgccttctctgggccccatctcttactttttcccatcttcatcttttttctctccctccctctgtctgtctgcccgccctacc

SEQ ID NO: 99539 - DNA, 1025 bp, Homo sapiens
ctcaagagaaagaacacagtctgttcctcatgccacgcattacctgatgctttgatcctactaacctgggccaggaatctgatgttaaatactgaggaatatatttcaaatgaaaatgatagaagtgcttgaaaaaaatattgaacataaatggtatttattttggagtaaatactttaaaaccctccacaactttcctctctgctttggggaaaggaaggcctgatggttgtaaaatggccccaaatgtgagaaaaacacaagtaaaagagaaataatagcggtgcctggttcagagatgaaggagcagccaaggaaggccaggtccttgctgttgtctgtgttcatggggtgggggtgggggggggggtaagcctgtgactcagtttacctctctgggcctcagcctccccatctgtaaatgtggggggaaggggggagcagacatagccctggggcctagatccccctctgggcacaacctggtcttcttcccacaggcggtaactcaaggacagctatggtggcagccttgagtcctgcagacatcaactacgatgagacccttagcacgctgaggtgagttctccagggagacaagctctgcttcccgctccctggtcttgggggatggatcctctcgtgcttgaattaggaagcaccagtgaccaggggcgactctttgtgaggggtataccctggactctgtgaggctggaagagactgttctgaggctcctgggcctgcataggccctgttctattccctccatggagcctttgggggtgtgctttggggctgcaggcagcccagggccccgtggcaccagactgggagagctgtgcctgctgggcgaagcagtttacactcacctgccggccggggtaaccactggggatttttagatagcagaggggacataggtgtgtcttatgggcagggtgggcacctggggtggggagcctgggcccctagccatgctagaggctgctcggttgtttgggtcagtggtctctcccttcttt

SEQ ID NO: 99540 - DNA, 1120 bp, Homo sapiens
ggcagggaggtaagcgtggcagaggccataggggcctggagggccacatttagctgtggggccttttcccttgggtcaggagtcgctgatggtgttcgaggaggggccatggactcagatgagtccttcagacagagtggagggaggacacacttgctggtgacatcagcactcctggccggtgtccagctgggtggcccaggggcagcagggatggaagagggaggaacctgaaggacatgctagcaagtccctgactgtggcctagaggaggcctctggggtggcggcctggggtctgggcagggagaggcctgggcagcctgagaatgtgtccagcagagcgggccccgccccttgcccagcctccagctttgaggacccacttggcagggcctgcgctggcccctccctttcgcttcctctgcagtgggctcgggcttgaccttgaatgttcctcccccacagaacaagaaaaagaagaagacagatttcattccgtaccgagattccgtgttgacctggctcctccgggaaaacctgggtgagaacttgtgggtttgcctgtccccagggctctgatcccaccctgggctgtgcccttcttccccactgagggggtgcccagtcgccagcaggcctctcaccctttctgggctgaggctgggaggtgaacctggagggtccagtcagttcgtggcccttctggaggacctggggcaacggccagcagtgggttaacgaagcgagtgtgggaaccaggacagcccagggggtggcacagcacacacctgcctgtgtcagtggtcctgggtcaggtgggctgtgacacccaggccaagtactcatccttctctgggccttggtttccccatcagtcacggggacctgggacgcgatctgggagctctgcttgctggattttgaggggctgccataaacctcctcttctccgtctgagttctgagcagtgagacttagacggggaggtgggaattgaaatgcacccgacgctgatcccgtccatcccggaataacctcagagtcctccccaactgcatttacagctggagaggctgatgcccagggaggtaaactgagtcttgggctgacctggtgaa

SEQ ID NO: 99541 - DNA, 1117 bp, Homo sapiens
tgagttctgttcggatggtgccaatgtgagtgtcccatacctcaagtggacaggcctcctccagctcgggccaacgctgagcaccattctgtcctacccacttcgtacttccaggagtcagtcccgttcctctgtccaagtcccggtccagagggactttcagggggtagcaccgacagcatggctgcccctcccaccagtcaggtcacccagtgctgccaccgaggtggggaggccttcctgagcaggtgtggaaaacgcagtgggcgctgtggatggtgttggcagttgtggggtgggaggcgcactagagggcatgtggtggaggaggccctgtggatggaggtggggagggatgatgacaaccatgcagaggatgtggatggtgacgacgggaagctggggaccatggggaaggtggtggtggaggcagtgctgctggtggtggggttgaaggaggtggtgttgacggaggagttggcagtacaggtggtgttactccgggcagcacagatggcagaggcgatgtggctggcagtgggttgaggctggaggtgggcgagggtatgagagggctgatggtggaggtggccgtggtgacggagctggaggggactctacttgaggctggcccagcagttttctagatatgatctggggtgtttcagggaaccaccaggtaccagtgcaccgtggcctactcagggcgagtgctccatgcagttaccaggtgcatttcattccctgggctgccataagggcttggcctggggtcacactctgggagccatggagacagaaccggcactcgggcctgttccttcagctgagctgagcctgctgtcatgagtccctggccccaggagtcccactgggagtcctgtttggagagtctgagcctgagcggccagcccccagactgcggagaggacggcagggaggggcaagcctgttgctagcccgcctaggagggtcagcgaagaagcaggccctgccctgagcgcctgggcaaggggtccagcctcctggctctgggccgcactggcgtccacggggggcggggctgaaatggcccaaggaggggctgcaaccttcgcaggcccggcgccccacttgg

SEQ ID NO: 99542 - DNA, 1060 bp, Homo sapiens
agcctgaaagggtgggcaggggtcacacaaggtgggcttcggggaggggtgcccccactagagcggagggggatggccaggggccagcatggccggggaggctgcaggggccaagtaggggagcctgtgctcggcctccaggcagcggggagccccataacgtttctgagcagcacctctgcagtgagatacacatgcttccatcctggccccacactccatgccactggctgcgcatccatcagtgacacagttcagctgccgacctctctgtgctctggttttcttacttataacagggggctatggttggaatgtttgtgtccccccaaattcctatgttgagatccgaactcccacagagatagtgttagcaggtggggcctttggaaggtgattaggcaataaaggtagagccctggtgaatgggattagtgccctaagaaaagaagccccagagagctgccttctgccatgggaggatacacaagaagatgccatctatggcccaggaagtgggccctcaccagtcactgaggctgactgacagtgccttgatcttggacttcccagcctcaagagctatacaaaatatatttctgttgcttatgagccactcaatctaaggcattttactgcagcagctcgagctgaccagggcactggctctgacctgacagggtgctgggcccaggtgaatgagttgctggtcacagtggtcagctctgcgctgtcattatttgctactgggaagaatgtgaccagaaccatgcttttagaaaagaccctctggacttcccctttgggtgaagcctggaacgggcactaagggggtcccagactggcagcacccctgccttctacacagaggcaaaggaaaaccctctctggaggaagatggcatcatcttaggcctcaagttattcctgcaaataattttacaaatacgcagtccaggacacagccaaaaataatcgggcacccaaggaagcatgataccaccaagaggaatagacagaaatgagagaaacagcagatactggaattatcagactcagaa

SEQ ID NO: 99543 - DNA, 1052 bp, Homo sapiens
tttcattcttgtttcgctgtatgtaatgtggctttttcctctggctgtttttgaggttttttatcattagttttcagcaatttgattatggtatggctttgcatggttttcttcatgcttttcttggaaatgtgggttttagttttcatcaaatgtggaaaatgtttgggtattatttcttcacatactttttctataacactcctttccacacccatctccatcctccttcgcagactccaaatacgtggatcccaggctgcttaatattgttctccatcctcctttgcagactgcacatacatggatcccaggctgcttgatactgttcttcatcctccttcacagactccaaatacgtggatcccaggctgcttgatactgttctccatcctccttcgcagactccagatacgtggatcctattaccctaatatcgttctgcaggttgctgaagatctcttctttttcttttagtcttattctctctgtgatgcatattgaattgtttctgtttcactcttcaggttcattgatctttccttctgcaatatctaacctgctgtaaatactattcagtgtattttaaaaactcagatatatttttcatttctacaagtttttaaaaataccttctacttctcattaggtttttttcccctcaacaatcttgattataggagcatattcataatagataattaaacatttgtatctgctaattctgtcatttctggtgcctgtttctattgatctatttttctcctgactgtgagttatatgttacttctttgtagacctgataatttttgactgggtattttggagttctggattctgttgtattattgatatactcctgttgaggagtataggattttattctggcacatggctcaatgacttaggatcagtttgatccttttaagctttctttaagatctgttagggcaggtcgacattagtctttagttcagcactactaaagtgacaccccactgaggactctatgcaatagactcccagccctgtttgagctccaggaagtgttt

SEQ ID NO: 99544 - DNA, 1052 bp, Homo sapiens
cttctgactctcgggagagctggcacctggggaagcctctctcaatagccttcctgtaatatggggctagacatctcctcttccccagtggagtaagctcacagggggaaaagcacttctgcaagtatacaaacaccatgtggtatcttacctaagccccaacacaagctattaaaatatttaatgcatacataattaggcatgtgtaatgaaatgtatcactactatacgtttgttagtgtatagatgagatggttaatcacttgcatcacgtatagttatatagaataatgatgtgatgctggcagtgatgacaggaaggcgtttctgtatcacagctcagtcctgcctcgtagaagacggaagggtgaattctgctaaaatcgagaaaaagagaaattccagggaggggccctagagcccactctgaggaatcaagatgcccacagagtgtattttcagtggccttggttccagacaggatgtcagggtaaccctggcaggcaaggtgcccgccagcctcttgccgcccgcacagatgcggcgtaagctccaggaccaccctctgtcccccgcccccagccctgccatcaccctgcgactcggacccctgcttcaacggaggctcctgcgatgcccatgacgactcctacacctgcgagtgcccgcgcgggttccacggcaagcactgcgagaaaggtatggcgggcaggggcgtccgggccggcgtcagcaccctggagagcgcccgcggtccgccgtcctgcttctctgctgtctctctccttgtttcgcgaattgctgacctcgtctagagccttgcctgatgtgctgctctgttctgtgtatttagaggtgagcacctcactgtttggatggttctgatctgcaccagtgccaggcctgctggtcattaccttgctcttctgaaaataggcttcattgcctgctcagcatttttccaaatagattttagaatcattatatcaaattttatttttaaaatttccataggattttgctcaatctaattcagcatggaaaatgtcgaa

SEQ ID NO: 99545 - DNA, 1577 bp, Homo sapiens
ccctccaggtggacttggaatctaatccttgtgagactatgaaatctatctctgctttacagaccagtccctggcttctcatgcatttgtaatgatcctgtgggtgagacctggtaggtgctgagaacttactctctgcatctgtggcttctcttgatttcaatccattgtgcttgcccctgcagcatgacaaatttggctggaggatgaaagcagccaacagcctcaacttctctgcctcctcaactctttaataggtgaaaagataggatttcataggcttcatgatgttcctttaacattacagtgacagtggtggtattctgtgactgtctacaccctaaccaaatggatctcttcagtatttaaaaaaattcactgtcttatatctgatattgctgttgagaagtttgatgtcaagctgattcttgttcctttgtacatgacctgattttccctctggaagttaaaactttttctgtttgtctaggatattctcgtattttactataatgtgtctggtgtttgtttcccctttgctcctgtctgacgttctgtgggcccttttaatctgctgttcatctggaactctgggaatttaactccctagccacttatcctttacattttcattttctcttcttcttgggctccgattatctcagctttagcacaccttctaccctctacagcacaaatattttttcttttttttttttgagacagagtcttactctatcacccaagtaggagttcagtggcacgatctcacctcactgcaacctccgcctcccaggctcaagcgattctcctgcctcagcctcctgagtagctgggattacaggcatgtgccaccacacccggctagtttttgtattttaagtagggacggagtttcactatgttggccaggctggtctcgaactcctgacctcaggtgatccacctgcctcggcctcccaaagtgctgggattacaggcgtgagccacagcacctggccccaacattttcttttttatttatttatctttccctgcttctttctggaagagttcttcaagctgatctttcaactcactaacttactcttcatctgcatccatttataaattatgtctgttatttcaactattatagtttttaatctgcttattcccactgtttttaaaataatttatcgatcctgttttggatggccaatgccatgtttactttgtaaatttgtcacggttattttataccgttaatccattttctttttttgtatgaggtggggtcttgctctgctacccaggctggagtacagtggcaggctcatggctcactgcagccttgacctcccaggttcaagtgatctcctgcctcagtctcccaagtagctgggactacaggcatgtgccaccacgccgggctagtttttaaatttttttgtagagatgaggtctccctatgttgcccttgctggtcttgaactcctgtgttagtctgtcttctacacttctgcttccgatcatacatattttctggacttttattattgttttctgaggcaatcgtacttttcaggtgtctcgat

SEQ ID NO: 99546 - DNA, 1051 bp, Homo sapiens
tgttcatcatttctttttaaattctttttgtggcttaaggagtctttcactaccccaaagtcaaaaatatatttacctatattttccacacaaaattatatagttttttttggttgtttttttttgagacagggtctcaccctgtcccccaagctggaatgcagcggtgcaatcacagttcactgcagctttgaactccggtttcaagtgatcttcccaccctagcctcctgagtagctgggactacaggtgcatgccactacgcctggttaattttagtttatttttgtagagttgggggtctctctatgctgcacaggctgggctcaaacaaaactcctgtcttggcctcccaaagtgctgggattataggcatgagccatgtgcccggccctgtatagtttttttttaaagaaacatttaggtctttaatccacctggatttaattccagtgtatgaaaaatagagaaccaatataatatttttccaagtacaaaaccattgtattccagctctcatgaatattttctcatatgcttttgtatttctttcttttagaagtttatagttagggacgggcatggtggctcgcgcctgtaatccagcactttgggagcccaaggcgggtggatcaccagaggtcaggagttcaagaccagcctggccaacatggtgaaaccccgtctctattaggaatacaaaaattagctgggtatggtggtgagtgcctgtaatcccagctacttgggagactgaggcaggagaatcgcttgaaccagggaggcggaggttgcagtgagccgagattgtgccactgcactccagcctgggcaagagtgagattctgtctcaaaaaaaaaaaaaaagtttatagttttagcttttacatttatgtttatagttccttttacgcatttaaaaatttatcatgtttttgatgctattaatgtaacactttcatttcaaagtgttcactgctacaacaggttctatatactgaccctgtatcctgggatctagttgaattcacttgttagttctatagcttct

SEQ ID NO: 99547 - DNA, 1143 bp, Homo sapiens
gtgagcaggggagagagcccccagcaaggtgtctgaggagagggcaggcagctgcccgggatgcccagtggtgggcaggtgagatctggagtacagaggggggcccgttgtacttgcagctatggaagcggatatgaagtgcccgagggtgcggttgagatccctgcataagaagtgatgcagttgggggcgagggcatgaggaaggtcagtacagactgagggcagctcagaaagagcagggggtgccacagcctccaagaagcaggggtggaaggagaggaatgcagaatttgaccctaagaagaaagcaaccgcatcagccgtgaggatggggcctctcagcatgatcagtggtggctgtccctgaagcagctctgagggggccctgcaaggggaaggccgagcccctccagagggtcagcaggagggtgaggccagcccttcaggggaggcagctctggggccgacaggtgctggggccacgcagggagcctggtccccaccagggacatccgtgctccctgagatatagaagcactcaaaagggtggccccaggaccatcccgggtgcaaagcagctgcgccgtgtggtcaccgcctggcttctcctagaacccacagcctcggcgcagctcgagaacatggaggaagcccccaagcgggtcagcctggccctccagctccctgaacacggcagcaaggacatcggaagtgagtcagcagcgctggtggggactttgggactgactgactgctctcaggggccttagaggctgcaggcaggagggaccacccacggtgaggaatcaggaggcacagagcctacctgaggggaggctgagcaccaggcaccccggtgtgggaagatggggtgaagctacaccacccaagcagtgggaccccacagacgggaacaggccagggggcaggacccacccaaaccacccagagtctgagctagagagactggctttgatgctgcctcccctcccctctcctccttcgcctccacatgcagcagagcccaccccagcccctgcctctgggcccctcacccctcacttctccaaagaggagcaggcggagtcaggatgggagaagcagagggagcagccactgggcgagccccagcttgaggact

SEQ ID NO: 99548 - DNA, 1055 bp, Homo sapiens
tgacccttgatagagaaaggctgccagtcgcgccgttgtctaaaaaagtctgaactccaccttagtgttaactagtccataggatggctcgtcgacctgcacgagcgtcataaacacgctggaggaccagagcaggggcggctgtgtctgcaacccggctttccttctgacatcacctggtctctgcccttcagcccctgcccccgtctctgttttggaagtggtccatcacagttccttctcaatttgttgggcctcgaagggagaattctttctctggctttggagtctaagaacaggtttctgcatactgcagaagcgtggctgactgacagcctcactgattccggggaatggcgagctgtcatctcatccgcagagacacagactacaccttcaggaactgcagcttgggtgagggcacaggctgcttaaacgcatcgcaggactcacaggtggttggtcccagaggggtctctcagggtgggctggtgtgtgcacaggcctggccatctgtcctctagaggcctgaggagagaggtcacagaggggactgactccagctaggaccttttctcagggtgtcctttttcatccagtttttagacctcatcttcctgggtgttagaaactcgtgaggttggtggagtgtaacaagaacgtcttaaatcctttgaagaaaaaacaaagtgaagcatgaggagaatgacaggcattcccactcctctttaaatgggctgcttcctgcttctcttagtggccctcagggcctctgtcacccagaggaccccacgttcttagagcaccaggattctaccatatggcagtgcacacggggaggaccccgcgttcttagagcaccaggattctaccatatggcagtgcacacggggaggggcagcctccaccgactacatccccatctttaggaacatgtgggctcagcattgcaacttttaaatgtgaaatcacagcctgttcctcttccctgccctcctccttccggtaacgactctgggtcttttctccaagggcacagctgtgtcaggttgctc

SEQ ID NO: 99549 - DNA, 1008 bp, Homo sapiens
ttgctgtgtggctgaggggcttgaggtcctagtagggagtagaaagtttcctagtaggattcacctacttttccagtgatatcactcgatcttagcatctgctagtaatgctgtagcttacatggacaaacagtgacaggtcccagggcggcaggaagtccgcagtacgcgtttgtgaacgtggtttctctcagttcacccagtgacccttcgctgagctcgagacccttcattgagctccaccttctgctctcaagtgggtctggagcctggggaacagctcgggagtacaggtgaaacttcgcgaattgcctgttccttctttctgaaaatgacaaattgcagaatacacagacacatgcacatgaaattttaataaagataaaaagcctaaaatatactctaactcttcaaaaaacatttttatgaaagaggaaaggaaggaggccctctttgtggctggaatgctggctctgagcagagtcagggtgacgcggcagggcgctggctttccagctgggtcagcggtcgtgaggctcaacacgagaggaggtggggtggctgctttggttgtaacattagcagggggaagacagctgcttagaagcatggtgggaagcagatgtggtgaagtgccgtactgttctgcttacaaagatggggatgtctaagatcgtgtttactacctgatagcctaaaacagtatcacttgagtcatggactaaaaggaaccttaaacattgtccagcccagcccaggtgtccatctctgttgcactgagacttgtaaggcgtccttgctgcttcgtggcagtgtgccttagctttccaagcaggggtctgaatagctttttccatgaaaattcaggggtctttctttgatacccttgtgacttgtcattcaggggatggcttccactgtttaaggctgaagcctaggtgatctcatagaacagggttcaccaaataaggcccatgggccaatttggccaccacctgttattgtaaa

SEQ ID NO: 99550 - DNA, 1714 bp, Homo sapiens
tatatcaacaattggttttatttttttctcttttgaatatgttggtgataattccgtgacagttggaagatggggttcattcttccggttcaggaatcactatgtatttccttcttgtgataaaaataaaattacgagaaggcaatgtgaggttttagtacatcatagcactttattttatgaaaacatgtagcagattttccacaaaaatgcttatttttaatccaaaagtatattgcttcataatggtattcagtgcacagcagagtaaaagaagttaattcatgatgtactggttaattttgcatggcttcttaaggccagcaaaatgctggcagttttctttatctttgtgaagaacaggcccttcctgtttggggaagttggcttttatgtcagctcttggccagtggtcacttccaagcctggtgtctccggccctgtagtctgtagtgccagactgtgctggcctggagagtgctggggcaggtggaggccagggaatggtcccatacagttatctcccctgccctggttacagacagcttcgagaaccagaggagaagagcatagggtcatggagcaggtgggctgaagccagggccacagggagcaatccgtgaccccccaaggtgggtgtgggggggggggggggcgtgtcaccttagggaactcaatgagtccgaagaacaatttgaaatgttgggaaaagagaagaggaatttgatgtcagccggggtgatccctgagatagaggcctgtctctgatggcatgagctctaagagggtcctggaggattggtacatcctagaacattccagttagccctcttttaggggaaactggcataggattgatgcagaaggcatttttgatgatgggaccaaaattcaagtctccttggtagcattctaggatcaactagatcctaggatctggtagattgtaggattctagtgggtagaggccaggggtgctgtgaaacatcctgcagtgcacaggatggtcccacaagagaggatgatccggcccagaatgtcagtgctgagcctgagaaactcatctaaggcctggtccacaacagtaatgtgactgttcactcgtgacaacttcagatggtaaatggacttaggatcgtattattttatttaaaagaaaaataaggagctggtttttcagccgggttcctttcccctatgcactggaatacccctggtaggtgtgagctgcatgcaattgtggggattcagcactgaaatctaggtgcttttgttttctccagcagcctcgtcttacagcgtgactgcaaagaaaaagacttttgttttgcaaaagaaaagcagctcggtgactccgtccacatcgccacagttgagtcagatggcagtggcagtcctttgccagtggaaggagttcctgctaaggggaggtgcaggaggtgagctgatacctgagtggggcccttgcctgttgggttctctactggaggacagtgggcacagcaaagattcccttacttgtacctggcagcccacacgcaatggggaaaagggagagtttgtctttattgccttgcttggccataggcaaaactgtttggaaatgagacatttcactgtgccagtgttttcattttctcttccattgtggcatcccggtcactgccaccctccctagaacctaggctgttgttgtacccagtcggaggactaa

SEQ ID NO: 99551 - DNA, 1026 bp, Homo sapiens
cttgggcttggagaaggtacaagaagttgcagattttggctgggtgcggtggctcatgcctgtaatcccagatctttgggaggccgaggcaggcagatcacttgaggtcaggggttcaagatcagcctggccaacatggtgaaaccctgactcaactaaaaatagaaaaattagctgggcttggtggcacgcacctgtaattccagctacttgggaggctgaggcatgaaaatcgcttgaacccaggaggcggaggttgcagtgagctgagatggcgccactgcactccagcctgggtgacagcaaggctgtctcaaaaaaaaaaaaaaagattttatatagtgtgacaggagccagaggtggggaaagagcagcctaaggtgagatggattaggggaggtttctgagtatgtcagtgttcctggagaggactgtataatttggcttggaggtgaggaataggagtggctttctgtgcagaatacattttgagagggaaggaggaggagttaagactagaagaaaaaattgagtgccagggcagagactcttgtctgccttgttcaccgtgggatcttcagcacctagtgcagtggtgggcatatggtatgtgttcagtgggttgatgctgataatgtgatgttgataaatatgtgtacatatagcatttgatgtttaaatcaacatgaaatggtcttagtgctctgtctctgtgatgtgatgtcaaaccaacatctcttgtaaagacttagattctagtcgagtgtttagatttactctggaacatgagagatctggccaggttcctgggatactcgtggagtggccttcccttctatttatcccccactcctgcccccaacaatattcacatctcaaggatgctcaaagttccttgaatctctttaagggccttctggaggagttgggggtctccaaggacccttacccactttgaccagaggagttccactattatttctttgcattattgactcttcctggtaagatgttttttgaggcagt

SEQ ID NO: 99552 - DNA, 1031 bp, Homo sapiens
attctcatcttccactggctgagagtaaaaagaaagaaaagcggtaaagacttctttttgtgcgtaggtggccccggtgttcacgctgaatacagatttttacacaataaaatcttaaatatctctacatggaacggaatccatttttcctgcctcgggaaggatttctgcgctctcgggtgaagttcccgaagcaaggaaccagttcccctctacctgtactcttgagaggaattctcaggtcatctgaaacacaagtatgggccaggacgacccattcgttcacgcggcccagagctctgcgaaacgggacacggcagtgcaacgggaacaaccggacaccgaggcccccgaaggctgaggccgcggcagaggcggcggcacggtgacgggcgcgactccggccttccggctttctaaggggcggccccgggacacctgagccccgcggggccgtgaacgctcagcacagctccgggccggaatcacgatccaccacaccgcgctggcgctgggaacggcgtcggtgacggaccgggggccggaagtgaaggacgggggaggaccgctgcttccggcgccgtaactgctgccatcttctccgcgctatggctgcgttcggccgtcaggtaagctcgagctgggcgcgcgggcttctccgggtcgcaggcgggcgggcagcgacgcagaggaaccgcggccgccgagtgtttcacggccaggtcgtggagccctcccggaggtccgtgcacgctgacctggttttggcatcctggacccgtggctctgctcaattattgtgggatatagagttgacattttttttttttgagacaaagtctcgctctgtctccaggctggagtgcaatggcgcgatctcggctcactgcaacctccgcctcccgggttcaagcaattctactgcttcagcctcccaagtagctgggattacaggcgcccgccaccatgcctggctaatttttgtatttttagtagagacggggtttcaccgtgttggccagtctggtctg

SEQ ID NO: 99553 - DNA, 1101 bp, Homo sapiens
ttttaggatgagcttgtcagttttgcaaaaaagccagctgagattctcataggaatcacattgaatctgtagctcactttggagagtattgtcatcttaacaatatttagtctcctgatctgtgaacgtggaaagttttctattcatttagatctttaatttctttcggtagtgttttgtaatttcagtgtacaagtcttgttgttcttttgttaagtctccattatttttatgtccagtttcttcttttttccaggtttatttttcatttgctagaatatattcgttgccagtttttccaggaaggattcatgggtactatacattcagtccttgtatgtattaaagtgtgtttatttttctctcatattttagtgatgatatgcctttctcctctcagaactttttagacctgtatctgttgtaatctagcattattttgaagtgaattttgctgacagcaaaacgtgatttatttttctttctagatgtaaaatctttgtctttcaaagttttcaccaggatgtctttaggggtttatgtttgtgtgtgttttctttattcttgcttgatacttggtaagactttgatctgaatatttaaagcttccgttctttggttccgttaattctttccttctccctcctcctgacactcattttaggtgtgcatgggcccccctggaggagcctgccctcttgtctccttggccctgcagctggacaggccgcaggcctcttcacctagagtgtcagggctcccgccctcccggaggcttctggagctctgccacatctcagcaggcccttcttttgctcctcaggaccacagcctgcttcccctcgtcttcttgctttccctcagtctcacttctggccttttgggccatagtgaccctcccgtcaaagggtcttcagaatttgtctcctttcacctctcacaggctggcacccaagttgcccccttctctcctgatgacggtgagaggcctggatgttgcccaggctccgatgattcttcctgctcccgccctggccccgatgccctcccgatgcccacttacgttgcctgcccagccccccgcctccctcacacctcctc

SEQ ID NO: 99554 - DNA, 1108 bp, Homo sapiens
caggtgacatggagcccaggaagtggccagagctcgggaggaaggcaaagaggggaagagggcatgcagtcttaggcttggggtcccaggaggcctagggaagccttgtagatacccaggtacagcatttctgggatcaggagccatgatcccaaggcctctaatacttcagatatggcagggaggccaggtggagagacctggaggagtgaggccacagagttggggggccatggccgagacttcggcttctatccagagtcagatgggagctgttggagggttgtcagcaggtgagtgccgtgctctgacttgggtgttaataggatcatggtagctggctgcaggtgtcctgggccaaggagcagggagacaggaggcagagaagagggcgctgggttggacctgggacgcctggggtggtgagaggtggtcgatgctggtcatgctgtgaagcagtctcagtgagttccaggcgaatgagcagattcgttttagggagtgcctgtgaagagcaaacgctcttttttggtgttgctgccagatccaaggattaatgtcgtgcttgctggtggccacgttgtgccccgagatgagatccggaagctgatggaaagccaagacatcttcaccgggactcagactgagctgattgctggaggccagctcctttcctgcctctcacctcagcctgctccagggtaagtcccttggtgggaggttgcaggtttactaaaagtccagacagatggtaggtgaatgaggaacaagtcagagagaaatgttcagcctattattcatagtaacattgaaaactcacatgtgttgagcacctgctctcttccacacacactgactgctgggttttctgtgctgcctggctgagtccttatcagcctgtatgggagggcaccatggtgttactgtctcactgtagggataaggaaacaggctgtggagagttccagaatgttgaggtagatttcagagaactgatggaatcataattttatcattttctttttttttttttttttttttttttttagacagagtctcgctgtgtcacccaggctggagtgcagtggtgcgatctcagctcattgct

SEQ ID NO: 99555 - DNA, 1060 bp, Homo sapiens
gaggggtgggaggtaacatccacagctgcgcagctggtgtagtgctgcctgtggggccagtatcctggtgccagatcaaggatggcacagttgccagtggcgtggctgagccccgagcctgagccccacagtcctccctccctccctccctgctggtgcccggcccctcactggggtgtctcacttgccctggggttgctgtgcctggggcggctctggacactgagtcctccccacccacagaagggctctttcctgggccagctgggcctgggaggagagggaaggcagagcagtgtgggtgtgagatgtcctggggaccttccccgatgacgtggggtagaagtcgggtcggacgcagcacagactcagtgctctgtccacgtgaaacacggcttaagccaaacgacaagcctttctttcagaatctcaagattcagaggtctgttggaagagccagggacggtaccaccttccctctgagcttaaagctgaaatcccaacccagcagcgaggaggcgaccaccggtgaggcggcccctgtgagcggctaccgggcatctgtctgggtgttctgcaccatcagtggcctcatcaccctcctgccggatgggaccatccacggcatcaaccacagcttcgcgctgacactgtttggttacggaaagacggagctcctgggcaaggtggggctgccctgggcgcctggctcccgttccctgggaggaagctgctgtgctctgcagtgcgggcttgcgtgtggcacaggcctcgcacccggcaagctctccagctcgctcctttacccaggaaggaccttgggtccagggagggaggtccctgctcatggctgccaagctccttcctctccacccttccccagcaaccaccgtcggagggagaggagcactgtgcttcgaagccctgagagatctggtctgactgatggaccagggtttacgacacaactgcgggggttcatttctcaccctagtagaaatactaaaaagtagctaagctgaattgtagttacgttaaatttaagttagttaaaaagcag

SEQ ID NO: 99556 - DNA, 1025 bp, Homo sapiens
cttttttaagaaagtaaggttttacaacatttacaatgtattctgaagctataattaagtgtcctgagctttgtctataggttggttctaaaagtagaaaaaactgcctcacactataatcatgtcattgttatttattatggcaataattagtgcatttggatgcttagagaaggagatgtaaacctgtaactaaaggtcccattcattgttgctgcttgtaggaaagctgcacactcgaaccccaaaccctatatgtaatagcttcctacacatctgcaggtttgcagagcctttgccttccagggtcctaggctgggtttgtgtgtgaatgtctctgaattttttggccgtatcagtttattcatacaaaagaataaaggcagtgttagtcatgaattgtaccagcagagtggatgcatttgaacccatcaccctaggaaatcaggggacctgtgcccttgtgcctcttccccactcttgcacctgcctgacccagagggaaccacctgcctgaaatttaggtttaccagtctcttatttaagaagtagtttaattacataggtgtgtttccctgaactacttatttagattatttcatgacaaaggaatcctcctgctgattgtcttccgtaacttgattttttccactcgtatatggctaagattcacccttgtgtgtagtttatttgttttcactgctgtaattagtggtatgaatataccagaatttaaaatctatcttcttgttaaagagtgtttgggtttcatttccttttttcctccctctctcccgcactccctccctttcttccctcccttttttctgcctgtctctttgccattgagaaccatattgtcccgaacattctggtgtcttcttatctgtttgcaaaaatttctctgaaatataaatctaagtgaaaagtgctgtatccatatagacaaatgtttcacttgaattgttttctaaagagattatattaatgtattaagagttcctgttgatccaaatcctttttga

SEQ ID NO: 99557 - DNA, 1032 bp, Homo sapiens
gctgggatctaccagagtctgctccttggttcacgtggtgagggtggagaagggtcttctcttgaaatcgaatggactgttgggaaggggtaacaaggaaccggaagattgagttacacaaggtgatacctgttttcaaagctgtcatagttccaaaaagtctgaattcaactttcttcctcctcattcactttgttggaaaaaaaaaccacatgcatatatgtatatgttatacgtacacatgtgtttataattttctgcatatctgtaggtacagtcatatacgtgcacgtacagtatgtgtgtaaaaatgcgtgcacacacccacttagcaactggggaatcagttgtgtcatcagcttaagtacttttgggtcccatggtttggtgaggggtacagacctcccagaagagcagtcactgccttatgtgaaaggggtagggaagaggaatgtggagctggggaaggagggcgggtgcagcaggaaggcctgacatgttagggagtggtgacagctgcagaagcagggcgagctctgagctggagcctgaagaataactcgaaggcaacgaggttggggatagggtgagggaaaagagcaagaatcactcaagacggagaaaactgctgtcaaaaggtgtggaggagagtttgaccaaatcgtatgtggtggggatgggggcggtagtgttaagggtcttggacttcataccctttgagtctttttaagaagcgcctcttcatatcctcccactccctcttcagctgtttccatgtcttggtaaatgacagatataaaagcccggcttttctcactgtcccactcccacccatgtcctgttagtcaaggagctctgacttttacttttgaaagtatctccaaatctccgatacgtcctccattcccattgccagtaccttaactcagaccttcatcatctctaggctagattgattgtccctgttcaccagcccatcatccccagtacaccaaagtcattttcttacatgcagagccactgtcccatgtt

SEQ ID NO: 99558 - DNA, 1050 bp, Homo sapiens
aagttcctcatccctaaatgaagagaggaactttgttttgaagattacttggtcgtacatttcctcgtgatgagcactaagtaaatgtttctacaattgtcagcctttcttcagagcgtcagggggttactcggttcttcctgggaccatcagtctcactaggtctgtctcaatggacagggatctgggaggactgggcttggagtctgacacagtctcaaattccagcgatcaggagagctcagggagatagctgggcaggctctgatggaaacactgtcccagggagggctgcaggaagcaagcaggtctcgtcaccctccatagcatgcccttaccctgtgagggcagagagggcagtgcacctgcagccctaaggtcagcacttgacactgcctgcgtggtcatgcaaatcactgttgatcagaggtaatccaggaaacattttatttccttcttttagaacaaactcacgatgttggacattgcatcaaatagaatcaaaaagattgaaaatatcagccatctaacagagctgcaagagttctgggtaagtttaatacacgctggggttgatgacactttgactaaactggtctcactgattaaaatgtcttatgaatgaatacaagaatctcctgtaagccttcatgctgagtgactccgcacatcatgagatttggggtgggcgctcttgtagacttgtattgggtgttgtctgtgctcctcagcgtgagccacagatcagcagcattgacatagcttgttagaaatgcaaaatcttgggccccaccatagcccagatgaaaactgagtcaaaatctttgctttacaagactccgggtgattgcagtacacacaaaggttggagaagccctgatctaggtatgggtagaacctacaattgtcatttgaccaaatggtttgcaaacctcagcagagaggcagacgcattccctacagatatattccagcacaacagaaggaaatgttggatgggtttctgcagttagtcatcttggaatttgccttgtatttgtcttgtcacag

SEQ ID NO: 99559 - DNA, 1153 bp, Homo sapiens
ctgtctcaaaaaaaaaaaaaatgcaagagaactcttcctgccaaaggcaggtccctccaactgggcatggcagggccaagatggtaaaatgtagcctgcaactcagacctctgaatcccacctgctcacgatttgtgtccctgcacttggtattgggtgaaagcagcagctgggacttccttgtggagagagccatagaggtaatttacagaagagttgagagttttaagtagagcggcctctgtctgctgtgtcacagtgatggcgcagagtgcagccttgggaatgatggctgagaactggtttgtagaaagtgcagcccaccctgctttgacacttgcctatggacaagtgtagcaggcaggtggccagaactgctttgtccttcctctgctgacctgaatgtggacttggccccgtcatagtgactggcccagggttggctatggacaggtaacttgtacttgggatgcagctgaaggtggccaggatgcaccaagaggccatggaaggtcccatgaggtgccagggaagacccacacctgctcgccatcttctgagtgggaaggaggagggtggctagtggaccccaccagagtcgagggctgggctgtttggttctaaaggcttttctgctgtgtgtgtccccagatgaacgacaatctccttgagagctggagcgacctcgacgagctgaagggagccaggagcctggagacagtgtacctggagcggaaccccttgcagaaggacccccagtaccggcggaaggtcatgctcgccctcccctccgtgcggcagatcgatgccacgttcgtcaggttctgagtccttcttggctcctcatgtggtccctctcctcggaagaactgcccagccacgggtttttaacccacctgttgctcctgaggtcgtcactatatcaacagtcacaaacccaatggcaataaaggcactgacgatagctggcgcgcgcgacgtcacacaccattttcagatgccgttgcaattaaatcttgccacactgtcctcctgggtgattgttgacagttattgtagccacagagagaacataagacacgttgcgttcattcgctagaaatccctgtttccttctctcagaaggcagtcacagtccctacctgagtcgtgt

SEQ ID NO: 99560 - DNA, 1112 bp, Homo sapiens
ataaacgtccttgactttataaaagccaaacgtttgccctcttcctttcccacctccctcctgccagtttcccttggtccagacagtcctgtttgtggagtgcaatcagcctcctccagctgccagagcgcctcagcacaggtgtcagggtgcaaggaagacctggcaatggacagcaggaggcaggttcctggagctggggggtgacctgagaggcagagggtgacgggttctcaggcagtcctgattttacctgccgtggggtctgaaagcaccaagggtccctgcccctacctccactgccagaccctcagcctgaggtctggtgagtggagcctggaggcaaggtggtaggcaccatctgggtcccctgtggccgtcacagtgtctgctgtgattgagatgcgcacaggttgggggaggtagggccttacgcttgtcctcagtgggggcagtttgccttagatgacagctgggctcttcttcacaccacctgcagcccctccctgcccctgccctagctgctgtgtgttcagttgccttctttctacctcagccggcgtggagtggtctctgtgcagttagtgccaccccacacacccgtctcttgattgagatgtttctggtggttatgggtttcccgtggagctgggggtgggcgccgtgtacctaagctggaggctggcgctctccctcagcacaggtgggtcagtggccagcaggcccatctggagtgggagtgggcacttccaccccgcccacaggccatccggctgtgcaggccagcccctaggagcaggtcccgggtgactggcagttttcacggtctagggccgagacgatggcatggggcctagagcatgaggtagagcagaatgcagaccacgccgctggatgccgagagaccctgctctccgagggaggcatctgtgtcatgctgtgagggctgaggacggggccctagtctctggttttctggtcttaacatccttatctgtgtccgccacggaggtgactgagctgctagcgagttgtcctgtcccaggtacttgagttttggaaaagctgactcacgcccatccatctcacagcccttccctggggacagtcgc

SEQ ID NO: 99561 - DNA, 1068 bp, Homo sapiens
ggctgtttgccttgtgtttcgtggagccccattgctgagcttacaacgtcactctgctctcagctcccacggcctaaccatgaccatcctccctgcaggcattggttcctgtcaccattgaagtagaggtgccctttgaccttcaccgttacgttattgggcagaaaggaagtgggatccgcaagatgatggatgagtttgaggtagacccctttcccgggaggccatgtcacaggagtggcctgtcgcatcctctcccgagtgccagtgtcctttctcaacttcctgttgactctgcctcctcctgctcggactgggcactgacttcccttcacggcgggtggccttccctctcaccacttctgggtcccagggccaatggactctttcctgttctctggggtcctgaacgtcaagtcagccccctcttcacgtaggtgaacatacatgtcccggcacctgagctgcagtctgacatcatcgccatcacgggcctcgctgcaaatttggaccgggccaaggctggactgctggagcgtgtgaaggagctacaggccgagcaggaggaccgggtgagcaggaggtggccggggcactgcccagagccatggtgctcagctttgggcacatgtcagaatctagggaagttcttcaggatcccagcatcccagcgacatctggctggaggtgagatgcaggcagtgccaggacgcagtcagcatccaggggtcttgctgtggaactagccaagagcatggcacctttctctttttcataaaaaagtgacaaagttggacttccgtgtaaatttgcagtttctctcaaaaccaaatcagagtggtacctcagacctacaagaaaggtcaaggttgcgagaggcccccaagcatgtgctatgcagtgaggacgagcatcggggacccccactaacctctagcacagggtggtcaaagggcgaatgacttcctggtaagcagggatgaaacccccccaacctctggcaaggctgacgtttgaaggattgtatgagcggagcgctgcagacgcccagcctctggcagggctgac

SEQ ID NO: 99562 - DNA, 1032 bp, Homo sapiens
tgtctcccctagacctctcaccccccttcccactgcctctcctgggtggggctgcgtgctggccgccttccctgatgagccctgcctcacagtcaagcctcacttgtgcagtgggtctgccctgtgttcctcccatgaactaactcatctgatctcactgaagcctctgctgtagttagttgctgttagcttcatcttcaaggtgaagaagggagacacagagctcacggcctcccggcaaagccttcattgccgcccccccccccccccccaaggtctgggagccctctttgaggctgctgtggggacgtcctatctgctctccctgaccagaccaagacctcctgaaggacaggagtggttttccctcccttttaccacccagcacccagcaggtgcctcacagacatatgcattctgaacaaggtgtggggtctcttccagcagctgtcagctgtcccttttcccctttctctctagttcacagtacagagccagttgtccaggagaatggggacgaagctggggaggggagagaggctaaagattgtgaccccggctctccaaggaggtgtgacatcatcatcatctctggccggaaagaaaagtgtgaggctgccaaggaagctctggaggtatgtgtccatgtgcccccctccaccccccgccaaggcccagtcagcaggcacctggggagacgcgtggcctggatgggatggacggttgcccaagcggcagtggcagtggaggtagccctcttgctcctaccgtgtgcgcacgggctgtgcttctcggctggacacagagtttggggaggccacttcccttcaccaaggctcggggttctatagcccctttctgggacagctgcatgggatccggcctctcaggcccacggtgggtgcgggggctgtggaagggtctcagctgcagggggatgaatgtgacctccagttgcaacgtctccccccgcgtgagtggggttatcaggcctagctcaccttgtgtgcagtcagtgtcgagtgccacctg

SEQ ID NO: 99563 - DNA, 1204 bp, Homo sapiens
cttgagcctggggagtggctggttttgtggaggctgatctgtagcactcgtgggaagaaagggagcctggcccagatttgtgtgtgcttggtctggaagcaggtagaagagtgggagcatggtgcacacctcttgggcagcttgcttcctgctctgctgggcacaccccacgctccccaggacgtgcactccgccaacatatcgtccggcgcgttgctcccacctccccctgtgcagatcaaaaatggcttggagaagtttggtcagtgcttgtaagtggcaggaccagggttctaagcctgtgtgttcatcccaccagcatctggttgttgtggaagagaagtaggtgtgcagtctgggtattcatctgtttattcagtgaggtgtgctagccccattttgggggtattggtgcaacatcaggacactggtgacaatgtaaggggagcccgagcttgctgtcctacagaccctcttgtcttcctcactgtggtccaggcacgtggtgtcaggctaacacagtgggattggtttctgcagcaaaccaagagtttcactgttgacatccgcgccaagccagaataccacaaattcctcatcggcaaggggggcggcaaaattcgcaaggtgcgcgacagcactggagcacgtgtcatcttccctgcggctgaggacaaggaccaggacctgatcaccatcattggaaaggaggacgccgtccgagaggcacagaaggagctggaggccttgatccaaaacctggtagggagcgggcctcggcggccgactctgctggggccgtgatggggtggcttatcttccatctcttcttaacactgcaggataatgtggtggaagactccatgctggtggaccccaagcaccaccgccacttcgtcatccgcagaggccaggtcttgcgggagattgctgaagagtatggcggggtgatggtcagcttcccacgctctggcacacagagcgacaaagtcaccctcaagggcgccaaggactgtgtggaggcagccaagaaacgcattcaggagatcattgaggacctggtaggcacttgggtgctcggggaggggttctcaccccccagtggccactcaccgaagccgtgtatgagtgttcgctccaccctgtagggaggtgactccctcatacagccctggaaggcttcagaaggggctttctggtgctc

SEQ ID NO: 99564 - DNA, 1294 bp, Homo sapiens
aacaggtttagaaagtgtagtgagtagtggatgagaaggccacaggcagccatgtatttccgtgggcttcaccttagctgatggctgccctgggagaggcgatggtgaaggactccagcactgtgagctgctgtcacatcactgccgtgagtgcagaattgcccagagcgtaggggtccgtgctgtctccatgtgtgttctgagccccttccttaaccagctctgatcctggcatgggacatgaactctctcttagccaaaaagtagacttgcatcgattgactgtaatttgcaacgtaagttagttgttggacaaatgatctatctcacttaccctcatgacaaacctctgaaggtttgtttgcaaataccagtgctctgtcgtgttcatgctacccttaggggtagaagggatactgtattttactctctagcacaggtggtgaatcgggctgtgttttttgtctttaaggtggaaaatagctattcaatttctgttccgatcttcaaacagtttcacaagaatatcattgggaaaggaggcgcaaacattaaaaaggtgataacttgtccgctgcatcttgcttcttcttgccttgtcctctgtagccctgcaccattttggttttagactaggagggactcttccttacttctagccctgtgctcaactgtgtctcaactctgggagagctctagtcagcttctcatggtgatctctctccctgtagattcgtgaagaaagcaacaccaaaatcgaccttccagcagagaatagcaattcagagaccattatcatcacaggcaagcgagccaactgcgaagctgcccggagcaggattctgtctattcagaaagacctggtaatgggagatgttttctaatggagatcctccagtaaaatctctaacagcctctaagattgagcctggggttgagtcacgcagggtcattgggccagcgcaggctgatgtggaagattgcacctttcaatccaggctactgatgagttggtcagcagttttctgcctttgtctctcacgatacttacttacctggaccctgcagcagtaacatttgacgtgggcacttgtcttattagacattttcttcttgttacctgaaaatcttatctgaaggtatttacggtattttctttcctttaaaaaaaattgacatgcagtaaattgtacatatttacagtgtacaatgtaatagttttgacgtgtgtatacatccatggaatcattcccaccatcaccccaaaaatgtcccatgccattttgtattacag

SEQ ID NO: 99565 - DNA, 1059 bp, Homo sapiens
ttggcagctgtgctgtggcctgtgcaatggtgagctctctggtgtcagtcttatgttttgtgggcattttacgtgacagcgacgagagtctgtaggcacaaagtgacctttttgcgcactacttgaaccacacatacaccataaacttgcttttacggttttgttttggttttggttaactgtagcgtttgtttaggcctgacacggtggctcttgcctgtaatcccagcattttgggagaccaaggcaggaggatcacttgagcccaggagttcgagatgagcctgggcaacatagtgagacccctgtctctacaaaaaagaaaaatttagccaggcctgtggtccccgctgctctggaggctgaggcaggaatatcacttgagcccaggaagtcaaggctgcagtgagctgtgattgtatcgtgccactgcattttagcctgggtgacagagcaagaccctgtctcaaaacacatatatatggaagtacagtagtgtaaatctaacattaatttctggtttctgcccccgagaaattgcagaatgtagcttagtcagtcatgtctgttctgttttcttctcatgcagttcctaactcttgtcttctttcgtaatctaaaaaaacctgctgcccagctcccatgtcctctgcttctcttgtcttgtgttgcttcacctggcacagctgcatgtccatgttcccccctcagtgcatcgcctcgttgctgcctctgcgtgtgcatgtgtttgggatggacgcacaaaaagccctcctcgtggtccttccagcaagctgggcttccctttactgcacagtgggcaagattcctgccttgtttcctgatgatacggcttctccagagtttggggggcctggaactcttaacttgggggtactgggttctatccagagaggttgacagcaggagggtttgcaacagcacttgtcttgcagacacagtgaagtgctcagtgtgaatctgagccaacagtagatggggtctctgggcagcagcatgggccccacaaggctcttaggcgtcagtgagtgcttttgt

SEQ ID NO: 99566 - DNA, 1407 bp, Homo sapiens
ttgtctatgtcaagcaagttactttaccaccttggtacagctatacgagttttaaaattccatccgtgctctgtctcattctttatgcaactcaagaggaccaggccttgtaaaagttcagatggtggaggagcatgtcgcatgtcgcatgctttatgttagtggcttctgtggggcaaacggtgtccttagtgagaggcaggattattcggccacagtatttagtttcctgactatggctccctaaccctccctttcaactttgtttgatggctgtggatatgtccctccctccctcacatctatgtgaagcagtttgggatcagaagccgctccgaagagagctcccactgggagctcaggggctgcagctgtgccattctgttttagctatctctttggttttggtgtggtaggttcacatcgagttcacagagggcgaagacaagatcaccctggagggccctacagaggatgtcaatgtggcccaggaacagatagaaggcatggtcaaagatttggtaaggtaccccttggaatgttgtgtgtgctggtgacaagggaggctctgagttgggcatgggcggtcatctctcgatgacatcccacatgtccgggcacagacacccagggcatcctagctgggtgagtaataggttctgaaacaaccagaagctggtcgaagtcctggaataatcgtgggtggaggaaacttcatcttgaagaaggcatctttcaggggagatgcaggggcagtctccaacaattcctgacagctgagtggtcagaaaaggcaaccgtggagactgctgggttttggttcagctcattggccaagtaaccaggcgcatccatggacctctgtgctcctcctgcagattaaccggatggactatgtggagatcaacatcgaccacaagttccacaggcacctcattgggaagagcggtgccaacagtgagtgaggctgtctgttgcggtggggccagtgtgccctgagacccttgtggggggtgtcagctgtgagaactgtgacgtccgtgcagacagtccaggcccattgctgcctgtaatgggagttacagactttacatcctcctgcctgctggaagaggccacttttccttttccctttggtgcagtggttggattagagctgcttggccagtgggtgaattgtcacttttggaaatccatctaagccctccccaaataacccacagaggccatgttgaaggcatgcccaagggcagcattctctatatttccgtcagacctgctaggttagccaatcagtgttggtagtactcatgccttctgaacgtggaaactgctgatctggaactcactgaagagtaaaaacattctagatttgtgcccaagtaaaacaacatggggagggatact

SEQ ID NO: 99567 - DNA, 2490 bp, Homo sapiens
caaagatggtgtttctgccagaatgtcttggaaaaatatgctccttcagaacctacaaatattcttgttttcttttattctcttcttgctataggcctcagcaactgttgccattcccaaagaacaccatcgctttgttattggcaaaaatggagagaaactgcaagacttggagctaaaaactgcaaccaaaatccagatcccacgcccagatgaccccagcaatcagatcaagatcactggcaccaaagagggcatcgagaaagctcgccatgaagtcttactcatctctgccgagcaggtgaggcctgtgtgagtgcctcgtgcccctgcctacctgcttgtgcagacctcactccctcatgggttgccgtgtccagtgtggacttcaaggcataatgtggtgggggtggagggcttgactccaactctaaaaagccctgtctgtccccagtttgttttcaaaggcctgttctcatcagatcatcccttcctttccaggacaaacgtgctgtggagaggctagaagtagaaaaggcattccaccccttcatcgctgggccgtataatagactggttggcgagatcatgcaggagacaggcacgcgcatcaacatccccccacccagcgtgaaccggacagagattgtcttcactggagagaaggaacagttggctcaggctgtggctcgcatcaagaagatttatgaggagaaggtacacgatttagaggaggcaaatccccatgggcaggaatagaaatgaggatttgggtctggagattcagttaaggcctggttctgccccttatctttttgtccttgatgaagatgcttattgtctctacacttgagtgacccgggtgagatcggtgcccgcccccccttgctgttgagcatctgcctggcagttgtccttgccgtcctgggcctctgactgtgctgacaggctgccagctgggctgccccgggtcagatgcacatcccggacttgttcacgtcttagattaagctgttagctcagcttagtgaactttgaggtctgaaacgtgttccttaattgagggaaaggattgggtgttttgcagtgttcaaggacgaagttatcagccggcgggtgactagactgaggggaaaaatccagtccttgaacagtgaagtttctggggattggctagtcctgatcacttgttgttcacttcttgggatcagcatctatagtctgggccgctttggcttgctttctgcagcagtggccatgcccacctgcccgcttcccacacctttccctttgactgccccttatggtgctcttatttagaaaaagaagactacaaccattgcagtggaagtgaagaaatcccaacacaagtatgtcattgggcccaagggcaattcattgcaggagatccttgagagaactggagtttccgttgagatcccaccctcagacagcatctctgagactgtaatacttcgaggcgaacctgaaaagttaggtcaggcgttgactgaagtctatgccaaggtaactgcctccgagcatgaagtgtgtctcctttgagtggagtccgcggggccttcatggatgagctctcgatttgtaaatcctggggcctggacacagtgcaggtgcccaggtttggggagagcgtgcctctgagccccaggtgagcagcctggctttcactgtgacacgaccttgagctctgcaaacccatggctgttctcccattttcttaggccaatagcttcaccgtctcctctgtcgccgccccttcctggcttcaccgtttcatcattggcaagaaagggcagaacctggccaaaatcactcagcagatgccaaaggtaaggacacgtttttcacctgttgtattgaatttgtcttgttttctgtctttctgtttctgatattgctttgttgacctttgtactgtggatgcccttgaaaactggtgtatttttctgaattaactggcctgtttgacatggtcaacttccgtgttagcttaaagaacagcagaataaatgtctgtagatgtctgtaccatccttctggcctttaaccagagaggattgtatgttcttaggtttcataagtatcttaagaaacatgtcatttagtaattatggtgaaataacttcatgatactttggcgggccgggtgcggtggctcatgaggtcaggagatcgagaccatcctggctaacatggtgaaaccccgactctactaaaaatacaaaaaattagccgggcttggtggcgggcacctgtggtcccagctgcttgggaggctgaggcaggagaatggcgtgaacccgggaggtggagcttgcagtgagccgagatggcaccactgcattccagccttggcgacagagcgagactctgtctcaaaaaaaaaaaaaaaatactttgaagagcagaacttgtatacaaattgtattaagtgtgaatttaaagcgttctcagtttaccaaaggagat

SEQ ID NO: 99568 - DNA, 1032 bp, Homo sapiens
catgagccaccgcgcccggccagttttttaaatttttaaaaattaattgctgttctttcttaacctatccttccaagcgtagaatctgatggaagagtttctgaatgtgcaagattgagaatgctttgagtagctaaagggagaaggccttcaatttaaatcatcccccaccccagagatgtttctgtcgaccacttctctcatgtccaccctgtatgctagcactcagtaggacaggcacgtggtcgttttgcaggcagtgtttgtcagatgaatgggtcctgttttctgttctctattcattatcctgctttctcgaagaggttaaccagtttcctggttttctttggcttcagtagcccttctctctgctacctgaatttgagatgttagtgagtttcaaaacttttatataaattcatatcatctggtcatggtggaaaattactatctcgctgccagtgtcttccctgaattttaggctcataaacagttgcatcccaatccttccattttcacctgtctgctatcttgttaatggttttgttaaatgtaccactgtctacttggtgactgtggtctcacaccagggtagttgatccctcttgcttccaccttgtccctcctcagttcttctccataaagcaacgggagggaccctgcaccatcaagcagaatgcctcctgctgaaaagcctgtgttgacttttactacagggtgggatgggtgatcctcttcactgtccccctctggtgtgtgcaccaggctccgcccccatccacctcctccgctttcctgcctgtacacccttagttccctcacctcttaacatggatagctgcctcgtgcttcaggacggtgtttcctggccgtccccagggtccacctcccactttctctcaaactctcttgcccctgttgatttcatcacagcacttgctagctgcctcattcatttgtgcagctgatgtggttctctccttaggatgtcagcctcttgaccttggccctttctccttgtctttcggctgc

SEQ ID NO: 99569 - DNA, 1100 bp, Homo sapiens
agtcttggctcactgcaacctctgcctcccgggttcaagcgattgttctgcctcagcctcccgagtagctgggattacaggcatgcaccacccacacctggctaatttgtattattagtagagacagggtttctccatgttggtcaggctggtctcgaactcccgacctcaggtgatctgcctgcctcggcctcccaaagtgctgggattacaggtgtgagccaccacgcccggcctccacggcaatcatttttaaccttgtatgttacagtggaaaatcagagtttgcttcaaaggcaattctcacaggtggtgctgggtaggaccattgttttgcaaatgcaggggtctgctctgtgcctggcattgccatagttgtgatttttttaagtgtgttattagactctagaggacttaaaaattgacgtagcaaggcttgctttcaagggactcaccccgttaggggagtggggctcacaatgtctgagctgatgtttaccaaggaggccatgtggatgggggtaggttcgctgtcagagactgggagtctctggcctcctctagctctcacactcagggtgctgggcctggtgacctcctggggccttttcctatcactatgaattagaagagaggggtggggggagttgtccttggagcatttgatggttcttgtttgtctgtttttaagcactaaaacccttaaaagtgtttttcatgtaatgctaaaagtagtgcttccttttaatctgtgttggctggtccagttgccactctaaattcagaagaggagagcgaccctccaacctacaaggatgccttccctccacttcctgagaaagctgcttgcctggaaagtgcccaggaaccctctggagcctgggggaacaagatccgacccatcaaggcttctgtcatcactcaggtagaaacaccattctttcttttaaaaattttatcatgtaacatgtctatgtaaatttttaaattttttttcttttttttttttttgagacagagtcccgctctgtcgcccaggctggagtgcagtggtgcgatctcggctcactgcacgctccgcctcccgggttcacgccatt

SEQ ID NO: 99570 - DNA, 1034 bp, Homo sapiens
atagacggagaattcttgaagacggtagctcttggtcaccataagcgctgcagagaccccgaggtccacattctgttgtaggtcagagcccagcacaacaacccttcttctggttcagccgcccagcggttatgtggggtacgggaaagatgatccagccatgcaggagagcaccagtggttctgtgaggattttacttcaaaatagttaagtttagaagtttggcacttaaaagatcactccctcaggtccctggaatagttgtcctctgcaagttggagctggttcatgttttgttttaatatgttttgtttcaagctaacgttttttttttcttccaagaaacttgcctgagtattggtgttagtaaccaaagcataaatatcttgaccttttctgattttgaggtaaaaagatctgagttgtaaaatgtagataagtaacttttctctggtttcctctctctcctctcccacttcccatcccataccagcaaaagctggcaggctgacagaggcggcctcaggacggaccttctggctactgaccgttttgctggtaagtttgaccctgtctgaagacttcctgtccctgggctgtgtgtggacctgggggcgcagggatgcgtattttcttagtcctgtgtgtaccttctttctttatatcacaccttcaagtttctcgtggttcgtcagagatgtctccatagcttcacctcccagcaggaaccatctatagacgtgtgtcccttagatgtgtcatctggcttccgtctgtttttaatcttttatttcttaaatgtgaattatgtttattcagtattatctgaattggggtcttgcttctctttaggattgcaggccttaacttttcttcaacttggggagaggtcttaattatgttataaaaattatgcaaaattcactccttattacttggccttgttgtgcgagtaattgatgcgtaattgtgtaaagaaaatgggttcttcctcactgtagtagtttggagctcacctggaactggggagaggg

SEQ ID NO: 99571 - DNA, 1050 bp, Homo sapiens
gcatagtggcgcacacctgtagtccagctacttgggaggctgaggtgggagaatcgcttgaacctgggaggcagaggttgcagtgagctgcgattgtgctgctgcactccagcctgggcaacagagtaagaccctgtctcagaaaaaaaaaaaaaaaagaaagaaagaaataggccgggcgcggtggcttatgcctgtaattccagcactttgggagacaggcgggtggatcacggtgtcagaagtttgagaccagcctggccaacaatgtgaaaccctgtgtctactaagaatacaaaaatcagccaggtgtggtggcgcacgcctgtagtcccagctactcgggaggctgaggcaagagaatcgcttgaacccaggaggcggaggtttcggtgagccaagatcacgccactgcactccagcctgggcagtagagtgagactctgtctcaaaacaacaacaacaaactgcctcttcttgttcactgacactgggtgtatggttaaagcccccttaactgacctgttttgaggcacagaggtttatttaatcaccagtcatttgatacagggtgaagacctatttgaaatgggactggctggattctacatgttttctttttttttttttttggaaacagggtcttgctgtgttgtccaggctggagtgcagtggtgccatcatggctcactgctcaacccctggggctcaggtgatcctcccacctcagcttccacactgagtaactggcactacaggtgcatactaccatgcctggctaatttttatttttatttttattttttattttttggtagagacagggtttcaccattgtaaacccaggaaatctgacaagtctcagttaatttagaaagcttactttgccaagggtgaggacgcgcacccgtgacccagcctcaggaggtcctgatgacgtgtgcccaaggtgggcagagcacagtctggctttatacattgtagggagacatgagacatcagtcagcatatacaggacgaacattggttcggtctggagaggcaggatgg

SEQ ID NO: 99572 - DNA, 1889 bp, Homo sapiens
tccgcctcttgggttcaagcatttctcctgcctcagcctcccgagtagctgggattacaggcatgtgccgccacgcccggctaattttgtatttttagtagagacggggttcctccatgttggtcaggctggtctcgaactcccgacctcaggtaatccacccaccttggcctttcaaggtgctgggattacaggcgtaaaccactgtacccggcctcttctgatgtttatggttctaaaacagagctgttactcttgttctgctcagatgagcttgatttccatccctgtcccctgtcccttctttccttaccccaacattttcttcttgtttctttctgaaaatataaacagacatacacatttctatttctgactctttcttacagaaaggtagcataccctgcacctgctggcctccgttgctcttttcattaactgtgtaccccgaagactatgcatagtagtgtatggaggctttccttctaccttttatgctatgtgttgcttcactgcatggacacaaagtggtttcttcagcccatctgcatattgaagttgtgttactttccagattttttttttttagctttttatgtctcgctatctctgctgttgcccttctgaagtccattcatcccacacgtgcagtagctggagtttcctttttatctaatacttgagtttcccactgccatactcaccccacgttgatgcctaatgtcttcttgaggtttcctttagagggcactccttacctttggtgccagccattctgctattctgatcctacttcccctcattactgatcttccttctctgccatcctgaccccttcctgtccttggatgcctttggagttgcagagaagctgtctttatcttcctggtgtgatacttgttttctaatagtaggaaatagtgttttcttgttctgcccagttttctctctttatagatgagacatctaagttcctgctccctggatgtatgtcagtttttctcttacatggtaatgttctgatctgagtccggtatctccattgtctaactttgcatagaggaacatacctgtgctttggtggggacgttgtgcttgtattcgtgcagtttaatgttgaattagctctttgtggagacagttatataagtaagcgtttctagggagtctttatatccaaaagtgaggcttaatctctgaagagtagactgataggaagagagtacctggagagatgatgcagtcccaccttctcatgagacaaaggaggaagcaggccaagtgaagagggtgatgtgccaagcagtgtcagcagcagatcgcacattggagtgccacatgctctccacccttgagaggagaaaacctgaagacttgggttttcctgatgtgtgttttcttgtttgtagaaaagtattgtttctatttggataggactgagcccaagattaatctttcagattcttaagtattttccacccatggcgttagctagctttgtatccataacagagttctttataaacatgagctaagctaattctagctcatagaactttcctatgtaaattgtaggaaggaaaaaatcatcaagtgtaaattgttgccctgggtcaaacttcaaattattttgtttcttgtagtttaatgagatttatagtgaggagatggaagggatttttaaattgcaggactaaaggggaatggcccttcctacagccattctgttcccatccccttcccaggaacaccattacagttggggtgggggcctgcgtgggcttcaagccctggtgaggagtatgtgtgtgtgcaggagctgccatgaaacacctttcagcggctcagggtggcagactagtgttaccatggcagttagagacatcagt

SEQ ID NO: 99573 - DNA, 1040 bp, Homo sapiens
gtttcttttccttttttaaaccttgttgggaaaacttcaaaatataccacaaaataaaagagaatagaagagaatcatatgcctgtcacccagctttcacagttgtcagcattttactatagccctgcccactcccaatattttatatttttcatttgagtattttaaagcaaatctcagacttttagtcacctctaaatactttagcatgtattttttaggaaacggctttaaaaaacataaccacaataccttcatcatagctaacaccaccaaccacgctcattaatattatctaatatttattctgtgtttggttttctccagatgtcataaaaagcctttttacactttgtttgcttgaattgaaatccaaagaaggtctccacattgcatttggtttaagcctcttagctctttgaaaatctatagcttgcagcttcttttcccttttttagtttttgtttttaatgccatttatttatgaaggcaatagggttgtttgtgctgtggaacgtcccaggtttgggatttggttgactgtgttgtggcactatctaatgtgtttttctaatcctcatacttcctgtagctaggtcaggatgcttaattggtttcaggctgtttgttgttgggggggtggggggcagtggtttcaaggatattccacagactgtgctctgtgttgcacgttgagcagccaggttacatgatgtcgggtgcggtgtcagtaggttgaattatagagttctttatcaaccagttctctactgggtttaacggccatttgcttgttgcttgtacccgttatttagttggtgtattactttcctattgctgctgtaccaaattacaacactgtggctgaaatcagtctcactggtctagagtctgggtatctgggtgccatcaggcagctctggagagtatctgcttcctggccttttccagctcgtggcagccattttttggctatggccccttcctccatcattagagcacatgatctaaaggacacttgtgattgtggttacgtccca

SEQ ID NO: 99574 - DNA, 1056 bp, Homo sapiens
aattttctagcctggttttatgtttaggtgaatttttaggagaatccttgttagagttaaaaaaatatcctactgggatgttgtgttactttcccagggctgccgtaacaaattaccacacatttggtggcttacaacaggaatgtattctctcgcagttttggagactggaaatctgaaatctggcagggccacactccctctgggggataggagagagattgttctttgcttcttcgtcttccagctcctgccccacagtccttggcttgcagctgcatggttcccacccctgcctccctcttcacgtggctttctcgtctgtcacgggtggcatttagaacccacccagataatccaggatcatctcctcatcttagtatctttcacttaatgtcatctgaaaagaccccttttccaagaaaagtaaaacaaatttcagggattgggattccctatctttgggtggccatttttcagcctatcacagatgttatttggagtgtgattgggggtgtagatgaacttggaatagaacagacatcttttgtgatgaatctcctggctaagtcttggcatcatctccatgattcaggcttctcgtgtatatgtgtgtgtgtaaaatttttgttttgccaacttgccaagcttgccttcactgttactagagcttcattataatagagaggttttctaaacaggtcatctgcagacagtggtatttgtctccttgcttcattctgtctctttagatggcctattggacagtctttgacaatagtaacatcttggtcattctgttgcttattttaatactatactattagctttttagtaaatatgttactttggggaaatattgttcatatagccatttgctgatgttaaactccatagaaagtaaataatacatgctgaatttcatcagttttttgggcatttttgaaatggtcgtcggtcagccacgtatatgtttatttgtcctttttttctttgagacagagttttgctctgtcgcccaggctggagtgcagtggtgcaatctcggctcactgc

SEQ ID NO: 99575 - DNA, 1025 bp, Homo sapiens
gtgcctggctaatttttattttttttgtcaaaatggaggtttgctatgttgcccaggctggtcttgtactcctggactcaagtccttctgcttcagcctcccaaagtgcaaagtgctgggattacaggtgtgaaccacctaacctggcctctagtttgtttgtttgacacagggtcttgctcagtcactagttggagtacagtgacactatcatagctcactgcagtctcgaactcctgggctcaaatgatccttttgcctccgcctcctgagtagctgggaagcatactacaggcactgtacctggctaattaaattttttttttttttttgtagagatgggagttgtggggggtctcactctgttttgctatattgcccaagctgatcttgaacttccgacctcaagcagtcctcccacctcggcctcccaaagtgttgggattacaggtgtgagccactgtgcctggccctcggcctcttttaccatttttgaaattgaggttttgaaacaagtgacttgctcagaaacagttttaccccttagggcttccttttcaatattataagatgtatggtttctgatttatttattagaataggaaactttttgccttaaatctttttcttgaaaaattaaaaaaaaaaacaaaacgaaaggaaaggatggccctttgggatcttttctgcctgtctgctgtaaccattcgacagttgagaaccatgttgcttggtgtcttgtagcttgtaaatagaagactgaagtgtgtgtgagtagaaccttaaaattcacttttcctttgctttgtcttctttatgttggagtttgcttactcctgagtgtatattattagatgattacaggtgtgtagtattcaccccagtatttgctggctagtgtgaacaaaatgaaatacactgcatcatccgaatgtgttttattttgtagcaatgtgtatattactcttaattttcactcttcttacgtgatatgctttctaattttattaatacctagctcattt

SEQ ID NO: 99576 - DNA, 1143 bp, Homo sapiens
ccagctactcaggagactgaggtgggaggcacgtttgagcccaggaggtcgaggctgcagtgagctgtagtcacaccactgcactccattctgggtcacagagtgagactccgtctccaaaaaaagaagtaatattctgaacttgtcctttcttgactttttggtgaattataacgggctgccagaatctagatcagctttttaggctctgagagatatgcttcatgtagaaataatccagtctgaaggccaggtctcaaggtgtcacttttgtattcttggatgactgttgaatgtgtggtctcgacgaatggctttgtggagcagctttctccagagacttgcatgtgcttggattaacaaacttgcgatccagggatgctaagcaggtgccttctgtgaccaagctcagtattgagggcgctgctgtccttgaggcagccaagtgttcttgtatacagctgtgttgtgtagcaggttaagtgctgcctctctcctgttgcttgttttctgtaatatgtcacctttcttggcatgattcctttgtccagtcttccagcgtcctgttgtatggtgtgggtgggctggggactgcataaatgagttggagcagtgatgttcttggccttgctctgtcctgtgagagaggaccctgcaccatctggggctcctggagtggcaccctgcaccagcaggacgcagctcttcctggcccttctgtcggcctctaaacacagtgcaggctgactttcttatcacagctcgtttggctggctggaccaaatgctgcttgtttctttctggagtggggaaataacttcaaccaggtgcagtcagtgtgtattcttatctcagctgcaaaagctgttctaaatgcccttctagggaacttttgcggtgtgaatttagtggttgtgctgcgtgttagtcctgcccaacactaggcccaggcagctagagttaagtcgttgggcattggtagggcactgtgagcaaagactctcttacctcgggccaggcagagaaggacacagtggctgagctcacctgctccttggtcatccttcaaacctctgagtgtgtgtggttccttggggagagaaagcagttttctcgtgggtgccaagacagcagctacctgca

SEQ ID NO: 99577 - DNA, 1096 bp, Homo sapiens
tgctgattgagcgacagttgattcaaacttgagatgagcaaacaagccatgggcagcgatctggggaagagcgttataagaggaatggacaggaggtgaaaagcacgggggcaggactgtgttgtgcacgttagaggaatgtggaacaccagttattagaccagtgtggagcaggaccagagggtgtaggagacgggcaggtcagggaagaagccggggctcctagcagtcggatcttgatgcctttggagagctggagcagagtgacccagtactggtggtggatcgtggtgaagtgaccatgggccacaccattcacgacatttcttacttttcctgtcacctgtaggaggcaagtattgttgttatcacaggtcgaggtagaccctgaggcaaaggctagagttagtggtttggctccagtttgtgccttcagctacttcactgcttccctaacctggccttgtcagtcagcctcagtctaccatctacccaggtctgcataccccgcaaaacagtatacactttgacgcttttctgcaagcacaattaccttttgggggagcccttctcttaaagcagagtaggttaatgtttgtgaatgaaacggaactttggcaggctgaggtgtctcaggtcatcagcttacgttgtctactgtgtgactaattgaggcaaaagatgtcctttttaatagtattttctcatcacttttgcctgggtgccctttaggaatgttatttttggcatacaacttgagtttcacttaaatttataattctttctgttcattcctactgctctgttgcccagatgtggattttgctttgtctcacaagcgttgctgaaacactggtagaaaggtggacgacggattggttgtgattagtttgatcttcacagtacagaaattcaaaaggtcaataagctcaacaagattgctgtctcactgatgatcagagttgccattaaaatcgtatttcccgcacatcaggctggaaaaaagaataaacatgatcattttagttgtcctcaaaggagaagaggacaggtattctgtaatcaggtgttgtgagtgtaactagttaaactcttt

SEQ ID NO: 99578 - DNA, 1540 bp, Homo sapiens
aaatatttgctggaaattgctgtgtagggttaagggttctgcagatacaaaggttgagaggatatagtcttttcgaccaggtgcagtggctcacgcttgtaatcccagcactttgggaggtcgaggcgggtggacacttgaggtcaggagttcgagaccagcctgaccaacatggtgaaaccctgtctctactaaaaatacaaaaattagcctggcatggtggcgcgcgcctgtaatcccagctgctcaagaggctgaggcatgagaatcgcttgaacccaggaggcggaggttgcagtgagccgagattgtagcactgcactctagcctgggcgacagagtgagactgtgtctcaaaaagccaacaaaaaaagaggatatagacttttcttttcctcaggcagcttgtggtctagtgtgagagacttatttgtagaagagtaattacattatggtgtgataagtgcaatgatagaaatatgtgtaaggtgtggacataggaaataggcagtggttacctgttggaaagtcttcctacagaatgtggtccttgaactgcggtttaaaagacgagtaagagtttttccaggtggtgctgagtggacaggaagactaggaaagaggaggctgacatttatagttggtggcatacgtgagcaacaggtttagaatttggtatactcttgccatggcaaatggtagagggcttggctcagactgtgtactgaaggacttgatgcccttcagtgagttttatctaagatactctgacctgaacagaatttgagatgattgtgccgggtccactgggatatcttacgatccttcgtgggtcatatggattctccattagtgcgtcccagctgaaacttacagaaagggcttaagcagagaacatgctttttggagtacaaagtgatatttttatttggtatggcccgttcattgtgcatccatcccataggcaaatggtgatacgaaagcttttccctcttttggtaagaagtaaccaagttctgaaagaagcatatcatgcggctttcccaattgccaagttatgatgacacaaagtccaaaatgcgtgtaaaggtttttgaccaagtagaaaagcagagaaccccaaccagtataatgtgtcagaatgctttttctcttcaattgtaaaagcaccacaacgttcaacatctggaaaccaagaaaataatgaaaagaaccttttttcatgtgtataatattttaaaacttggttacatgttattttttggtatttctaaagtcagagacattttagaagtgaaatccctagtaggctattgttttaccaagcacactgaagttcctcgaataccgttgaagatgagctagacatttgttctgagacgtgtctggacatcatgtggttgtgttagtcatcttgttgatacttgttgttaatttggtaagaatacattgactacatactctcccttactactttttattagcattcatattaatcttatttcaaatcaaggttacagcttcatgtcatttgtagagt

SEQ ID NO: 99579 - DNA, 2076 bp, Homo sapiens
aggcccgacaaacacttagagcttgtgtggccatcttgtctttctaacggtgccatttcctccctgaggcgtggaggactggccagcccccaaacctccaagcccatcggctggatgccgtggataagcgaggggagagcgactaggccctgtctgcgggtaccttcggcgaggagaggcgacgaaggtctgcaccagcgaggcacggacaggcagcagggggtagggtatagggttggaggccgccgagttggcccggggatgaggagcaaacctgtggcttccgtggtctcagtggagtcccaactgtgacctggcctactggcccagacaaacctggcttgcttttttaccttttcggtctaattcttgtcagtgccaccagaccttgtcctctctccacggaaacacacgaaccaactacactgaacttcttgtagttcaaacttctgcacctttggccattgcccaaactcttaaatctggctacttcccaccttaactgccttctccttacctagtctgtgcttgtgggattccgcccaaattagatttcctccagacaggcttaggtgtttacctgatgttccagatggtatttgtccagtggactattggtgctgtgagggcagggcacatgttgtcacccatactcattgcctcggttggtgtctagcacctagtaggttctcaaatactttttgaatcacagtgcctgccgatatatttaatgtttcaaaatagttctgccgtcataaagaaaaacatcatggtgtaggggtcatgaaagctgattcttgatacttctgatttgagcctcattgttttcagtgatttttgatagctcccattaatgggttctttgcaccacccagcatcctaactcatgatgtgtactgttatgtataatcttggcattgatctcattagctataaaggttgtcctgattttttttcctcaacttccaccttgatttctctcaccagtgccacagccaggaataaagaacaagagcgttttaattagatcagatttacattctgactggctcttaaactagcaaggtgacctagggaaaggggccagggtttccctctatcattcataaatgtaattcagggcccctttttatccccaataccagcatacagaaactgctgtaaaagaagaagttgtgggtatttttttttttttttttgtctggaggaatggggacaccaaaactcatttggcagcagaggtgaggtaaggccatttgtattgtctgttctgttagtagtcatacatgccacttatccctgccccagtccctgttaggagtgttatgtgggtatactgaacgtggaccttccccgaatccaaagaatccagatgctttgaataagatcatggaccttccgggttctacatcgccagatgttgttcatcttctatcttttgttttgcgaaaattggttttttatgtgtattggggttattctgtggaagaaataagctgtgggtcaagattaaagaactttaaacaacttctggcatgtggaataaacacgatctgaaggaacaaaattttcatttgactacatttttggtccaatttgcacccagtgtttaagttaatcacagtgcttggcagtttgtgttgctggatcaaggctttctcactgaaaaccatgtgcttcagaggttcataattcctctttcaccttccatttcacattagttaataaattatgagagaaaacattgtggatccaagttatgtttcagaaaaaaaaaaacaggaaaaaaaaaagatggcaggagaaacttggtaaagtcaaagcaaagttgaaatgtcagtttaagacaaatagtttctccattttcccatatgtgtgcacagggttcagtgaggctgaggggttctgtggaggtgcgggagaggtgctctatggtatttctatgttgcactgtgtgggtttgaaatcagatacatgtaataggtgataaggtaagtgcctgctcttttctatcctcagcattggcatttaatctttccatgtgaacttaaagctcattttatccaatcctttaag

SEQ ID NO: 99580 - DNA, 1083 bp, Homo sapiens
gcattgcacctaatacctgggagaagctattctttagccaagtttgttgaatgaaaccattcattcaaagtactgtcagctgtagcagtactttgtaagcttgactgattttcctggaactccatagtctctcaagtcgaaatttgaaattgcattaagatgtattaagcatgtatcttctatgtattgttaaattcctaaacagaatactgattaacaaaatgttaattttcagtcgcatacaactaaggagttatactagataagtttttctttttttaatgctcctagttgaatactactggttttctgatagaagtatgaccttctggaagtgtttatactttttaaaaaatttgtgaaaactgataacctatgtttgtttcatgtctaactgattatatcttaaaagcaactactaaggtgtttattagtttgtttgttttttaatcttatttagcaacagccaactcagtttataaatccagaaacacctggctatgttggatttgcaaacctccccaatcaagttcaccgaaaatcagtgaaaaaaggttttgagttcacactgatggtggtcggtaagaaattaatctatagtctccaacttactaaataaatatctcccctttccaatctctggagtatgataacgtgacctataaagaaagaggaaaatttggcagagtcaaataacttgagaatttgaacaaatatatgtgtattcattagaaaatttttctcaggagcaaaattatttttctgtcactttcttatttatatgtagtgaaagtttactcattgtgtcagctaggctccaaaatggcccccagtgattcttatctcctggtattcacaactttcttgtcccttcctgcattgaatagggttttacctgtgtagccagtaggacattgtggagatgaaagtgttgtcattttctaagactaggtcataaaaggcattatggccccccaccttgcctcttctcaaattactcactctggaggaagccagcccttcctgcattgaatagggttttacctgtgtagccagtaggacattgtggagatgaaagtgttg

SEQ ID NO: 99581 - DNA, 1867 bp, Homo sapiens
gtcctgctcacacgtttctgcagctcgggaagcacaagggttgttgacactatgggatagatatgttcagttttctgaaaatgtggtgagtttagtgactagcagaactgataattgaaaacctgctttgcattctatttgtcaaaaataaaaaccaacctctaaagtacattcctcacatttgtgaacagttatgtttctaattatatgatgttcaagttctgtagtctcatagacctggattcaaatcttggccctgctctggatagtactctgaccttgggcaaattagagtttctttgagtaccctcaaagatcatactgcaaacatagtagtactgtaggtactaaacacagaatgatgtttgtgaggtacttagcccagtaccaggccttatgtaaacacttaaccgattgaatggtgtcatatgaataaggtcatgacaaggtttttctttttatttaaaggtgaatcaggtctaggaaaatcgactctcataaacagcctattcctaactgatctgtacccagaaagagtcatacctggagcagcaggtaaaaacattcttatgttactgtaagtgtaattctacatgaaagatgctgaagactgcctaattaatattttatgtcttagctgtgtgttttgtttgttcttgttcagctttgaacacaaggaaaacacttttatggggtaggtgtgctgcaccgaggtccttggatttgggttgtagactttctttgacacgtatccatggatccatcctctcttgagtttgtctgtaaaatgtaataagtagtttctgcctatattaaatatttgatggaaggattaagtgagaatgttttacatcaaaaatgctgtgtaactagaagattactaggatagatgttcgaattcatctactgtcagaaagttccagcacaggacaccagcatccacaaatgactgttgaatgaaataggcacacatagtgagagcctaagacttgggctgctgcaagaatatgtagccctttcagaatatttttgaattcagtttttaaatgaattcgtaaattgctttctttttcccaggaacagaaattataatttttaacatttgtgtttttaaccttccccagtagcacaataatcttagctttaaccttcccctttctgacttctctgggatctttttttcttaatccccatggtatctttggagaacctacctctgtagagaggcagtagactctgaagtcacctgtcgtaagaacgtgagctttcctcttcacatgctgcttatattccctattaagtttgtttcttttctagaaaaaattgaaagaactgtccagattgaggcttcaactgttgaaattgaagagcgaggggtcaagctacgcctgacagtggtagatacccctggctatggtgacgctatcaactgcagagattggtatgctcccccatgcccagggatctgcatttgtttacttaatatacttcataaatttatagatagtgttaatgagtgattattaagtttgggattgctgtatataataaaacacctagacaatttaaagcgtgttaaatgttgactttttaaataaggaattttatagagagtaatttttttctggtactctactgtaatttgagatcgcaaagccagtcatccatagactgctagtataaatgaaacacctggatttgagccgtggttggtgaccgagatactgtagtacatcctttctatgtggaaggaagtgaaacctgttagagagtgggttgagtcgtagtgtctgtaaatgactgctcattggcatcattttcacaaataaggaaatgaagaagtagaagatagagcagtctgtcacct

SEQ ID NO: 99582 - DNA, 1057 bp, Homo sapiens
tgtttctgtttctctcagttttaagacaattatctcctatattgatgagcaatttgagaggtacctgcatgacgagagcggcttgaacaggcggcacatcattgataatagggtgcattgttgcttttactttatttcaccttttggacatgggtaagtaattgtttatcgtggagaaatgctttactacatgggtttgtaagttttacccaaactgtgtattttaatataagaattaagataatttgagagagaagagttttgtatgtattttttttaaataagtgacaattctaaaattaattttagacttaagcccttagatgtggcgtttatgaaggcaatacacaacaaggtgaatattgtgcctgtcattgcaaaagctgacactctcaccctgaaggaacgggagcggctgaagaaaagggtgagtgaggctggcgtcctgccctccctctgggtgcgactcgggggcatggggatgaagaaaggagtgtgttcccacgctcagtctgctcaggtgtcgggaggcagggcgggagaatttttcctgcattttagtggtggttttcaaggagaacctgatggttacaaattttaatttttgccttcatgaaggtatcaaatttctattctttaaattctccttatatttaaaatgccctcgatgagtagcagttggttacacacaagtaccttccatgggagttaaatgactcaaatatagaaatgtgatctctccatgaagtttgttattttacctaaattctttactgcaaatgacccatacaaggatgtatctaagtagactggttctctgttctgtttggaaacatagcagttgtcagccagcgaagcgcctctcacccgccagcagctcctgtggtgtcccagttttagtgcctcttccgtgtatgtctgtaaagcctctttattgattctctgctatatatttttaaattgcttactttgttctgattatatgctccttaagaaagtccaaatagtttatatatgctaaactctaaaaatacaaatccctaactgaacataccgg

SEQ ID NO: 99583 - DNA, 1032 bp, Homo sapiens
cagctcactgcaagctccgcctcccgggttcacgccattctcctgcctcagcctccccagcagctgggactacaggcgtccactgccacgcttagctaatttttttgtatttttagtagagacagggtttcaccatgttagccaggatggtctccatctcctgaccttgtgatccacctgcctcggcgtcccaaagtgctgggattacagacgtgagccaccacacccggccgcagttttataaatttatttgacagtaactttcgtcatcagtttgattattgacatttgtatgatttccaatatatttcttacaagatgagctagaattggctacaataacatacgcagtttgctaaaattgatcctggttttgtcattctctcagattctggatgaaattgaagaacataacatcaaaatctatcacttacctgatgcagaatcagatgaagatgaagattttaaagagcagactagacttctcaaggtaagaactggcttcagatccacaacataaataactcctgtttactgttgtccatgttgaggtgagagagattgcctgggtatgttcagttacgagagtatttttgctttcaatatattttaagacctcatgcagtggctcatgcctataatcccagcactttgagaggccaaggcagatggatcagttgaggccaggagttccagaccatcctggccaacatggtgaaatctcatctccatcaaaaatacaaaaattaggtggatgtggtggtgcacacctgtagtcccagccactcgggaggctaaggcaggagaatcacttgaacccaggaggcagaggttgcagtgagccgagatcgcgcctctgcactctagcctggcgacagagcaagactctgtctcaaaaaaaaaaaaaatttgatacagctatcacctaaagcttagaaattttattgtaggtttaatttgttttcgtacaatttgtcccatgtagaaagtatctgacacttttcaagaaaatgttacatacccccagctttc

SEQ ID NO: 99584 - DNA, 2953 bp, Homo sapiens
aagctaaccaactcttttttctcatatgagagtaatatataaattttgagttataggaggcatgaatattttcattacattttccgtaagtccttttagaagagtgtcttctatttcagacattgttgacctgaaaatctcttaaaatctgtctgccatcctgtggtagtgatggcctcacacaggggtggcagtgcctctagcagaaatccccctgagagactcagtcgagacctgtgtttgtatatcatttattggggaagaaagggagagctacacctcactagacatttccacggccatactcattatcctgaaatcccagcagctttatgtacaatttaccaagtaattttaattactgctatttcttctatgtacttgatgggtggttttttttctcatgagaatgtcatgtgcatgatgccaccttggtgcattcctcttctctttcagcacccacatgcaggatctccaggaggtgacccaggaccttcattatgaaaacttccgttctgagagactcaagagaggcggcaggtcatcacactgtgcccctttctctgtattgtgtcaccctgagccacaatgttcctcctcctctatgtgttcagctcagccttcttgaccattaagcaacatggtttggtttcctactcaaaagttattataaaagagttgttaatttaatcaaattatgctcttttagcctttttaagaaaaagtacatttaatgatatgcacgtaaaaactttaggccaggcacggtggctcatgcctgtaatcccagcaccttgggagaccaaggcaaggtagattgcctgagcgcaggagttttgagaccatgagattacatggtgaagtcccatctctacaaaaatttaaaaaaaaaaaaattaatttagccgggcatggtggcacacacctataatcccagctactcgggaggctgagttgggaggagcagttgagcctgggaggtgcagtgagccataattgcaccactgcactttatcctgggcaataaaacaagaccctgtctcaaaaaacaaacaaaaactttagatggaaaggccagaggcttgtgtcgagttctccttcaaaagcatcactctgtacgtgaggacaaacttgttgccattaggaaactgcagcacctgagttaagggtgaggccaggatgagtggcatccaagcagccagtggccgttgaagcagcagcttcgatcctcgcaaagtcctgcagccatcctcactcaccttttctttttaaccattctaatatgtttttatataagttttctgggaggccaaggcaagtggatcacttgaacccagtagtttgagaccggccctggcaacatagggagacctcgcctctataaaaattttttttaaattagccagatgtggtggtgcatgcctgtggtcccagctactagggggaggattccttgagcccagtaggtccaggctgcagtgagctatggtcgcaccaccacgctccagactgggcaacagagtgagaccctgtctcaacaacaaaagtttcctgtgttgtaattcattaaaattctcacattctaataatttgatggatttctagatacatatgttgtacacattgaagtctaattatgagtttggaaatgagacattaagaaagattttagaggcagcaagaaaattccaccctctggaagctgagtaggcgctggccctgagatggagattagtgtgctttgcagagcacagttctcaggtgtgcttggggagcttaccctttgcccctcgttcactcacgcagatcctgctccttaaatgtggtgactacattcgcattaataaagaataacatctcaaagcaaattcttcagataatacctatttttgagtgggtaacagcaagtgttgtcgctcaagcttagagtaagaaaagtctcttgaatgttccatttcatgttgttcgaactttttaaaatcattctgttccctttttattcattatatctttaattagaaaaatgataggctgggcgtggtggctcatgcctgtattcccagcactttgggaggccaaggtgggcggatcacttgaggttcaacaccagcctggccaacgtggcaaaaccccatctctactaaacacaaaaaaaattagctgggcgtggtagcacgtgcctgtaatgccagttacccaggaggctaaggtgggagaattgcttgaacctaggaggtggaggttgcagtgagccaagatcatgccactacactccagcccgtgcgacagagtgagacaccatctcaatataaaaagagaaatgataaatacatgtcattttaaattttaaagtagaattttttgggggggtagcaaataactatttgttgcagtgttatgattctgatttctttcgattcttaggaaagtggagaatgaggacatgaataaagaccagatcttgctggaaaaagaagctgaggtaagtaggaaagtactattggttggttggttggttggttgttttgtttgttttgagacagagttttgcaccattgcccaggctggagtgcagtggcgtgatctcggctcactgcaacctctgcctcccgggttcaagtgattctcctgcctcagcctcccgagtagctgggactacaggtgcccgccaccatgcctggctagttgtttttgtatttttagtagagacggggtttcatcatgttggccaggctggtctcgaactcctaacctcaggtgatctgcccaccttggcctcccaaagtgctgggattacaggtgtgagccaccgtgcccagccaaaaagtactattcttgtgactgaaggtgttttgtttacatccgtagatatcattggtaattaacttaaagtttatagttttttttttaatttgttgaggaggatacatataactactttattactatatat

SEQ ID NO: 99585 - DNA, 2235 bp, Homo sapiens
cctcagcgatgcagctcatttgaagcaggaagcagtgacaggtgtttgcttattttctctgagcttcattttcaacctttatggaatgaaaattttacttttagatcgataaaattttatttctgtatactttctagttttgcagcatttccagtttccaggagcctcatgaatggctttttggtttagttaactttgtggtcatgtaagccctgccttttgctcagtttatgacctttgttaaggagaaaagtagaactgttaataattaacgcagcagacattgcctcactcccacttaagtgtgttttgttttcttttttctagaaaacactttcctggataaaaaagaaaacattccagatgcatgatccagctgtgtgttttcaatccttgggagggtgccatccacattttaacagtacctgtgcctgagaatttaatttttaaaagactttgatgtgtttttgtatgaagtacttttaacgtatgtatttcattgctgtgtcacactctgtgttttgtgaggtgaatgtcttccttttctttctccctaaccactaatgttagaattgatttccaagaatcggcatgtatacttaatactgaatttctttgatttaactgacttaacaactgactaaccattgatgagcactcctgatttttatctagaacattcagatttaccataatgttccttagtggtagaggtgtgtgcctagtgatgtagaaagatacactgacttggtgcaaggccatctgcttaccacatcacaccacttggagatctttgcttccttgcttttatgtttgtacacaacacctaaaaccagttttgctgctataattctatactgttgattcgtctgcgattttatctgttaaccaaataaaacataatagaatttcctaatgagatatatctttatacttaaacagcttttttagaggtgagttttaaagaagtctcttaattctgatgctaggttgtttttaaaaccactatgcaaagaactcaccacaagccaccttttgtagtgttctccactaatactggttatcctgtgctacagagaaaatcaaagcagtcataagctccagttttcgtattgcaaataagactcttacctacaaaatgagattcagtgaactaatttggtttttactcaaccaaattaaaaatttttttaaggaaaattagcagttggtctattcagaatcaaacctttttatattttatactgcactttagtgtattttctgtcactgtaggtatagaagatctgcctcccctgtggaaattggggtctgttggtgggcgtgcccctgaagcctggcttgggttgaaaagtgttcccgccctaaggccttggtgccctgaacctctgatgcctaccgggttctcctgatttgagtttcctttaaatactccctttttgagtaattttctgatgggaggaaagtagcagtcatcatctttttgtgtgcaggctgtctcatttatttttagccattgtcgtttcattcattttgtgtaatataaaccgtgtgtcatgtcaaagtgaaagacatttcaaatctgtagcataggctagtgggcaggtccgcacagtcgaagccacacctggtctgttttctgtgcactgtagccttagtgtcacctttcttcttgtgtctccttatggtacactccagcggttgccttttttatcatttctactgaagttgggaaattcaaccccagaaattgacagatgaaaggagacaatggttgtgtagggagatggagaaaatgcttaatctgaggatgagacagggttttttcatttttgtgggggctagaaaaaacataaaatgaggcagttaaataataatagttaatgaaggtgtgctacagaaaataatctggtgttcttgctaactttgcccttcactgttgcttaattgtgaacagccaaaagctatatgttatggcttattgtgtgaaggtaactaagaagtggtgttccatgacttcagagtacatccatgcggagtccattatttgagtttgacatttaataactttgctggaaaatctgtaaaaaagaaaaacaagtttgctagtgactaagccccgcatatgtgagtgaaagtacttcaggcacgctgcctcctggtaacagctatgcagggagggaggacccacactgctacacttctgatcccctttggttttactacccaaatcta

SEQ ID NO: 99586 - DNA, 1051 bp, Homo sapiens
tacagagtagttttgtagttgggccccaagacagaaagtgggagaaagccattatttttttccctcttgcttcctctcctccactcagccctgcagtggcaggagtgtgtgaacacctaaaactcttagggaatggggaaaaccccagttgcctttttattctcttccctcctgcagctcagtcccaggcaagatgcaggcacaagaatagcatggctaaacggagtaattaaagccgtaggtttctggttggagtctgaaaaggggagcccaggtcactggaagggatactagggagattccagagagggaattgctcaggaaagtgaccccatgaagttgttagttaacttataggctcaacactgagctatgcacgcgtgatgtgagccagaacaggttgccaaagacggaactcggctatgggatagaccatcgcctggaaggcaggctggccaccaagcaagtagggaccgcaggacattgctgaggagcactgcaaaggctttgaaagtgaaagtgacactgataccatgttctacagaaggctggtcaggacctggggactgaatccagccaggccagtgcctgctcaacaaaataccagcattccccataggatttaaacaagatcaagagtctctaagagtgtgatgttaaaaatgtccaggatacaatgcaaaatttactcagcatgtgaagaaccaggaaaataactcgtgaaaaaagacacaggctaaagctgaggtggtgcctatgttggaattatctgatagactgtggtctgcagatttgtggcctccatgagcttgacctcctagtgtttatcctgggagtatgtgactgatttggcaaaagcacattgcagatgtaatgaagggtacgaatcaactagcctggattcgttgtctagattatccaggtgggccttaggtaattatatgagcctttaaaagcagggatcttcctccagctggtagcagatggggaaggcagagagactggaagtataagaagttttcaacgtaacatttctggcatggaagatgga

SEQ ID NO: 99587 - DNA, 1375 bp, Homo sapiens
gaaaacctcatatccaaactgagccattgccacatttccagaaaaaaacaaataatacaacctaaagaagttgtaaaagcaagggattagaaacttcagtttgaagatagcagactgaatatatgtatttatttttattccctcaaaaccctgaacacaatgacagttgaaggaattttttaaacatttaaatccgtaagaacaaagaatgggaaaacagcccacgaaagatgaggatagcagcaatgtttggaagctgggaaatgaaacagggagtgggacctgactttgcagagtagggaaggctggaatctcacagccttcagcggcaaagtcacagtgcaagccaacatgttcccaggagccccagaaagggctcacagttcatgcttatgagaaataggaatacttctttatcagaaatgtaaaattttatcttgtaatttttttatttttatcagccttgtttgtgatagtaaaattctgggaattaaccgttagaaagccagttaaatagcctggcacagtggttcacacctgtaatctcagcactttgggaggctaaggtgggcagattgcttgagtccaggagtttgagaccagctggagcaacatggagaaacctcatctctactaaaaataccaaaaattcattgggtgtagtggcatgtacctgtagtcccagctactcaggaggctgaggtgggagaatcacctgagcccaggaggtcgaggctacagtgagccgagatcgtgccactgcactgcagcctgggcaccttgagtgagaccctgtctctaaataagtacataaataaaagccagctaaataaatggtggtgcatccatgtgaacagaatattgggcaactgtacaaacaaggaagcagctctttatgtcccaataatgagacatccttcaagatgcatcattacatggagaaaagattgaaaactctgtatagtagctactgcttgtggggaaaagagagaaaattatatgtgcactatattccacactattaaatgaactggtgacattaatggccccagggaagagtggccaagctggcaggctttggaacagtgctgagagggagacttgcactgtggactcatttttgaaccttcagaatttgagccttgtgaatgtatcactgtattacattttcacaaaaccttcacaggaataaaacactgcatctctgaaatgagcaggataccatgatagaaacaaatggagaacataaaaacatttgcaaattaaaatacaggctgccccagtccatccccaccccatgtctcctacctggtctgcacgccaggcaggggtcatcagcctctttgtcctgcagagttgtgctggcacatgctct

SEQ ID NO: 99588 - DNA, 1174 bp, Homo sapiens
tggaggccccgacacaccatcggcccagcccctcgggccccccgcactccagcctggtccaggtgtcgggttttgtcatgtcgtgagcagctgtggttctgtctgtgctggggggcagagtttcagtgccttagacctagacacagggagggccggtagggagctcagcgctgcttgtaaaaatgacaatggtggggatgactttaccacaggctcatttccttccggtggggagcaccggtgtgaccggcagtgtcgtgggggggcccctgctttcacattgacaaatgcccagctgcaggtatctgaggagttcatagacgatgacccagcagacatctccttctttgctggaggctctgaggcgttttcttttccttatggctctgtagtcccacaggaatctcaggcctctgcccagcctctggtggcccctcctttgtgtgagcttccagggtctgctcggtccagcccagacaggtactccatggaggcagtagatatgaacacagaagacggttttgcatttgaggaggaaagtgacttcaatgggaacgcacacccctcagacacctcggagctatttgaggtgaaggcgcaggccagccggatgcagcgcctgctgggtccttctgagaccagctcactgagaaacagccagtctgaaaacagctccctcaataacatgccactacgtggtgggctgtctgtgcacacatgcagctcagccagtcaatctgaggccagctccatggtcaacttcccagcctactcagtccgctctgagtccagctcggccttccagttctctgacatcatcgaccagttagagcagctcagctacccacccacgacggccgaggactccagcagcacagagtcagactcatgggactctgaaaccgaggcccccctagacataagccttttcttcagcaacccttttgcacacacaagtggagaaagagtcccttttgatttacagaacaatttaaagaatttgactccaggagagcaaatagataaaaacccatcttgaccactctgggttcctttacaaggcaacccactcacccacgctgtgtggtttagagctcagaattgtttggtttaaacacagaaagtgactttcatttcatggatagatattcaatttttttttaatttcctgatt

SEQ ID NO: 99589 - DNA, 1044 bp, Homo sapiens
aacccttttgcacagacaagtggagaaagagtcccactgggactctggggggacagtcatccattgcactggggttgggggtgaggggatgcctggaactgtcccagtgccaaaggcaccatgtcatttttttttttaaaggtgtcaaagggccactgcctcattattgacttgagacccagaaatagtgctgtgtgtagatagtggtcttggagaggcgttggtttaaaatgcacttatgtaagtttgagctgttttcttttcttcagcttaattgggaactagaagatacgtggttgcaaaaaaagcagaaccagacacaccatgggcatcattctgtcccaggacaatgggaagggtcccaggggcaggtgtgccaaggtggccctgcccacccatccagcgtacccgtaaacacataccaggtgccatgggccctgctgggtaccacatggagagcttctcagtctaaaccaccataaaagtcaaggctgatgtttgtggcacagagtgggtaggtccatccagggacgtcatggggaaaccactgccatgcagctcagcacccacaagtgccggtctcaggccagccctagatgacactgttcaatttgtcaagtccacagatagggttggggtttttgttgtttttcttttctgatcttacctagtagtgcaataccacatttaaagtttaattctcttcccagaatgtcttgtggaaactttacatttcattcctgttcacattgtaagatctctgatgttttgcctggatggatttactgtgattgcacagggaccacgtggctcaggtgtctgagccattgagggcatcttgcaagggctggttttccttttctcatcagtgttggctggatgccagcaggggttttgtggctaaccacatcaggcagtttcccatttttgtagctttgttatacctaaaccgcagtctcatcattttgcttatgcagctagaagtttcagtctgtatagttgttattcattctgtccctggtaatttagacctgccttcttgat

SEQ ID NO: 99590 - DNA, 1044 bp, Homo sapiens
aatacctgtgaaaatgttaacagacagaagcgcagcagtgaacctgaggtcaggacaggactgtttgggaggttcttcttttcttactgtcactccaaaaataaaccttggatttgtgtgctggggagaaatgagtatagataacatttaaaacgttttcctaaaccttagtattcatatggtagctgatggttcctctccccttcattactgttgcctgacgacggtccttgctgatgctgtgaactaacaaagttgtctttttgtttttaagggaacccaccctggcgtctggacagcaggttaggtttgggtggttttgagctagcactgctgtggggcaggggtggccgctccctggtgaagctaatgctgtggaagctggaatgttccttcctaaggagtgggatcatgcccctaccccagcagaggtatctcatcactcgctcatgtgcgagattctaaataaattttgttcttgggcatcttctactaggcctcctataaaatagatcttgctgtttttggtttgtgttaatggaacctcactttctagagataattctttagttttttatttaggaagttttcaaaatatacaaagcaggaatgtaaggaacccgcatcacctcaaattcagtgttacccacacttgaccatgcttgccccagctgtgccttttttctttccttgggtattttgttgctaaagtattttattattactgttttagagacagggcctcactcctgtcacccaggctggagtatggtggcacagtcacatctcactgcagcctcaacctcctgggctcaagccatccccccaccccagcctcctgagtagctgggactacaggcacacatcactgcgcccagctaatttttaaaaaatttttgtggagacaggttctcttcatgttgcccaggatggtcttgaattcctgggctccagcagtcctcctgtctcagcctcccaaagtgccagaattgcaggcatgagcctgggtgctagagcgaggccctgtctcaaaaaaaaaaaaaa

SEQ ID NO: 99591 - DNA, 1077 bp, Homo sapiens
gactctacaagaggccaaggaggacactggtatccctgcgccatggcagctgcaccccagggggtgagccatgggccagagggcacccaaatactcaccggggggtccagcactattagctgaaaatcaagcaaaggaaaaaatgttgagcattttgattatccaaaagggagttggacaattcatttatgaaccaaagaccaaaacctaacagagctagattcaaagaaaacccactgtggattaattttaattttaagtagttagatgaaataattgcaaaataaaatattaccaaatctaatctaaaagcatgtaacaaggaattgtcccacgatcaagtaaggttgtttggggaatgcaaggatcgttcggcattagaaagctgattgataacattcatcctatcagaagtcaaagagaaaaagggaaatccattctctacatgctgaaaatgcctttgccaaaatccaaggtgttatttctgataatacctcttagaaacagaaggaaactgtgttaacatgataaagatgatcttttcaagccaagagccatcatccttcccttaacagtcaggaacgagggccagttctctgtccccaggaccagccagttaccaacaactccacagaatggacagcttccctgtgcagagcctgatacaccaaccaagcctctcactggacatcaaaaatctgaatcaacataagcaagggcaggcaaaacattgtccagatgttagtcttcccgtaagttaacacaaaaatttaatgcaatttcaactgaaatctccatggtgtttttgtaaggaatttgtccaatgacttagaagattacttggaagaattaaatgcttgagaatagcaaagaatcttttttaaaaggaggcagaataagggatggaatgtgttcaccaaacagtgactatctcatatgacaccactaatgagagagagtggactgatgctggacagacaggaatggagcagaatgcccagaaagaactcgagtgcaaagacacaggcttccatttgataaagtctgagatcagtgagaaaatgaaggattcaacaa

SEQ ID NO: 99592 - DNA, 1865 bp, Homo sapiens
ggagtggagccgttgggctcctgctggcagtgcccctgtggccctaggtggccctgggtttgagagtggcaaggagggctgaggtcctgaggacagccctgctgtgccctaggaggccaggtggatggtaccctggcccttctcagggggcccggggtggagccacgtggagcctgggatgacgcctgcctgtcctgtgtcaagcagctgccaacgtgctactctcggagcagggtgacgtgaagctggcggactttggggtagcagggcagctcacagacacgcagattaagaggaacacattcgtgggcacccccttctggatggcacctgaggtcatcaagcagtcggcctacgacttcaaggtgggtgcagcgggcgggcaggtgcgggcaccatgcctggctcgggtgctcagggcagcaacagtccttgtgttctgtccaggctgacatctggtccctggggatcacagccatcgagctggccaagggggagcctccaaactctgacctccaccccatgcgcgtcctgttcctgattcccaagaacagcccacccacactggagggccagcacagcaagcccttcaaggagttcgtggaggcctgcctcaacaaagacccccgattcgtaaggcccgcctctggcccggtcccttctagacaggacgtggagggagggcgttcgcttggggtgggcggcacagcccggaggcccaggcccaccagccttgtagctgtgagggcccgccccggtccaggctgcctcacgtttgcttcccttaggcagagcttggctgggcccagtgactagtgttcccctgaccccctgcagcggcccacggccaaggagctcctgaagcacaagttcatcacacgctacaccaagaagacctccttcctcacggagctcatcgaccgctataagcgctggaagtcagaggggcatggcgaggagtccagctctgaggactctgacatgtagggacctggtttatcctcatggtgaccctaggtgctgtgacgtgggtggtccccactccagaagcaggggcgtgggccctgggggtgagggtgaccagatatagtgttgggcagggaccccctcaaggctgcaggacagggcctgctgaggcatcagctggaccccgtggcctggcagagccccgtctggtacctcgggtttcccttggccgtgaggtgtgccctgaggccctcatgcctcctggccctctccccactggccctggcaactcctcatcctcttcagtgatggcgaggcggaggacggggagcagggccccatctggacgttcccccctaccatccggccgagtccacacagcaagcttcacaaggggacggccctgcacagttcacagaaggtctgttcctggcctggcctttgccctctgtgcacccctggggccgtgggatgggctggatgcgggacccagctttgtccacccagtgtctggagcttggacaaggagcttgggaaaggcaggggtggtctgaagcccactgtggcactaggcctggtgtggagaccccgagccccagcatgtgccgggaagatgagggcctgtttggagccaaatttgtgaggagagggtgggagtcacaggccctcagagtcaggagagggtgggagtcacaagccctcagagtcaggagagggtgggagtcacaggccctcagagtcaggagagggtgggagtcacaggccctcagagtcaggagagggtgggagtcgccctcagagtcaggccatccgggtggcttgatggttttggggccggccctggacatgtgccccgacaggctgctcccagcctctgtctcttcaaggctagagcctgg

SEQ ID NO: 99593 - DNA, 1026 bp, Homo sapiens
aagtagcttggattacaggcatgcgccaccatgcccagctaattttgtatttttagtagagacggagtttcaccatgttggtcaggctggtctcaaactcctgacctcaggtgatctgcttgccctggcctcccaacgtgctgggattacaggcatgagccaccgcgctcggccaccagtttatttttaagaactgcagaaataactcctttgggtcacaggatgagaaattggagctccgaggtgccctgtaactgtgtgctattggttcttggtgcgatcgcacacagggaagggagtgcgggcacattggagaagggattccaaaggtaggaagctccttttgtccttttagggatccctttgtcccagcctggatgatgagagacttgacttcatatagtggcagaaaacctgaggggctgtggttttctcctgagatggttgccatggtgtcctgtggacctgtggggcagcccctttgtgggagagtggggcgcgttccccccatagcctgtgctcctgccttagacttctcccctctacctggccagttcctgcctggccctggagggcccgaatggctgtggggtgccagagcactgtatcaccactcagctatgtgtgctgggtcattccccttgttttgtggggcaacactgacagcagacacattggcaagtggaggccccagacctggcagccccagggctaatgtggagaacaggtgtccaccgctcgagtcagctgagtggcccgagtgatcatccaggccacagctgctgctacatccaaaagaggattcgcagcctccaggccaggggcccacttaccctttcttctccaggtgggggtggggatggcttgccttggcttggcctgcgatgtcattgtagggccaggatcacagccaagagggttcctgtcacacagtttctgcttgggctgatgagccctggctctggcttaggggtccgctgtgctcccctgctgtgaagcagtagaggtctgagtgcccacccaggg

SEQ ID NO: 99594 - DNA, 1041 bp, Homo sapiens
tgtgtctctctgtgtgtgtgcttgtgtatctgtgtctttctgtgtgatgcatgtgtctgtgtgttcatctgtgtgtacgtgtggtgtgtatgtggggggggttgtgtggtatgtatgtgtgtatatgggtggtgtgtgagtatgcatctgtgtggtgtgtgcatctgtgtgtgtggtatgtgtgtgtgtgcatctgtgggtctgtgggggtgtgtgtctggtgtgtgtgtgtgtatgggtggtgtgtgagtaggcatctgtgcgcatctgtgtgtgtggtatgtgtgtgtgatgtgtgtatctgtggtgtgtgtgtgcatctgtgggtctgtggtatgtggggagggtgtctgtggtatgtgtgtatgtgtagggtgtgagtgtgcatctgtgtgcatctgtatgtgtgtggtatgtatgtgtctgtgcgattgtctgtggtgtgtgtgtgcatctgtgtgtctgcggtgtgtatgtgtgtggtgtgtgtgtggtgtgtgagtgtgcatctgtgtgcgcctgtgtgtccgtgtgtgggtggtgcctcctctctgccctcctccctctctgtcctccttctggaaagcctgctggatggctacgacgacgacttgtggatctcacctccgtgtttctcagcttttccttgacaatttatttctaggtccacaatctgcggagtcgccttcctgggctcagtcttcatcctgtcaatgttttcatcttcatccattttgctactcagtcccttcacggtggcgttttatttgaattcatgtttgtactgttccttttctttctccagctgatccctctctgcacacacagcattctcctggctctcgccgagatgtctacacacattccggagtctcctaattgctttctcagttatgtttcccaggggcgggagtggggtgactccttccctcggttgcgctgccgtttcctttctgtcttggctgtcttccatgcttggtgtggtagctgaataacggcccccaaagatgtcctggtcctgatccctggcacctgtgaata

SEQ ID NO: 99595 - DNA, 1034 bp, Homo sapiens
tgaaccccttgacttccgggcagcaaaagcatcggggccagttgctccaaattgggtctcacctccacacttccttctctttggggtgctggtcctcgctgacttggtggttctctgacacctttaaagaaacttcttaaaacctgggttgttatctgcaggagggttggtcagttacagagtagtcagccatggccataagcagaactccgtttcatccacttctggtgccccccaccccacatgaccccccacacatctggggcactagagagatagtgcccatcagagaattgtcttttgacagtggtcactctcacaatttgccggcaaacattctgggcatatagggctgactcattcgggacttagctgccataggcttggattcttgttggaaacagctgctataatttattctgatgaattactgttccaaagatggtatttctgagctttccaagaacacactggacatcagttctagttacagtgaaagtgggaggcagtggagaagggaagcactggaagctcagcgcttgtctgatcaggtatatgatttgtagagaccaaaaaaaggtgacttctcccatccaagtactaaccaggcccgaccctccttagcttccgaggtcagacgagatcaggtgcgttcagggtggtatggccgtcgacaaaaaaggtgacttctaaataaacaatccctgtgttcccctggtggtcttctggaggcagctgaagggcacctggattgtgacatgcccaggggccctgggctgtgtgtctaccctcctctggcagggccactgcctggctcacagcccgtgatgagtgtgtggcatgcagtgggcgcacaggcattgattgaatcttttgaagataaaactaagctatctttgttccattctcctgctcagatcacccggaagttcaggctgaattctgaaggcaaacttgagcagacggtctccatggcaaccacgacacagccaatgactcagcatcttcacgtcacctacaagaaggtgaccccg

SEQ ID NO: 99596 - DNA, 1050 bp, Homo sapiens
tagacatcattgtccattttggtattggagttattcacaggctagctgggagcttcttagcttttgcaaatgttctctggcaaagggtggccccgtgggagttggtcggcctctctgggaaggtatctggtaaccagacctaagctgtgcttttactttgttccgtgactgcttgtctctccacgttcttacttggctccatctgcaaattcatgttctcctgcaaaagtgtccgtttcatgagattttcagaatttttggaagaagtaatagatactgttttctcttgatgtgctgttctatgtcacttctcttttactgatgttttgtgtgtgttttctctttttcttgatcatacttgtcagaggttatctattttatcagggttttttgtttttttttttttgtttgcatgtttatttttgctaaataactagatttgggttttattaatttaacaaaaagtggctctttttctgcaaatagagggaggagacagagacgatggagttgcgaagcctgggcatggcgcttaggggaaggctctgtgccatgcagcccctgcaccctgggggctttggggacctctaccgagcgacttaatggacagaagctggaagcacaacctgaggggctgggcctccccattgggttgacatcagcaggactgaggaagccaggaagcacacacagaaggcagggaccttgaggctagaaggagagcaggaggcaagaagagctgggtcttggagggccagtcctactaggcttgtgcgggggtgaaaggagctgtccctgttattacagtgttgggggaatttcctgggactttgtttgtagccaaatacaaagtcagtgtttatcatctttccaatatgtattgggggaaatgtgtcttccttgttaggttcagagttctgtagctttatgtgctgcataaagaagttttccagctgggcgcagtggctcacacctctaatcccagcactttgggaggctgaggcaggtggattacctgaggtcaggagttcgagatcagtctggccaaca

SEQ ID NO: 99597 - DNA, 1029 bp, Homo sapiens
ccgtgaggtagtgcgtgtcttgccactgtgtctcacaggcctgtcttcactgtctccttcttttcccttctcggaccatccagggtggatgttccctaaattcattgccccctcctcggctggtcagtggtgtggtttttttgaggtttgttgtttgtcacaaacatccttttgcatttgggttgtccacgtttacagatatatccatatctattgataaatttttcccagttaaattgctggatcaaaggacaggtacattttaaatttgatacacactgttagattgtatttcttcatgattatcctcccactatctcttgcatgagggcagctggttccctactccttaacaacatggtgtattttcagaatttcggtcctttcaaatctgagaaataaaagatgaaatctcactcatgttttgaatctaacttagaagcaggagggctcattccccatgctcactggctgtttacgcttcttattctgtgcacttgatatttaaagtctttgcctgtttttctgtggattgttcttttttgaggcggagtttcgctctgttgcccaggctggaatgcaaaggtgggatctcggctcatcgcaaccaccgcctctcaggttcaagcgattctcctgcctcggcctcctgggtagctgggattacaggcatgcgccaccacgcctggctaattttgtattattagtagagacagggtttctccatgttggtcaggctggtcttgaattcctgacttcaggtgatccacccgcctcagcctcccaaagtgctgggattacaggtatgaacaaccgtgcccggccagattgtccttttttttttttaaagatttgtaggagctttctgtatgccatgggttaatctgttgtctgctttatttgtgacacatacttccctagtctgtggcctggtccatgatgggctgtgccccacaggtgctcagctttcctgttgttgcctctgggctgtttcctttacaatgtctggatttgggttcttgctaagga

SEQ ID NO: 99598 - DNA, 1055 bp, Homo sapiens
tcttggcttttcgtggggagaacctgatggggttcctggaggtgaaacctatgaaaatgtaggaccccaggagattctcacacctgccatgttcagcctccagcattttgtccaaatcaagttcccaccagttccttcccctgtagactgtagattctgctccacgtgagctgatctcactgctattctctgtggcaggagagacatctgtgacctcacttccttatggatccaagaaaagttgttgattttcacttctttcagtgttttttgctgttgttttaaggctgtggtatatgactcctaagctctttacatgtgagagtggaaaccggaagcttactccccacccattatttttcggttattgctagcgtgtgggaaagctacccattttagtaattggccatcttatcaaattcacttgtagattctaatagttcttcaattgagactcagattaacgaggaaatcaaacataacatttgcaaattatttgtatccactttatggcctttttatattttatagaaatacttgctgtattttctctccatcatgatttctgtttttcccctgggcatgcaactccttccgtttcatggttgataagttgagggccttgatgtcactttaaaacaacagttccctgctggtatgccttgtcagtggacccaaacatatcacggtgttcctggacagctcctccccaccttgggacagctggtgcgggccgcgcaccctcagcttccatgcaccctgttgtactaagcagtaagtgtccctttctgtgtgtgccttggcaggaaacaacgtgtcactaacacaaagagatgtgagggtgggagctccaggaaggagccgtccccaggtcccagtgggtgcatttgctcacttcctgtcctgggttcccgggccgcttgccaggagacaggacagtctctggagcctccatgtccaggtgaagatgagtctccagccaccctctaggagacagaaaaggacatgccaggggtggccagagggactgctctggagagagaaagcatttagga

SEQ ID NO: 99599 - DNA, 1059 bp, Homo sapiens
gccgtgaactgctccaaccggcagggaaagggcgagaagcgcgccgtctccttccacaggtacgcgggccccgggccgccacgcccccgccccgacccggccctgcggggaaactgaggccccgcggccggcccgaacgcggggggcgggggcgccgggcctcggcggccggggcgcgggggagcgggcgtgggcgctgtgtgaccttggcccggccgccgtctctgggccgggcgcctcgggcagcgcagccgcccccaccccggccgcctgggtccgccctgcgcgcgatcgatccggccggcgcctaggcttcagaagccgcacgctctggaagcgcaggtcctgggccgattgtcctgctcggccgcgactgctgactctccggaccgcgcgggccgtcggcctggatgtctgcgagcaggagcgaccgggcagacgcgacctgcgcctccgtagctgacagcccccgagagggctttccgggactgggcccccgagcccaggacgcgggtacgcgcggagagtctacgggacggccggctggggacggcatcctcctgcgctcccttagagcctggcccggggctctcggccgcttcccacgtgggcccccgcggcagggcccaaacccctctaaggccttgtgagttcagcctatttcagtgagatttctgcggattacacgcgggaggcaccagaaccgcgaacagactttaaaaaccactttggagatgtttctgttttatgttgcatggtgttatttaagttttaaagacgggaatggcacgtgttatttatagggttattgaaagttcacagtagtttgctgtaagtcttaaatcattacaatgtattataagaattagtaacattagattatttcacaagtcagccagcgcactttcttgacaatttccttcagagcttgtgtcctagaagttttgttattgttttttgaaaacgaggcaacgtgttgcaacggtctaacatggtatgggaggaaaggacatcggaattgggggtgggggggtacctttgcagttggcctcacagtgt

SEQ ID NO: 99600 - DNA, 1049 bp, Homo sapiens
cgggtcgggctgccgcgactcgcctcggggcacgccggtgcgggccaggctgggccggggcggcgggcgctgcgggagcgcggggcggtgttggtgggtggtgggcggtgggagcgggagggggacggcggcgcactgcgccgcggaacccgccgtcggttgcgctggagcttctgcttttccggtcccgtccggagcgctccggaggttgtggctgcacaggcccttgcgccaggtcggccgtggagggcggcggagcctgccgggcggggagaggcgcggcggcgaacggggcggccgcggtccgggccggggacgcgagcggcgggcgaaagcgtagcctttccgcagctgagcgtgaagggatggaagctctttaacttttatgaagttattggtaggttggaggagagaaacgtgacgtgttcatcacagtatacgtatcttttttgtttttgtcttcaatttagtaaccagtagattctccaagctgcttttccgtgacgagaaagagaaacagtgaatttgtatcatcgggtcttagtttcttggggtcctaagagagagagaaagagaaggagtgtgtgtgtgtgtgtatagggagtgttggtttttttcctatcctttcatgcttccgctccatttttgctagcaagattattttaagtcagcgccaaacccatcgctagcccagtagccctagaaatatttttacacagaagttttagctcattcattctttgtgggaactgatttgccttttaccaagtatcccccatctgtaaagaaagattttcatctggtttaattctgtcattctgaatgggattgtttttactttttatttttctggtagctacaacataaatttattaagatctgagttggaaaactgtaatgtgtattgccaatatctattaaaatgatttgtagcagctcaccacttaaatgtggtaggtggctggaggaaacaggagccctgactccctaaggagcatgttgaccaggtgtatatcttgtgaagtttgtcttttagaataaccgtcatt

SEQ ID NO: 99601 - DNA, 2097 bp, Homo sapiens
tttcgataccttgaggctggagtatcatatgagagacttggctaaggtcaaaaacacggttcagtgtcgatcatatgacctaaaatgtgaaaatcatcatgttcaagttgggagaacagttatgttgttacatggcgatactttattttatcttttattttcccttgacaactgtgttgacatggtgatactttaataggacactggatgttgctgcatgtgggatcagagtagaaaaggtgtttgcatttaaaggtctctgtttatgctgataaaaacgtatatgatgtttgtaggatatcatggggaattttccttctgacttgatgctgtatttcctttcagagatgattaatgatctgccctcctttgatctctagagttcttgaagattctgccttccttgaccatgtgtaatacagtttctgttctgatagtcattaattcaatacactgtttgttactgactgtcagatatgtgttaggcattgttctagacactaggactagagaagtaacaacatagatgaaaaccattgccctggggtagctaacgttctagacatgagaccagcattagcagcgaagtgcgtggctcctgggggatggtgatttgggccaaggatgaggaggattggaattgtagccaggatggccaggaagggtctcactctgaaggtttaagttttgacgaagacttaaagcagtgtaggaggaagggcaggtagcaagagcctggtgtggctcaggtgcagcgggtggcggtgggagaagcaggagctgaggatagaaaggtgacttaggctcagtgtagtggggccttgccagctcatagtgaggactcggtgtttattctgaacaggatggcagctcatagtgaggactcagtgtttattctgaacaggatggcagccgtttggaaggtttcattctagaggaggagtcacatgatagactgtgttcaacaggcttgctctggcatctcttttgagaatgtactgcagaggggcaagggcagaggcagcgagaccagctaagagactgttgaacaagccagcaaggagatgccagtggattagctcagggtgggtaagaggttgacttctgcatgtgttttggaggttgagacaatagaatttgtttgtagattggaagttgggagagggatgggtagagagggaggagttaaagatggccccatagtgtatggcctgagctaagcaactcagatggaggggggcgggcgtggtggctcacgcctgtaatcccagcactttgagaggccgaggtgggcggatcacaaggtcaggagatcgagaccatcctggctaacacggtgaaaccccgtcgctactaaaaatacaaaaaattagccgggcatagtggcgggcgcctgtgatcccagctacgcaggaggctgaggcaggagaatggcgtgaacccgggaggcggagcttgcagtgagccaagactgcgccactgcactccagcctgggcgacagagcgagactctgtctcaaaaaaaaaaaaaaaaagaaactcagatggggaagacttggggaggtcctgtctggtgggaagctttctgttgcgagtttggatttatgtgtgttgaatgtgaggtggatgttagacatccttgtagagcagtgtccagtgggcttttgggtctacaggtttggagctaaaagaataagcctgggctggagatagactggaggtcacatcagatgaggtcacccagggtgtgaatgtgggtgggaaagaaaagaggccaaaggcctctgcgggtgtggagaggtccaggaggtggcaggcagaccacagtgtggctgtgttctccaccagtccctagcactgtccctaaaagcatgctccccattcagacgactggcaggtgccagcacttaaatagccacactgcccattccttgaggacagagctggtgtcttgtgcttgcatttctagtgcatcacttgtgtctggcatgtggttggtaataaaaaaaaaacagaacttgaattaataataacctacacattcccctactatcaaagctttcagtttgtagagtttaacataaatccagtatgtta

SEQ ID NO: 99602 - DNA, 1053 bp, Homo sapiens
tgaaatgggacggtctctgagctgtggcgcagccccagagtgcacaccacgctccatgcacctcctgggcagggtggcagtagtggggaacatgggctggagctctgtggctcacactttttgtttgtttgtttgtttttgagacggagtctcactctgtcgcccaggctggagtgcagtggcacgatctcggctcactgcaagctccgcctcccaggttcacgccattctcctgcctcagcctctggattagctgggactacaggcacccgccaccacgcctggctaattttctgtatttttaatagagacgggttttcactgtgttagccaggatggtcttgatctcctgacctcatgatccacccacctcggcctcccaaagtgctgggattacaggcgtgagccactgcgcgcagcctggcgcacacttcttaccagaacctagtcacgaattcctcgtcgaactagaattaggtatgtttgttactgtaaacgcagcttggtggcttacagtgattggcactctaacagtcaggtcaggctagagagccagccaccgcagacagaggagtggacgcgtgaacgttgagttgagaccaaaggggccacctggtgggataactgtcctcacccgtgaggaggaggaatgtcccctgtccccgggggagagtgctcctacaccagcgccgaggcggcagaatggtgtcttcaggggaagagagtgcccagtttgagcttctccccccatttcgtttctttttgtgttaacatctgcgcatctggcagcgttgagaattcctagtgactgtcattacaggcggcagctttaaggatgtgattgccggtgacccttggccggtcccctgtctcctggctcctcagcaggaggctccctgtgtcacggtgtccttgggcagttctcggtggcctttgccgccaagcttccagggagctgctgggcgaaggctgagacccagcggccctgcctcacagtcacagagagaagagctccccacttggccctaactcataacctgccccaatcccgga

SEQ ID NO: 99603 - DNA, 1051 bp, Homo sapiens
tcagacacagacatgaatttctgggcgctccctgagtcagagtctcagaagacctgtgcaggctggcgtgagaggagcggcagccacactgcggccccacgcccaaggactgggctgctctcgaggggggcgcgcccaccgctgtgtcctctctgcccagcctggcttaccaagggctacctcagtgggagatgaggttggaggaacgaaggcgaggttcctccttgctttggggagaaaagtattcaggaagtgggtgtgtgggaaacctgaagatggcgtgcacaggacacagcgtgggcggcctgggcagaagggcggctggctgtcctggagctgctgctggagcctgccctcagagtgtccctttccagtgctgtggcattctgtggcagcttccccaggtgtggtgacggggggggggcggggcctccacctgtgacagccaggcttgagggtggacggcgtgcctctcccaggagccttccccatgtccttgccttgctgagaattgccctcccatgccgctgaggtgttaggtggtttagggccaaaaggggaaaaccacttgagtcttgtggtgtgtggtgggcagacaccacagggtggcatcacctggtggcatttccagaacctcagccccgattccagcacccaccaccgcctgaccctgtgtaacctgctgtcccgggtcccagagtgcactctgccccgctgctctgctgcctgtcctgggaaagtatctttgccccactaggaaatgtaaacaggagggcttggggagcgtgggcacttttctcatgagcagctactgcggcgttggcaggactcgctgctgctgctgctgcttgtgtaggtcggggagccagagatccccgaggacgcgcgccggacagtcggcactgaccggcccacctggtagcagaggacacccccagccccccaagcattgaagacatagtgtatttcctcgtatcctttctcccttgggtgtagttggggtggggaagcagggaaggctggtgcgatctccattccttgggctccacgt

SEQ ID NO: 99604 - DNA, 1122 bp, Homo sapiens
tagaatttgctggcactggccgggcgcgatggctcatgcctataatcccagcactttgggaggccgaggtgggcagatcacctgaggtcaggagttggagaccagcctgaccaacgtggagaaaccccatctctacaaaaaaaattagccaggcatgatggcacgtgcctgtaatcccagctactcgggaggctgaggcaggagaatcacttgaacccaagaagcggaggttgcagtgagctgagatcgtgccattgcactccagcctgggttggcacccagagcaagattctgtctcaaaaaaaaaagaatttgctggcaccgagaacccctgaacgactactcccggggctccacatctgggaggaccagacggaaacggcagcagctttgctgacacaactgtgccagccaccacggtgtcatcctgagccacttctccacgcttcctagtgtgcaattctgggattctcaccttccagttcaaagtcgtgtctttcatgagctggtggaaacaccggagcgcccgctcctggaaagccccgttctcatagcgctcatggccaaacgctccccgcttggcagcatccgccagctgtaactggaggaacaggaccaggtcgggtttgggaaggcccacgtctggctgtttacaccaatctagggaaaaattctgccaagaaagaacccaacagttaaagcttagtgtagtctaggtttttgtttcgaaagtcgtaaaaacaggaaaaaatgaggggacatttggtgaggtaccaagatgtgagactgtttatattgtggctcgtttaatttttagaacctcaaacgtgtcggtttctccagtgtcacctttgtttttcctttgtaaacagacaagtggacagaaaagtaggtagatagaacggctgccagtccccgccacccacagcccaggccccatggaggccctcccagcacagctacaggcctgctggccaggagcaaacagtctatgtacagaacccctggagacccccggcctagaacgcctgcagcacagagcagctgggtccggacacaggcacgaggtccttggcagtgtcttttctgccacacacacgccagggtctcctctcccgtgga

SEQ ID NO: 99605 - DNA, 1030 bp, Homo sapiens
gtgtggcagaaaagacactgccaaggacctcgtgcctgtgtccggacccagctgctctgtgctgcaggcgttctaggccgggggtctccaggggttctgtacatagactgtttgctcctggccagcaggcctgtagctgtgctgggagggcctccatggggcctgggctgtgggtggcggggactggcagccgttctatctacctacttttctgtccacttgtctgtttacaaaggaaaaacaaaggtgacactggagaaaccgacacgtttgaggttctaaaaattaaacgagccacaatataaacagtctcacatcttggtacctcaccaaatgtcccctcattttttcctgtttttacgactttcgaaacaaaaacctagactacactaagctttaactgttgggttctttcttggcagaatttttccctagattggtgtaaacagccagacgtgggccttcccaaacccgacctggtcctgttcctccagttacagctggcggatgctgccaagcggggagcgtttggccatgagcgctatgagaacggggctttccaggagcgggcgctccggtgtttccaccagctcatgaaagacacgactttgaactggaaggtgagaatcccagaattgcacactaggaagcgtggagaagtggctcaggatgacaccgtggtggctggcacagttgtgtcagcaaagctgctgccgtttccgtctggtcctcccagatgtggagccccgggagtagtcgttcaggggttctcggtgccagcaaattcttttttttttgagacagaatcttgctctgggtgccaacccaggctggagtgcaatggcacgatctcagctcactgcaacctccgcttcttgggttcaagtgattctcctgcctcagcctcccgagtagctgggattacaggcacgtgccatcatgcctggctaattttttttgtagagatggggtttctccacgttggtcaggctggtctccaactcctgacctcaggtgatctgcccacctc

SEQ ID NO: 99606 - DNA, 1105 bp, Homo sapiens
tttgcaccattgcatccctctgctgctttgtcagaggccagttgactccttatgtgggtgcccctgtgatttgaaggccccagtgagactggctgagtcgaatgaatcggacttttctttctctgtcttgagcagtgcttctcactagtgtcaggccccgtgtctttgtacatctgtgatcttggcagctgtagggatgatggtggacttgtggtatttggctgagaacatccttgcagtccaggctaggggtcatgagcatggatgagtcacctgctggctgtgcccacgcttcccccgccaccatcctctgctctcttctttgcctgtgctttcttcttcctcgacagggtagagctggcctctctgaccaagacagctgacagtgcatctcctttcccctgccgtgtttctggaacattgaactttaccagttgtgtttgttactatttagtaaggttatcttctccatgttgggttttgctggaggtgtgggtatggcatcttctagagaagatccagacctttttggattaaaagtaaggttacaaatcactgtgctgtacttgttgtcatatgagatttctgagttgtattgttgggataattttctttttctttttttgagatggagtctcgctgtgtcacccaggctggaatgcagtggtgtgatctcggctcactgcaacctccacctcctgggttcaagcaattctcctgcctcagcctcccgagtagctgggattacaggtgcctgccaccatgtccagctaatattttgtattagtagagacagggtttcaccatgttagccaggatggtctcgatctcctgaccttgtgatccgcccgcctcagcctcccaaagcgctgggattataggggtgagccactgcgcacagcctgttgggataatttaagcttgacagttcaaggcctatgaaacaggaccagggctcaggagcatcctctttttcaggccgttaattaaggaaaagttgagccagggcgtgaccctcgtcgtggacagatacgcattttctggtgtggccttcaccggtgccaaggaggtgagtgccacttggcctcctgtcaggcgagcacag

SEQ ID NO: 99607 - DNA, 1649 bp, Homo sapiens
gactacaggcgtgagccaccgcgcctgccctaatttttgtatttattttagagatgggattttaccatgttggtcaggctggttttgaactcctgacctcaggtgatcagactgcctcgacctcccaaagtgctgggattacaggtgtgagccgctgcacctggcctccaggtagccatattttaaagtagggttcagcgtcagatatcccaggccttgttcactgcatttcacaactctgcttctcattattgcccacactcatgtcttttccctaaatgggatttattccattgcaatgtcaaaatatgcagaaaaagcacaagacccttgcatggactttgaaatagtgggccttgttttagcagaggtttgttcattggagactcaattaaagggcaagaaggtgtttcctggtggatacttttgtacattcgtgattctgaggtgttttggttttactttaaaataagactttgggtatccttttgtaggtggataaacacattcgaaggcttgatgcagacctggcgcgctttgaagcagatctgaaggacaagatggagggcagtgattttgaaagctccggagggcgagggttaaaaagcaagtctgttaattttttttctttattttattactgttaactatggagttttgaagagttttgtcacggtaaatcattaaagtatgatcactagggtaagtatcatatttgggtaaaccttgtcttgcaggctgggtgtggtggcttacgcctgtaaccccagcactttgggaggctgaggcaggaggatcacttgaggctaggagtttgagaccaacctgggcaacatagcgagacctcatctcaacaaaaaatttaaaaattagccaggtgtggtggtgcacacctgtggtcccagctactcgggaggctgaggtgggtggattgcttgagcccgggaggtcaaggctgcggtgagctatgattgctccgctgcactccagccagcctgggagacagagcgagacccctttttaaaaacaaaacacaaaacttgccttgctttagagaattctataaaaataatttgcatcttgattatttttcagaaggccggggtcagaaagaaaaaagagggtcccggggccgaggcaggaggacatcagaggaagacacaccaaagaaaaagaagcacaaaggagggtaagaggctttcccctctttttcccaaaagaacgaatacccatagcctgtatcccggatgtaggaacactgatggaagctgacccgagtgaagtgcaccccgtgtgccgggtggtattctgattcttacgctgcgcgcctgtcgtcagcctgtcctcaccgcagcctttgagggggtgccgttgtcaggggcattttcagtgtcgcagggacctgcccaggctttagggctgctgtggtgcggctgggctgcacctggagtctgactccagtgcctgtcctcttagccacagtgtgtgctgccccactagggacaggaggatggtgagcaacgtgttgttgacagaggccaatgtagaccactctttaagtagctagatttctgtatatctgtcagttattttatgtgtcaacatatagtgtgcatatattcattgttaattatgtggccacatttatt

SEQ ID NO: 99608 - DNA, 1731 bp, Homo sapiens
gtggaacacctgccaggctgctgtgtagaaacccacgtgggagctgatggggatgaaggagtgacaaggatggtgtgtggtcggaaggggccctgtgccaggtggacagctgggtgggtggtgggcggtccagggagtgtgtggggagctgctggttgagtcagtattggggcagaggtgcctgagtaggtgcgtggagggcccgggcgcaggacgcatggctgttctcttgggaggaggtcacagttacgggagagctgttgactgtgcgggctgctctgacacctgtcagtctggagtgggaggctggcaggcttctctcaggtgtcagccgtctgctggcagaggtgacgtgtgcttgtttccaaaggggccggggtctttggagggatggcccagaagtgggttgagtccagaggtccccgggggagtcctgtctgggaggagggaccgagatgagagtggactcgtccccagagtgggaccagaaccccggtgctgtgggtgagtgctgcgcttcacggcctcctgggggccctctgtgcccccatgcccctgcctgggcccgaaggtgggcgcgaggtctccacccctctgctgccagctgctgctgttcctggatttttgtgggtaactgttctttctagcatcagctgacaatctgttcgtatacttaatgattttcttgctgcgccttcttagaacattgcgtgttcagaggggttattgaggttttgaaaatgtgtgctccaggaagaaaacgtccacaaggtgtgtattcagttagtgcatgactgcagtggctggccctggagtcgcattcatttctaaaggacaatgggaaaaatggaagcaagcttattcattatgtgtcgctcagagcacggtaccaatttcccccttggaatgattgtcttcacagttttggggtgagggggccttaagtcagagacagaagggcccgtggtgtccgtgccgcctcacttcccaccatggccttcagtggtgcctgtgccctgtcccctgcaggtctgagttcactgacaccatcctgtccgtgcacccctctgatgtgctggacatgcccgtggacccaaacgaacccacgtactgcctgtgccaccaggtctcctatggggagatgattggctgtgacaatccagacgtgagtgtcgcctgcaggattcgcgccatggggcggggtcttgtgtggggcagggctggcggatgttggcatttcttgtgttttgcatacagaacatgaggcgtgttgactgcggtttctccctttactttgcagtgtccaattgagtggtttcactttgcctgcgtggaccttaccacgaaacccaaaggaaaatggtgagtgtggggacgctcgctctgttttctcccagtctgctgggtgttgcgctgctggcctccccaggagaaggtgctccatggcagaatcttgccgggcttagcgggacacggtagccacgtaggcatgccccactgtggcctcaaggagtgtggctggctggtggctgctctgggtgtggctttatcccccctttgctgctgtgcctgtccgagctggcagagggatgccgtcacccaggaatggtggttaccaggttacgtgatattcacgttaatggcccctcctgaaggacaaccttccggactctgggaggtagggatcgtcttaaatcagaaatgagaggttcttgtcccctagggaaattt

SEQ ID NO: 99609 - DNA, 1046 bp, Homo sapiens
cgtgcaccttctcctgatctgatgctggtggtgacactaggtgtgcacctacccctcctgatctgatgctggtggtaacaccaggcgtgcacctgccaggcaaaccctgggctgtttgttgcagtgccagtcctcgtgctcctcgtggctgcccagctcacccacccacatgagtcgggctgatgttgctgctttgaagggggacttgggtgggctgggtttagctccgtgtggtgcttgacatgctgtgacccgtttcaggctgcccaggctttgctgaggttctgcagaccttcagcacctgcaaggggatgctgggtgagatcctgtctgcattcgagttcatggatgctgtgtgcatgcagctggtcgggcgccatctccacctggccagcccggtgcaaggtactgaccccccacacagggggcagctggtcctgcagctccttctgcacgtctggacacatgggacggctcagagaccccgggtgggcggggggtgcccgggcgggcgggtggggggtccctgggcggagcatggagtggccgttgggctcatgtgtaagaaagctgctcttaacatatttaggacaaagaacaggctgccctggtcctgtgtaaggtttgtagttacacagatttcctgatcttctgcaggaaggacgggaaggaactaagtggctatttttggtgagctgggagactttctttccatttcttcttttctttgttttcccatgttgctttctgtaagcacgtttttcttttatgctgggaaaaaagccaataattttttgttgttgggggatggagtttcgcactgtggcccaggctggagtgcaatgtcacgatcttggctcactgcagcctccacctcccggattcaaaccattctcctgcctcagcagcctccacctcccgggttcaaacgattcttctgcctcagcagcttccacctcccgggttcaaacaattctcctgcctcagcctcctgagtagctgggattacgggcacctgccaccacactcagctaatttttgtattt

SEQ ID NO: 99610 - DNA, 1218 bp, Homo sapiens
ttcctacgcgtctacgaggagaagcgggagcaggaggactgctgggagaactttgtggtgctggggcggagcaagtccagcttgaagacgctcttcatcctcttccggaacgagacggtggacgtggaggacattgtgacttggctcaagcgccactgcgacgtgctggccgtgccggtgaaagtgaccgacaggtttgggatctggaccggggagtacaaatgcgagatcgagctgcgccagggggagggcggggtcaggcacttgccaggggccttcttcctgggggccgagaggggctacagctggtacaaggggcagcccaagacatgctttaaatgtggttcccggacccacatgagcggcagctgcacgcaggacaggtgcttcaggtgcggggaggaggggcacctgagcccttactgccggaagggcatcgtgtgcaacctctgtggcaagcgaggacacgcctttgcccagtgtcccaaagcagtgcacaattccgtggcagctcagctaaccggcgtggccgggcactaaacacccgcctgcctgccagggtgaacacacagccagcttatccctcttaagtgccaaaacttttttttaaaccattttttatcgtttttgaaggagatctttttaaaacctacaagagacatctctctatgccttcttaaaccgagtttactccatttcagcctgttctgaattggtgactctgtcaccaataacgactgcggagaactgtagcgtgcagatgtgttgcccctcccttttaaaattttattttcgtttttctattgggtatttgttttgtttcttgtactttttctctctctccttgcccccctcccgccctccccgccccataccttttcttcccctggattttcaccctttgggctgccttgctcatctttatgccccagcactaggtacggggcccaacacgtggtaggcactccatcagtgtttgctgaattgaaaacattgttgactgtggcttctatcagagtgtctaccttttgcagctcttcccctccctcatttaatttgctgcttttaatctacgtggtctgagaatttgtgaaaccagtgttgttagaagtgtatataatctgaatcaataagctctgaatggtggccaagggcctctcttatggcacaaagatgcatggacttcatgacagctcttttggtggctcagaagccatt

SEQ ID NO: 99611 - DNA, 1005 bp, Homo sapiens
cagaggaatgctgagaaatcacctggaggagggagcagaaagagaaggtttttaaggaggggcttctgaatacttgggagatacggaacggaccaaggaccacactccagggtgcattcgttgctccctggggcaccacttctggattacagtgtgccaggtcctttggaggccctaccccttccccattcattgccaccagtgagaaatgggggtgcccctgtgtaaagaaacctaccaaaggtttacatttgcaccttagcctcaatagctacgaaccctagagaagcagctagctggagctcatgtgcaactcctgattctcaggagaaagatggattttaacccaaaattatgagtgagctgttaactctaaaatgtacttgggagataggccaagcgagaggtcatgggccaactaagtgttatccagtagaaaagacagtacactgcttttcttttagtgtttgcttttcctttgctatatgttttgctatttccttgtggcttagaatgtaaaattgattgttaaaagttttgttctgaataaatatttatcttttgtattgctaaaactggtgcactatttcctttcaaagtgttagatgcacagttacccagctccagaccgtatttcaatcccacttcccctacactccatttgtttaccttgctaaatacatttcccacccctgcaggcaacacttagcacctactacgttgtgccggtccctttgcatcacaatcagcacactgttaaaacgggttttaagtcctaacacagttccaataaatcagaatcactgttagaggaagtgaaacattttagttaatcatcctcaagcaattctgatgggcagccaggtttgagaccagagtataagatgtgtgagctgaaccctgccctcagggagattacagacctgtgggaaagagaggtggtttgccagcttcctcgtctttctgttactgtaagcgcgcgctgtggatgggatgcaaaatatt

SEQ ID NO: 99612 - DNA, 1670 bp, Homo sapiens
cgcaaaacaatgtgtgttgtgagccaggacgcaacttgccggaggcggcgggggcgcgccgagcccgcctgagaccgcgctgaccttctccccccgccgtccgttgggcccgagcgcccagctcctcgctccccagttcgcgggggccgggccgagccgcggggcggggccgcccctccgtcgccgctgcctcctcccccacccccagccgcggaggatgcggacggcccccggcggcgtctagcggccccgggcccaggcgcgatggtgcagcagcggggcgcgagggccaagcgggacggcgggccgccgcccccgggacccgggccggccgaggagggggcgcgcgagcccggctggtgcaagaccccgagcggccacatcaagaggccgatgaacgcattcatggtgtggtcgcagcacgaacggcggaagatcatggaccagtggcccgacatgcacaacgccgagatctccaagcgcctgggccgccgctggcagctgctgcaggactcggagaagatcccgttcgtgcgggaggcggagcggctgcggctcaagcacatggcggattacccggactacaagtaccggccgcgcaaaaagagcaagggggcgcccgccaaggcgcggccccgcccccccggtggtagcggtggcggcagccggctcaagcccgggccgcagctgcctggccgcgggggccgccgagcagcgggagggcctttggggggcggggcggcggcgcccgaggacgacgatgaagacgacgacgaggagctgctggaagtgcgcctggtcgagaccccggggcgggagctgtggaggatggtcccggcgggacgggccgctcggggacaagcggagcgcgcccaagggccgtcgggcgagggggcggccgccgccgccgccgcctccccgacaccgtcggaggacgaggagccggaggaagaggaggaggaggcggcagcggctgaggaaggtgaagaggagacggtggcgtcgggggaggagtcgctgggctttctgtccaggctgccccctggcccggccggcctggactgcagcgccctggatcgcgacccggacctgcagcctccctcgggcacgtcgcacttcgagttcccggactactgcacccccgaggttaccgagatgatcgcgggggactggcgcccgtctagcatcgcagacctggttttcacctactgagcccaccgtcagcggggcgcgcacgcccccaaaccagctgtttacatacaggaatcaggtattggggcccctcggaggccgaggctggcaccccatctcccgcgcagcctgccccctcctggacgtgcccatcccccctcagatccagacatgcccctcccccgcagacacaccccaaggcagcccaacccccaccccttccccgacacccaagcccctccccacgtcgccccctcctgcacagccaccagcagccagccccctccgatacacctcccgtcctctcctacagacctgcacccctccccccttttgcacacgcccctcctcgtggccggaggacccgccccctcctttgctccggaatctctcctccctcgcccggcccgccttctctgggttaggggggcgatgcggccgggtggcaacgcacgcgcctcctgcgcccctcccttccc

SEQ ID NO: 99613 - DNA, 1722 bp, Homo sapiens
gcgatcctgggaaatcctttgatccgggagccctaggtttcctctccagccaacggggcgtcgctgccttaatgggaggagcactcggaagggttggtttgggcctgaaactctcccaagtggcatagccccttttccggtatggggtctcctacacccacgcgcaccacctctccggtcgcgtggctgcctctacagcctacctatacgtccctttttccccccaactgggaattgagaggtaaggtctttctctggaaatccagcagtagaggaagggaccacccaagaaaactaaaaaccaaggcaccttaccagtctgtctggggacaggatccctgctgcaccttccccaccccctcctgggaagtgccccctcacctcagggcacccgcaacctgggctcctccctgagcgcaccggcccttcctgtcacccaggtccaccctcagtactcaagctgcagtatacagcgggaaaaactgaggcactttggtgctaggggtttgggactgaggcgtggagagcagatgtgatggcaggaagactctcgcttttaaacatctggtttgggagagaccatcgacttggccagtgagactgagaatggattccgagtagtgatgggccgtttgcacctcggtttttccacgtgagaaatggggagaacgctgctgttaggaggaagttgtgtccagttcagggtgccctcgggagccctgtccctgttgctgtggcccctctcacgccgccatctctctgccccgccccgcccctccggcctccccacaccccccttgccctcactacctgtatctcaccggcgtgtgttcaccctcccgggtggctcacacactctcattcacacacacaaatctcaggaacaaacggtcccagagtcctccggacccctgcccagggtctctgcaggtctctgccccacgcgttcccgtcgctgacaaagccaccagctgcctcctttaagcttggtgctccggctctgggcctttcttgcgctctattttttttttttttttttttaagaaaaacaacaacaacaaaaaaagacaatgaaaaaaaaaacgtcatgtgagtgaagagatgtcactgtctgtggtcttggagaactagtctcgtagctgaggggtggggtccctctgtctggggcactggcacccacagcaggactccgccagtctgatgccaggactgaataaagtgtatttgccccgaccttgccctgtggttctgcatgtctgtgctcttcctcaaccctccctaaacagtttgccagattcaagtccgtgtgatttgggcccgagctgggtgtcccagggcaagccaccttgcctgtctaggcctctatgtcaggactccctggccttcatgaagaatagcaaactcatccctgtagggaccaggcaggtaacatagacgagtgactctgggtggacagtggtgtcatgacccacttcaaggggcctacctcctgccagttgtgaccctgtgggaatgcagtccacagtggccaggtggccagatttttcaagaaaagctggatggatgtttctgagtcatcttaatttcaaaatgagactcatattttaaaatttctgtgggccaaatgaaacaagtatgcaggcaggtctggtccgagggggctggcttggccatgcctttctgtgcctttaatgaggactaagaagcaagattgggccacac

SEQ ID NO: 99614 - DNA, 1044 bp, Homo sapiens
attggtagaatctgtgtggtcatttctgcatccggggcattctggacctggattacttgggttcaaatttcagctccactagctatgccatctcggacaggacgcttaaacactccatactgtttgcttttctgtgaattggagataatggtaaccaccttatggtggtatgaggactgcaagacctaatgtatgtgatggactgagtacagagcctggcatggacaagcgcttgtctctcactgcccccgtgactgccccgtgataggatattactttgttattctattacagtacttacccaggtatattgccatttgctgtccacaggactgtcctttccactagactgtgagtccctataggacaggaccctgtctgagccatccatcattatagattatgtgttgcctgctagttctgaacctcagacttctctctttcataataacagctggcatttagggagcatgtctacgtgccaggtgctgtgttaagtgcattaagcttcatacaatctcaagggattggtatccttgttgctcctattttggagatgaaaaaaactcctgacactcagaacggttaagaaactcaggttcacacagtggcttgaacactggcagacagattcactctcagcctgcactagatataagttgtgggaggagattgtgggggcaggaatgttgctgaacagaaggaatgcctgcctttcggactgctccagcaggctctctctcactccacccccattaatccctcccccatctatatgaatatcactgtttttggccgggtgcggtggcacatgcctgtaatcccagcactttgggaggccaaggtgggaggatcacctgaggtcaggagtttgagactagcctgaccaacatggagaagccctgtgtctactaaaagtacaaaattagccggggggcgtggtgacacatgcctgtaatcccagctactcgggaggctgaggcaggagaatcgctcgaacctgggaggcggagattgcggtgagccaagatcgcgcattgcact

SEQ ID NO: 99615 - DNA, 1048 bp, Homo sapiens
gtggaggtcccggatgaggcgacaatttttccggccccccctcccagtcccgccccacttccggggccgccactttcactttctcttccgccgaagccgctccccttgcgaagaactggggcctcccgggaggagagagggctttgccttgaaacccgggacgccaggggcgctcccgcaagtgggggtcctccgggacttggaacgccccggctgggtggtgtccgggcgtcctttccccgcttcttcccacctcggctggtcccgtttcctcctgcgcccagtgcggacctgtctcggcgcccgctgccctctcaccgccccacgcaggatcccggcctggtcaccgggcagtgtgatgcttcccgactgccgcggggacagcgaggcacacacagggcttgggccgcgccggaggccacacggcctggctgagttgctcctggtctcccgcctctcccaggcgacccggaggtagcatttcccaggaggcacggtcccccccagggggatgggcacagccacgccagatggacgagaagaccaagaaaggtgggcacaggctggaggtggctggggaacttccggtgggaagtgggccccgcaggacctggccttgcccctggccagaagggccttggagagggggctttagcctgccctccctctaccctcctccccatcagtttcctcctttggtacctgctggcttccagagccatcttggggccctgagaactccttgggctggctctgtgctgagatggggctaggggactcgcagaggacacagggcattgaacttggagacctcctgggctggtgggagacagacgtcagttgacctgagaagcaggggtacttgcctcttctcttgtcccctgcacctagggttgtagaacggaagtcagtcactgccttgctggaaaccctcccatgcccctctgtgttctccaaacaaaacccagaggccctgggtggcccacaggatatctgtcctcagtcaccccgccatgctcactctactggagccccactggcttccttc

SEQ ID NO: 99616 - DNA, 1938 bp, Homo sapiens
caactcaggaaactaacgctgatacagtactggtatccagtctacagatcttactcagattttaccagttgtcccactattgtcatttatagcaaaagacttggcattctgctgtcatgtctcagtccctttcaaagagtccaggccagtttcttttttttggcgggggttgggggctgatgtttcctccggagtggatcaagtcactgttttggcaggaccgcctcagcggtgctcttgggtccctcttggtgcatccttcaggaggcacggaagggctggtgttgtgctgggttttgaagctcaaaggacatagaagcatttatcggtggaatagggaccctgaccctgggggagccaggatgcccacttggccagatggaagctggaggtacccccagggaggagggagaggatagggggagggtctgcctggctggctcagggagacccacccccatgggtgtggaccaagtgggccgcgtggaaccaccaccctttaaccctcctccacagatctgggcttcaaggacctcacgctgcagccgcggggccctctggagccaggccccccaaagcccggggtcccccaggaacccggacgggggcagccagatgcagtgcctgagcccccaccggtaagctgtccttggcctcagtatcctcttctgtgcccctcccttgcctcaccctgcccagtcgggctcacagcaccctctgctcccaggtgggctggcagtgccccgggtgcaccttcatcaacaagcccacgcggcctggctgtgagatgtgctgccgggcgcgccccgaggcctaccaggtccccgcctcataccagcccgacgaggaggagcgagcgcgcctggcgggcgaggaggaggcgctgcgtcagtaccagcaggtgggcgggaaagtccctggacagacacctgcagaccgcacgggggaggtgtaggccaggaagggagacacctgcgcactgccgcgcctctccgttactgccttgcccctcccaaccatgctgctggcagtgaccctgcacctggctgtgaccctgcacctggctgtgacctgccctctctcaaaggtcaccctgtggctgagacccgctccctggctgtggcgcacatccaggttcacatgccccactcccacgtgggctgtggctccatccccagctttgacacaccacacgagtatggctggccatgaccccagcaccctagccatgaccccagcaccctagccatgaccacacctcagctcggacctcacccccacccgtctgtgacctaagcctgctccacctcgccgtgacctcaccctggactctcctactcctgacctcttccctctcgggctgggcccacccctgacttcctgagagcctggcctggaccctcgctgcgccctagggggatgacccccgaccccggtcctacgccttagccctaccccgcccccatcgtgacacacgcactaatgacacagacattgatccccgagtgctccccattctgatctcacccctggccccacctgcattccccttggacccggtgctgcccctggccaccccactcctgttcccgtctcagctcctcggcttcgtcacttccccacccctgacgttgagtggctccaccagccctggcccgggccctgccctgctacctgactcaccactcagaccccggcccccttccttaccttgctgccattgctgtctcacctggcgccttccgtggctacctggccggcctcccctcccttggcttccccacctccacctggcctcactcccagccccgcccctcccaacctgcctgctcctgcccatcccccaccccccaccccccatcccccagccccacccccatcccccacccccgtcccccatcccccatccctactggctcccagctttgcctgtggctg

SEQ ID NO: 99617 - DNA, 1002 bp, Homo sapiens
atgggagtcactggggagacatggctgctgttctgagatagactctaggggccagatggatgcagggagcccagcgaggaggctcctggagtcacccaggtgggggatgtggggcctggaccagagaatcagagcggcagtatggaggcagggtggaggccttggtgatgggttggtgagagggatgggaaggaaggagatattgaggagaagtccacctggggtgactgagtgaggcccctggggtcaggccttgccatgtgagggatggagtccccagtgaagggggttcctatgatcctaactcttttcccctcccctcccctagggagtgcctgcagggcaccatccgcaacagccaggaggcggaggtctcctgccccttcattgacaacacctactcgtgctcgggcaagctgctggagagggagatcaaggcggtaaggcctcagggtgggagacataccccaagtcccaactcctaaggaactgggccctgagcaggcagcagacatctttcttttctttcttttttttttttggagatggggtctcactatgttgtccaagctggtctcaaactcctgggcttaagcgatcattcatcctcagccccccagacatttttcaagagctttgtccatgtggggtgttgagaccccaagcagaaaaagaattgaggggagtagctagtcaagaaaccacatctatgaaggaaggacagcagagttgttaagaatcagggactcggctgggcgtggcagctcacacctgtaatcccagcactttgggaggatgaagtgggcagattgcttgaacccatgagttccagaccaacctgggcaacatggcaaaaaatattcaaaaaatagccaggcgcgggggcatgcgcctgtagtcctagctacttgggtggggtctgggatgagtgggctgaggtgggaggattgcttgagcctaggaagtaaggttgcagtgagctgtgattgtgccactgcactc

SEQ ID NO: 99618 - DNA, 1049 bp, Homo sapiens
gccaagtaatgtagtggaggttgtttttacaaaaacagaaaaatatgcctcaccacatagaaccagagcagaaatcagagagaaaatcacccacaaacccaggaaatcctccaattgcattttatcttatttccttcagtatctctgggcaaattttttttttttttcctttttgagatgaagtctcactctgtcatccaggctggagtgcaatggcgcgatctcagcccactgcaagctccgcctcccgggttcacgccattctcctgcctcagcctcccaagtagctgggactagaggcgcacaccgccatgcccagctaatttttgtattttcagtacagacgagttttcaccatgttggccaggctggtcttgaactcctgacctcaggtgatccacccacctcggcctcccaaagtgctaggattacaggcgtgagccaccgtgcccagccagatatgattttttaagtcaactttacttaagtatactttgcacacaataaaatgtactcattgtaagtatgcagtcaggtaaattttaacaaatgtaactctcgtaaccaccaaccactgttacatataacataggcatgatttctgcctcattgtaaccagcatggatacaatcgctttagcttttgttattttgctatagaatttttctaaagattattacaaatctcaatagcacatatactgtttatacctcttagttctagtttctcagtttgtaatactccttcaaggaatgttttgcatggtgtattcttttttttttttttttttgagacgaagtctcactctgttgcctaagctggagtacattggtgtgatcttggctcactgcaacctccacctcccgggttcaaacgattctcctgcctcagcctcccgagtagctgggactacaggcagatgccaccacacccagctaatttttgtatttttagtagagatggggtttcactatgttggccaagctagtcttaaactcctgacctcgtgatgcgcccgcctcggcctcccagagtgttcagattacagg

SEQ ID NO: 99619 - DNA, 1061 bp, Homo sapiens
gcccctcttactagcagctccatcagctgatcagaaatcagagacagaagggaactaggttactcgttaaatcctacctattttcagcctagaaatcacatgggcgtttccagtcaagtgggaaggaagctcatttttagggcctagacctagactagttttgcctgcctttttttcctccctgctttcttctacaagccacacaacattgcttataaaaggtacttttattactatttttagaatatatacaccccatatgtaaattaccctcacttttaaagtaataatagttccttcacggaaaaaaaaatagttctcatcagaaggatgagcttctaagatcctgaattttactttctacttgattaacattttcgctttagccagagttgctatttgcaaacagctttccacttccaaagtgccactttctgaccggtttttcttcctgttttcctcaaatcatcctactcccaaataggcacccactcactaccttggcgtcgttttttgggtctgacttgactcgtcaactgctggtctctcccacctggttggaaatgtcgttggaaacttgcaaagactctccagaccttagggaacaagaggcatcactcagtccttctgggacagcttccctgtaagcaaagccaggtttgttttagattcactctggcctgaaaaaaaaagtgccttttgctgctttaaagaattggggtatatggtatgaagcagccatgtacttgtattttcctggtctttcctgggcactcttctctcttggcagatgttttcttaaagtgaacacaccagaagcactctaccccaccatatccagtcctctttgcatgcctgttgtgtgcagggtggagggtgtcccacgtgccagagcagctgggagccctgtccgctgagttacactaagcactttatttttatttattttattattattttcttttttctgagatggagtctcactctgttgcccaggctggagtgcagtggtgcagtctcagctcactgcaacctccgcctcccaagttcaggcaattctc

SEQ ID NO: 99620 - DNA, 1069 bp, Homo sapiens
ctgcaccactgcactccagcctgggcaacagagtgagactccatctcagaaaaaagaaaataataataaaataaataaaaataaagtgcttagtgtaactcagcggacagggctcccagctgctctggcacgtgggacaccctccaccctgcacacaacaggcatgcaaagaggactggatatggtggggtagagtgcttctggtgtgttcactttaagaaaacatctgccaagagagaagagtgcccaggaaagaccaggaaaatacaagtacatggctgcttcataccatataccccaattctttaaagcagcaaaaggcactttttttttcaggccagagtgaatctaaaacaaacctggctttgcttacagggaagctgtcccagaaggactgagtgatgcctcttgttccctaaggtctggagagtctttgcaagtttccaacgacatttccaaccaggtgggagagaccagcagttgacgagtcaagtcagacccaaaaaacgacgccaaggtagtgagtgggtgcctatttgggagtaggatgatttgaggaaaacaggaagaaaaaccggtcagaaagtggcactttggaagtggaaagctgtttgcaaatagcaactctggctaaagcgaaaatgttaatcaagtagaaagtaaaattcaggatcttagaagctcatccttctgatgagaactatttttttttccgtgaaggaactattattactttaaaagtgagggtaatttacatatggggtgtatatattctaaaaatagtaataaaagtaccttttataagcaatgttgtgtggcttgtagaagaaagcagggaggaaaaaaaggcaggcaaaactagtctaggtctaggccctaaaaatgagcttccttcccacttgactggaaacgcccatgtgatttctaggctgaaaataggtaggatttaacgagtaacctagttcccttctgtctctgatttctgatcagctgatggagctgctagtaagaggggccgatcatgctcccagacgagtcctttggcctcttgctctccatcccaagcctg

SEQ ID NO: 99621 - DNA, 1694 bp, Homo sapiens
acaaaatcagattttttttgctgcatgacacttctgaacctttaaaatgctaatctgcattgtgaattgtcagggttcctgttgacattgtctggaatatatgttcagctgatgaacacaattagggaaatagtagcgtaagctgtcaactccagatttaagaaaagaagagatctggtgtcatgacagacaagggaggcggcttgcggtggagggtaggggcttcagttagtagaagggtcttgagggatggggtggagatgggaattcagggaagtccttcaatgaccactggtcccttgagcatctgtggatttgtggaccaacagtcagaaggaagatgcttaaagggagcaagactgttctttctactgttttgaaccatttcttctatgctggagctccaggaatctcccaataattctcctactttctcctaaaagaatctccttcatttctttcaagacttaaagggacacctgagcagcccagcatgcccgaaggacttagattgtaactggtcagcctttcatgtcatgtggtggaagtttgcaggaagggccagagagtaggagtagcactgagcgtatatatgttattacttccttgatggatacaagagtttgctcaacatttgggctgagtcctgtctgttaccagtttaaattcatctgcaaggataatggagtgcaggtggcccaggccctgtgtgtctggcctctgactgcaaggctttactacctccccacagattgtgttgtatcgcgagcaggaagtcctggactgtgactgtgacatggcctcggtccaccacctgttgtcccagatccctcaggacttgccctatgagacactgatcagcagagcaggagacctttttgttcagtttcccccatccgaacttgctcgggaggccgctgcccaacagcaagctgagaggtgagcaaggctgggacactggttgaatgggggtggctgtaaatgagcagaagcgagggaaggtttgtgtctggtgggatagggttggggcatgtttccagagatctgagcttaggccagtggaatccccactgtagacatatgggtctttatcataaagagctttcccagcaatgaaaggctctgcccgcagcctatgtggtgtagttttgctttcctcctcctctttcataccacttccttccttccgtctctttcccctgcaggacggcagcctctactttcaaagactttgagctggcatcagcccagcagaggcctgatatggtgctgcggcagcggtttcggggacttctgcggcctgaagatcgaacaaaagatgtcctgaccaagccaaggaccaaccgctttgtgaaattggcagtgatggggctgacagtggcacttggagcggctgcactggctgtggtgaaaagtgccctggaatgggcccctaagtttcagctgcagctgtttccctgaaagccagagaagaccttcctcttacatcacattaaggtctcacccttccatggaaggattgggaggggtggaatttcctttattaaaagggtttctgtccagagttttttattcctgccaccctgccctgcccgtttgtgtttgcctttacttcagaggccagtagcagagcctacctgacacagaggggacctgggggcctggcacagaatcttatgcctctcccagtgggc

SEQ ID NO: 99622 - DNA, 1020 bp, Homo sapiens
gggacagcgggatatccaccatgctgctgtgagactcgggcagttgtgactggtttagaagtggatacacagggagaggtcttctggaaaaggtcttctggagagctgagatcagaagacaatcaactggcttcaaatctaaggagagacaggcacaaaatggaagagatgacatgggcactggttacctggtaaacacaagtggacactggtgagggactgggtcatggagactgcagtagtctttacccttttcagcgtttttcaccatgaaccccactgggagcacacagaagattggagaaagttttaataaaatgtctcaagatctggaagaagacaatggcagctactgtgaaaggatcacagtgctccacccagacccttccctgtatcccctaccggacaaaagccttagtctgtggagggaaggacaccaaatcctgtcacccccttggatgaagctcccttgcatctgggggaatgaaacaggaacaaaacaaaactttccctgggcaggggcaggaatacacactgggcccagaactgggggaggaacaggagcactaaggaggacataaccccaaaatcagagacacaaagggcctgacagagactgagacttgatcagaacagagaattccctcctcccccacctgccaatggtaagctgacaagccttgagttagaagtaaaaatgttacaggagagagacaagagtatgggaagaagaccctttctgagggtcacaaagggaggacctaaagctgagcagggagcacacatggaaggagaaaatccctctggcaggccagcctgcaccctcagtccaaggtgtcattggaggaactggaagctgctgcattgggggtaaccatagcaacaataaacctcaaacctagcccaactcttttttttatttactttttagagacaaggtcttgctctgttgcccaggctgaagtgcagtggtgtgatcgcagctcactgcagcctcaaactcctgggctcaagcaatcc

SEQ ID NO: 99623 - DNA, 1939 bp, Homo sapiens
caccacaagccaaagcgtctctggggattaaggatcctttgccataaaactcattttgtgtctcagcagtgcagggattggggatggaaaaagtcgccagtttttgtgtgtttgtgtgtgtgtgtaaagtggactttccactgtaatccaaccacctaagtttatcaggtgcttcactgaggaagcctagttttttaagcacaatagcaaaaccatcagctctgtattttctcctgttatttcattacagtagctgcttgtgggaactaggaaaaattcttccaacatattttaaggcctaaaatcttagttccccattctcctaccttatagattcacaggcctttctcgcctaggcatcatagataaacgtaattgtttggggagttgaatttaatgaacttatctaactttgtaacccatcttggctttagtaactttatcaaggtggtggctttagtgaatataatggtaaactttagaggacgctaaagcctccttttatagcgcttctcaacggtagggagagctgaagggaaaacattctgactgtgtggcagggtgattttcttccttatgaccacttacagtggatatttattgtacttgacccttttatgccctagaatgctgtgagggttaccatgttgaatttgtgcagaagctaaaagcaccagatgtgccagagatgcaatttgtgattatgtttgcactggattgtgatttgaacaggacacttataactaatgagttctttcttttgaggtggggagagggttgtaaatcaagacttcataccctatccttgtagctcggaaattgaggtgtagcttaggctgatgcggagagctgcagacagctggacctccttacacccatcagaccttggaataaaccgaaggtgaatgcagaggactctgaggtgccacccaagagccttttaaaataaatagaagtttttaaaaatgctacttaagagtcactgcagaagcatggagagagagaaaaaaaaaaaagacccaattgggtggggggtgggggggaggcaagggtttacagagtaacaacttacgtgttgttgtaaattacctcatctgtataccttgtattgggacactatttctcagcactacctgtgtctgcattgcttagatggcaggaaatggaatggccaacatgaaaggttatgttggcaattactctgaaagattttttaaagtatttttaaactttgtttgaagtggtccctcccctcttcctctgcttttttttaagtttgaagccagaaggccctccccaccttgctttattggttgtaattgtattgtaattggtatgactaaaccataactgtgctgggaagaagttgtgccatgaaggtctttaattttttttaataaaaacatttaaataaatgaaatgtccctgcagcctgagcaatatgcttctccaaccgacaccgtgtgtgatagatggctccgttttcacgttttgaattctgtttcttgtacttgaaatgcctgtccagcttacataagatagattaaattgttagagtgggactgtcagaggaatatatcttgtaaagtagatcctcagggtatggctaattactatagtcctaaagtagcagagaaaattagagattggttgacagatttgggaattttaatttcttcttagtttttaactttcatctttgcttcaccttttgacaagtatggttataattagaattgaccatttaagcatctcttgaaaaacctgattttgtcccaccagcaaattctctcccaagactggaattgggtttgcatagtagagagcctgtcttcccagggccttttcctagttaaagaaacacttaactaaaaaggctgtgtggtaaggtcatgctcagttccttcctcaaaaaatgagtctaaaattggtttatcct

SEQ ID NO: 99624 - DNA, 2024 bp, Homo sapiens
tttttttttttttttttttttttttttggagacaaggtcttgctctgtggccaaggctggagtgcagtggcacaatctcagctgctgcagcctccgcctcccgggttcaagcgattctcccacctcaacctcccaggtagctgggactacaggcgcccgccatgacgcccagctaatttttgtatttttagtagagatggggtttcaccatgttggccaggctggtcttgaactcctgacctcaggtgatccgcccaacttggcctcccaaagtgctggcattacaggcgtgagacactgcacctggcctttgtatacttttttgaaccttttgtattttgaaccatgtgaatgtattacctgtgtgtacacacacacacacacacacacacacacacaaaaacatgattagagaggtggaagaaatcaaatggaaataaattccaaaacacaattttatcttagaaaatgctctttccccattcaaattgactttcagtaattttgaaagctgccagctatcaagacagcatggtgtaagagcacatgagctttgactgcagtcatgtgctgttcagtatggtagtgactagccacgtgaggctatttaattacaattgaataaaatttaaaatgtagttcctcagttgcactagccatatttcaagtgctcagcagccacatgtggttggctactggtcaccagggtggacatctctgccctagacaggcctgggttagaatccaaccatggttgccacttgcttaatcgtgtactttggacaaactccttaaattgtccaagcctagatttctttacctgtctcttaaattgattaggacttgccactttaacttgaatttgtgagggtcagacttgaagtatatgtaaaaatccagctaagaggaagtcttcagtaaagaattattgtgttccttttgcagtgagtgctatgagaaactggtaagattgccatggttggtgtctttggctcactgacagctcttttctttcagggatttcttcagtgccaaccccttcaccccttggacctctggcaggctcaccagtgattgctgctgccaacccccttgggatgcctgttccagctgccgctggcgctcagcagtaacggccctatctgtctcctgatgcctgagcagaggtgggggagtccaccctctccttgatgcagcttgcgcctggcggggaggggtgaaacacttcagaagcaccgtgtctgaaccgttgcttgtggatttatagtagttcagtcataaaaaaaaaattataataggctgattttcttttttctttttttttttaactcgaacttttcataactcaggggattccctgaaaaattacctgcaggtggaatatttcatggacaaatttttttttctcccctcccaaatttagttcctcatcacaaaagaacaaagataaaccagcctcaatcccggctgctgcatttaggtggagacttcttcccattcccaccattgttcctccaccgtcccacactttagggggttggtatctcgtgctcttctccagagattacaaaaatgtagcttctcaggggaggcaggaagaaaggaaggaaggaaagaaggaagggaggacccaatctataggagcagtggactgcttgctggtcgcttacatcactttactccataagcgcttcagtggggttatcctagtggctcttgtggaagtgtgtcttagttacatcaagatgttgaaaatctacccaaaatgcagacagatactaaaaacttctgttcagtaagaatcatgtcttactgatctaaccctaaatccaactcatttatacttttatttttagttcagtttaaaatgttgataccttccctcccaggctccttaccttggtcttttccctgttcatctcccaacatgctgtgctccatagctggtaggagagggaaggcaaaatctttcttagttttctttgtcttggccattttgaattcatttagttactgggcataac

SEQ ID NO: 99625 - DNA, 1050 bp, Homo sapiens
ctgcaacatgacatttttccttcggtgtgatggttttgtactgaatcatttatacttttgcccaatacctgaagcagatagataggctgattgggatagagaatgtggtcatagccctaagctacatggacctatagctttggcctacttggtactgggctgtggacacactggtaatatattaccgtctttgccgagttacagtgtcttgtctccattaaacctcaacaggaccagggcttcattaaattcgctctgctataaataattacctcatctttctaccatttgattgaaaggttagcttttaccacagtttgataggaaagctatttctgctttttaccacttgtctaattcatggtgaaggcaattgccaccttaagttctttggggaataatgtagagtatatataaattgcaaagaatgaagctggctgctttcaggcttccagaccattagtttaatctttcaagcaaaacagaacctagcctttttgtctcttttctagacactgttgtgaaggaccaggctcgaatgggttcatctagcatgccagggggcagtacgcccgtcagcagcgccaatatgatgtcaggtcagttcattggtaaattttctttaaaaaaatgtggaagtcaattactgttcttagctttgtggtctgatttcttgtataccttctcttctccgtactggtggccttgtgacttttttttaaccaggtttcagcatgcttgacatttggtatactttagtgatactgtcttgagtagggtatccccttctaggctagaatctcagcattcctggctgaaaatttttggcataggggcttgaaagtgccaagccatgaaaaggaaaaatacaccatttcatcttatagtttgaaatgacagtagttacatggcccttagaaacaatgttaagaaatggggtatagaggtggggtttatacataggtgtgtatgtgtacaaggacagttccgtgacatgtgccagagcaactatagagtgcctatcagttgtaaaaacataagtaaaatggt

SEQ ID NO: 99626 - DNA, 1076 bp, Homo sapiens
actccatgcatggtgatgtgtggcagtagtccagactactaggaagctgaggcaggagcttcccttgagcccaggagggaatgctacagagagcaatgaacatgtggctgcgctccagtctgggcaacagagtgagaccctgtctccaaaaaaaaaaaaaaaaaggctatatgcagacaaccgactcttaacagtagtgactagatatagtacttatacacttaaccactcaacaggaggagatggactttcctgatgcaaaggcttttgctggccaattggcagagatgccaggaatatgtgtggggatgggaaataggcctggtgagctcagccacctgaccctccttgctacacagaagcggtcacgtcctgtcaagtaacctgaattatgtttcttaaaattgagaggactcagatgtcttttttcactctagctatgttgtttccagtctccagttagctttgttgtcccactcagtggcagagcggtgcaagactaccctcttgagtttggatccctctttgcttttgtctgggctgttagccactaagaaaaatgtaggaatgaaatgttgggcttctgtgcccacgtggcccatttctcatgccctcttttggtcctgcagacactctcgaaagcgatgggaacgctttgtccacagtgaaaatcagcaccttgtcagccctgaggccttggatttcctggacaaactgctgcgatatgaccaccagtcacggcttactgcaagagaggcaatggagcacccctatttctgtgagtccagatatctagcccacagagtttgtgcaggcgcagagtcctatagaacagagtcgtaatcccagctcctgtcagcttgctgcaaagttaattcacccacactgagcctcagattcttccagtggggatagtgatggcaactacattgcagaattactggaagaattcttctgtaacagaatacatgacacaagagcattcctaaataaactcttttcatactgtgaggatgacacttctcagtgcctcagtctggaatggttgaattagaatacacagccctgtatctttc

SEQ ID NO: 99627 - DNA, 1201 bp, Homo sapiens
tagattgatgtttcgggagctaccagcttagccttttgaaatcagacattcccccctagtctttgtcatttgcattgcttattttattgtgaagaatacatataaattgtcatccagatttttaaaataggacattaccttagaattctcctaataaacccttatctccaatatggtgttttctccaatatgtgagcccatatgtggtatttctgtgatccttttggctctttatatgggttgagttacagatgtttcttaaactaactccacttcccccttgaagatcaaagggctctttcattcacaagaacctggaatgattctaggaccttgtggaaggtaccattgtcttgttccctttgagcaccatgtccaattttaatgagtcaaagaatacaacctgaattccattaaagtcaataactctgtatcaagtgcatgcagtactgaggaatacagaaaaaagaaagaatagttttcttcccctcagatagttcatagctgatcttgtaagggagtcaaacatacaacaaaataggttacagtcataacttcagagtagaaatgtggacaaggcacaaaaggcagtagtggtgagtagtttgagtgtgcaatgggagcttcccaaaagaagtgacatcttcaattgggttttgaggggagaaaaataagggttcaccagggtgacatttcaagaggaagaaaccagtttataaagtagtttgctttttctaacactatcacattgagttgaagtctaaactgttaggaggtagcattcatacctgtagacatgatgacccgtttatgtaaattcaatcattgttaattgttgatttgttaatataatatgcttgtgatatgggtttttgtctttctttaatactagttggtgaggatagccaaggttctggggacagaagatttatatgactatattgacaaatacaacattgaattagatccacgtttcaatgatatcttgggcaggtaagtcatgaaacaaaatatgtgcatctgtggcttaagcactttgagagtgaactggcacttaggatcttcaaaatagttatgttttctttgccagcactgtcaggatgtcagtggtccagtgccacaggatgctgcattgagcaggcctctgataaaggcattggattgaatggccctttattcaaattaacttacaggagtctga

SEQ ID NO: 99628 - DNA, 1724 bp, Homo sapiens
caggagatcaagaccagcctgagcaacatagtgagaccctgtctctacaaaaaatttaaaaattagctgggtatggtggcttatgcttgtaattccagctacttgggaggctgtgacaggaggatctcaggaatttgaggcagcagtgagctatgattgttgcacaggctggagtgcagtagcacagagtaagaccctgtctctaaatacataaataaataaaaattaataataatagtatcagaacccttgtgctaagggttatggaatggggtctagtgggagtataatttagaacaatttgaaaaagggtatttgtaagatagctgggactgaccccttaacaaatatttgtaatttctgtggcccctatgtaagttaatattaaattttcaaaactcgtgaaaacacctgacgtgctagcttctggtatactttatctcacttaagagtcagcaaataaaacagtaaactttaactcagttctcaaagggtaattgtcctaaggattgtgtaaatttctgcttatagatgctaattgaaaatttacttacatttctaaagtggggtcaccaaatatcttgttcccagtagccacaagatcagcttcctagaagagagaattgctaaaagttggctaagctttcttactaaacaagagttgacataaagcctgctgttggagccttagaaatcccctgaggagattgtgccagcagagatacttgatctttccattggctcatgcagtttgtggcaagcaaggctttagaaagttacagatatgattgcccagccctgggaactgtaggaacccaagttgcccttcaggaaggacaagaatttggccaacaacgtcggctgactgaaaggctgggattaacaaaccccaaagattatactactcagttccctttagtttgaggttggaaacatttcagattggatttgatgacctaaatcaggcattggcaaacttctttaaagggccaaatagtaaatattttaggctttgtgggccatgtagtgtttgtcacactattcaagtctgctgttgttgcacaagagcaaccataaacaatatgcaaacaaataggcatggctatgttgcaataaaacattatttacaaaagcagacatcaggccaaatttggcctgtggtctgccaacctctgttacagactcttaatggctaaagaattactgttcttagaataagaggtttgtagtaaagatctgttttctttctttgaggggtctgtggaaataatctaggatctggacaagacagaaaaatttgaagtggtgcaatttgggtatactttgggtcttttaggacagaaaacatgttgaaacaactgtgtcagaaaaagatctctaagctcagagagctgagtttgcttgactgtgagatcatgaacaagtctctgaagcattgctgtggaagtgactgtgtcctcagcttgaatcccaggggtattgtgaggctaaaaggaaaatttacatggagggaaaagtaaaggactcttacgtattattcaggctaactcctttctgacccgttcatcccacaggccctggattattgtcacagcatgggaattatgcacagagatgtcaagccccataatgtcatgattgatcatgagcacagaaaggtaaagtgataggctgacaagtgttatttatctacatgatgtagctaattgcccatcttcaacact

SEQ ID NO: 99629 - DNA, 4599 bp, Homo sapiens
tgtatctatcctcaatgccatttttctcttccaggctgtcttacaaaaatcattcaaattttgcctgcagaggtaacaggatatttggcaaaatatgattaaagcaaatatcagtttactgtatttcttgggatttttcttctcatgttataggaagcactggttaacacagttgagctatatttattggctgtaggtaggagagccagaggtatatttcaggccattattatttgtaagattatttccttcccatataccttctgtaaatgattccttggactttgtgcattttgtttctgcagtttgaagaaaacaggtctgaaacaaggtcttacccccagctgcttctgaacacagtgactgccagatctccaaacatcaagtccagctttgtccgccaacctgtctgacatgtcgggacccgtgccaagcagggccagagtttacacagatgttaatacacacagacctcgagaatactgggattacgagtcacatgtggtggaatgggggtaattgtttttgttgacttcattatactcactcaaagggctgaatcttgtggatctgttgagtagtttttgtcagaaaacctccgtgactctgtatgtgtatacctcaggatcaaagcccaatttgtgttttcttttgagctgaaaatttggttttgcagtgaggaagcagagttgctttggcaagtgaacaattttaatgggcttaccatttaaaaatcattttagtttcttatccttttctatgatgtatatgcagtcgtgcaccacataacaaagtttgaattaatgacagaccacatgtaggacagtggttccataagattataagagagctgaaaaatgtctgtggcctagtgatgtcatcgtaacatcaacagtgcattcattaccttttctacgtttagatacacaaataccattgtgttacaattgcctaaagtatttattacggtacacatttgtatcctaggagccgtaggccataccctaggtatgtaatatgccataccatgtaggtttgtgtaaacactctgatgtttaacacatttctcagaatgtcattaaataacgcatgacggtattctgtatgggcacctggcaacaaaaagttacctatcagcttgcttatcaagccaagggcattgcagatcagtgagaagtgatacttgagagactttgaaaacaccaaagtcttatataaagtatttttgaggtagagaatgttgtttcgtgttaatacaggaggacgaaacagttctccaaagaggtaacttctttctgatgagaaacaattaaattcttaaacatttgcccttatcctgagactaggcatgtcttagcatggaattcagcccaaattctatcttgaacagttgtagtctgcctgaacagctgtgtttgccctcctaattctctgtgcagactcatttggatgtttgcatttcctgtcccaatgtggtagacatttaattgttcagatcatacttttgtgataaaagcattttgacattcaagtgcaaaagaaagcaatttgaaaactaaagctacagctcctgtatgctgtattttatatctgactgcatgtgatttctgtaacctgtaagtggttagtggatggcttccctaaattgtcatagggcgtatttttaatcttgagtatgccatgaatttgtgtatgtgtgtgtgtggaaatgagtcttgctctgttgccctggctgcagtgcagtggtgtgatctcggctcactgcagcctccgcctcctgggttcacgtgattctcccacctcagcctctcgagtagctgggattacaggcaccttccaccctacccagctaatttgagtatgccatgattcttaacagtaaatacattgcctctgaatacagaggcactgtatgctgtaaagacaccattaaatgccagtgtggtttagtaccaataaatgttgttattactgataatctaacaattctcctcttatgtcacaggctttggactctaggtgacactgtgtttactataggaatttcagccgctatcttcaaattgagtgctttgcacttggttctgcttaaatggcactaaagagcccttttgggcttttggcatggttctgtttgcttgctggcatttgttttgtatgccctcccataggaagagaactcaaccagaagtaggagcattcttcccctacacctgccatgattattatgttgtccattgtttttagtaccttttgtcttttcattcactttctttttagctacttgaggaaaatgaatggttgaggtggttgatttggttcatattggatacttagtaggtccagaggattctatccagtaggatagaatttaggccttattggaactgtgtttgtcattcttcagagcaaagcgctctacattggaagcaggcaggggcaggaggaaaatgttggcatttcccttattctacctctgtttattacctctgatgttgcttattggtcacagaatatgggtatatgtagaggaggggatcgctgattatagtttacaatctataatgtgcttcgtactacgcatggactatccccagagcttgccctggagggcaaatagattaagcctatacatttgaaagccatttaccttcaaagaggcctgttaaaaatcagctgctgccaaagtgtggctagattgaaacagtcttgcaaaatgtttttagttcctgctaagtgccaacactggaccaagcactaagggacaagaatatataaaaattattctccggccgggtgcggtggctcacgcctgtaatcccagcactttgggaggccaaggcgggcggatcacaaggtcaggagatcgagaccatcctggctaacacggtgaaaccccgtctttactaaaaatacaaaaaaattagccgggcgtggtggtgggcgcctgtagtcccagctactaggggaggctgaggcaggagaatggcgtgaacctgggaggcggggcttgcagcgagccgagatcacgccactgcactccagcctgggcgacagagcaagactccgtctcaaaaaaaaaaaaaaaaaaaaaaattattctcttggggaaagctgtctcttgttggagacaaacgtatttagaacaaaccttaatacaagccagctccatgtcatgtgccaataaagatgtaaacagtttgggattagaaagaataattgaaaggtataagtttttctaattctaggatttgaaacacacgtattttaattggcctaatttaaaaaaaaaaaaaatacaatgggccaggcgcggtggctcacgcctgtaatcccagcactttgggaggccgaggcggacgaatcacgaggtcaggagatcgagaccatcctggttaacacggtgaggacccgccgtctctactaaaaattcaaaaaattagccgggcatggtggcaggcgcctgtggtcccagctgctcgggaggctgaggcaggagaatggtgtgaacccgggaggtggagctggcagtcagcagagatcgcgccactgcactctagcctgggcgacagagtgagactccatctccaaaaaaaaaaaaaaaaaaaaaaaaacctatttgggaattgtttgaaatacttcttatttctattacagctgctggtaatagattcctgtaatttgaattgatgctgataatttgaccgtttataagtcattttgtttgtgtccacagaaatcaagatgactaccagctggttcgaaaattaggccgaggtaaatacagtgaagtatttgaagccatcaacatcacaaataatgaaaaagttgttgttaaaattctcaaggtgagtacaagagataatttcagaggtatttggaatatagatttttaaaagtagttttgaagacttttttaaaacagcatttaaaaggtttttggtgccaaagcaaataaataaaattttattgtatcctatgaactcaatagaacaagttctgcttatttgacagatcgggaaactgaagcaagagaagtgatttgagttgactcatatagctaggttgtggcagagtaagggagcaaaggtacagtctcttctctcccagttattgcctaatacttatttcctttacttttcattatataatgaggcttttgttttcaataaataaatcattgcctctactttgtaaagatgaggagtcacaggactcgagggggacagacagatgatattagtgcagctagtcgggtgtaattgcccttgcttaggtgatgtgagtggtagggactgaaacaaactgggaaacacatgcctcttcaaaaggagttagctgcttctcagctgaagctgatgattgccctgcagtaatgcaagtccattgttgcttgatactctgttttgcaaataaaagccagaaatttatatttgtatatgaattttcctgacttttaagtgttggctcaagattttaaaaaaacaatgcacaggccagatttggcctctgggagaccaatatacaacttttaatttagttataactatgctgtgcactgtcatatattgggaacttagcatatagttccttaccaca

SEQ ID NO: 99630 - DNA, 1060 bp, Homo sapiens
ctccacctcctgcagtatgggatacagtctagagtattgcatttatgcaatgtctctttagcctccatttgtcttttatgctgtggacatgttttagaagtatagtaccccttccccctttttaaatagacacttcctctttttctgaatgtttcctggtaattgaattgaagttatggctgggtgcggtggctcacatctgtgatctcagcactttgggaggctgaggtgggaggattgcttgagcctgggagttcaagaccagcctgggcaacatggtgaaacaccgtctctactgaaaatacagaaaattagctgagggtggtggtgcgtgcctgtagtctcagctacctgggaggctgaggtgaaagaatcaccggagtccaggaagttgaggcttcagtgagccatgatcacaccactgcattccagtctgggcagtggaataagaccctgtcttaaaacacatacacacatacaaattgaagttatgctgtctcagccaggagacttgcatacgtgttatatccttctcacgttatcacaatctggagactcaatacaatttcatctaaatgcataatgaggggaatcagcacatgctgtaggagatagggaagacatcattggaaaggaacctgatttgatagcatatttctaacatcttacttattttcccccggtgtcaaattttgcattagctcagctaatctgtattactgttttataccagtttttaagctcctgtattaaatataaagagaatattactgatttctgtttttaaatttaatgaaaccaagtgtgtctttcaaatggtgatcaaggttctactgattattaccttaaggttcccccaaaagatttggattggtataagatgacatggagctttgatgtatgagaacaagcctttattctcttcctggtttcatcaaatatgagtcagaatggcaagttgtactcttagctttgccgccattctagaaccttttagcacccctacttaagttacagaaagctgctgaaaagaaagtatttttcttgccaataccttttg

SEQ ID NO: 99631 - DNA, 1022 bp, Homo sapiens
tttttttccttttaagatggagactaataaacattagggttaaaaagaactaattatattacagttcaaaaattgacttaaagttctagaatgatcttttccatttctgatactaggaaattcatcaataaaaatacattagcagaaatgactaagcaaacttgtttgtatagttttctggtattggactgttactaagcctctagttttctttttagttgccaaattgaaaaataacaactgaacataagagattagaaggagggactagctaagggcaagaggagtttttattgaaattaattctgctgtattcagtgtatatcagtaaacttatgattttggcaatggacaatttttccttatggtttaatggcattttctttttatttacttatactttattaaagaataggtcatgcagacccatgcagttggcttcgatgtgatcttacttcagtcgggaaaaattcattgacatgatacttttttcgtagctgattaattggcttctgttaggctaaacgttgagcatacaagacctagccatgtcttcaaagtcattctgacggtgttaaggtagatgtagtggtctgaaatggttagccactaaagttacacctccttttatgcaattacatgagaacagtaagcactaagtaagacaatttaaaatggaacttaataagaaaggcagtgcattttgttagattgccttaagatatactagtattatgaacagtggagaggagaattgatcttccaaatatctaggactcaggcactttttccatcttccaaataagctgctataaaaattggtaaaatcaagtttcttcagtattctcttaatttgaattatcgaggggaaaaagacaaatcctagttgtagtcctgtgatttaatagaagctgtagtattgggaaagagagagagggaagggaacaattactcaagaacctttgacttggttttccagttctcctagttgcgtaccagatgacctgaagtatttaggaaca

SEQ ID NO: 99632 - DNA, 1019 bp, Homo sapiens
ttaggtgtttggggtagaactattaatccaaatcaaactgcttggattttcttctaatacctcccttcattgggagacctcacactgttgctatgtcatttatgtcacattgacactcagatcccttttctgggttgaaggtggagaaatgtaattcacacaaaaggcccaaatgctaatgttttctgttttactgtacttcctggtttgttttatggaagtaatacttccgtgtattggtttaatttttttgtatgtatgtatgtatttattttgagacagcgtctcgctctgtcacccaggctggagtgcagtgacatgatctcggctcattgcaacctctgcctcctgggttcaagtgatgcttctgcctcagcctcccaagtagctgggactacaggtgtgtgccaccacacctggcctatgtgcattgtttttaaaaacaaacatgttgtatgttttgtatgtaggaataaaagcagaaggcccctaggggcatgttaggatttataatctcctaaagttaaatattctgcaagtttacacaagcagtaacttcatgaattactaagtattactgagagtatttatgttccaaattcgaagccttaatcaaaccagaaaaaaacatattctgttgggtttgaacaggtagttttcttattcattgtatacttagaaccttgggacttaaaggtcagagagtcaagggaactgccaaggagttagttgctagatatttttttgtttttttgagctgtatatatttccccacttgaaaaaacaaaaacactactacttatatggcattagtatgataggtgagagagaatgttgttggccatggttaccaccttaaattgacatgggaaaagagaatcaatatgaagtggaggaaaaaaaacaataacttcatttaatcatacatttttaccgttaacctgttttcttttggcttatccttctgagctagggtaaggaggcttgttttgtctttgttgtttttgtttttttgtgtc

SEQ ID NO: 99633 - DNA, 1105 bp, Homo sapiens
acagttttagggttaaataccaaggtacaagttagattaatgttttataattttttatgtgtgacatcttaaatgcccttatattggctgctcttttctttttatactttcttgtcttgtgggtttttctgacaggtttttattagctgaaacattttaatttgcttggaaaagtgaacatttgaaattttcctgaagttatgactaatgctttaatgggcatttctcagtttagctatctcatcaatgttctataaattttaagaaagctaccctgtttaaaatgaatgggtaaattattttccaaaaaatggtatcatgtcatatccagaaatacgagatggtcattttgggttattgaattcataaccactcagaagatgttgttcattcagcagatcctgagcgcctgccacgtttctggcaggcgttgtgctaaagatctccaaactgtcactgccctccaagctcaaaattgagtgacgttttctgataacaggcatatcataccacaacttagtagattttggaggtgttttcttataataactcctatttgctttgtatcttaggtgtagtttttgaaacagctgcagaaatgagaagggggtagaatagagaattaattgagattgcgggtagggaggggaaggcaataggttagtgggaaagaactcccactttgagtttggggaagtttacttaacctcttcaagtctgggagttcttgtctctacagttcggataacaactaccttgggcaacttactaacttttggtttcttcacctgtaacatgggaattagtagtacctacctcaggatttttgtgaggattaataactagagtactagctagtattatctcaggattattgaggattaaaggagaaaattgataaaatgtctggcatgtgggtgcccaacattagttctttcccttccctttcggagaaaagaatgtgtttattgccagtgctgtcattcttcattctttattttcattttctgctgccaagagttcttatttttttaatgagacttttgacctgtacttccttgtttctaatgtagcctgttgggtgggtgaggtatgaattgctgcc

SEQ ID NO: 99634 - DNA, 4267 bp, Homo sapiens
ctgcagcccatcggggaggcccaggggccacccctcagggcggagggcgaggtttgggggcagaggccgatgtgagggtgggaaccggctgccggagtccagcttattgcagaggagaggactgaactgggtggggactaggggacaacttggaggagggggtcgtcagagggggaagggaacttgaggggtggggccgcaggggggtgctgggggagggtgcggagggagtggtgcctgctgggtagtgtgcagtgaaccctcccgcgaaactgggcagctggagtaggggccttcttagggtccctctgggcggggctgagcttcccacctgcagagtgggtgcgaggtggagagaaccccaggcggggttgctggggcgaaagggggaagggaccaagacgtggggcagaacgtctggagttggagttaaggactagttaggagcctggatagaaaaagaggtatggagagaaagcttggctaagggtatacatatgttggtgaccttttgaaagagtaggacttttcaattttgtttttcgttgtgtgttttttgcagtgttggaacattgctagattaagcaggtgatgggtggagcttctgtagtttgttttggggaagcagagtcagggtcaggagaagttgcatcttggctattgctttgtgtggaggaaagagttttgaaaagaaggtggcaaattatttgggaagacttgattacttttcagctgtttaattctacgagaatgggacatggggagaggaaatgaaaactaagaagagaggccgggcgtgtggctcacgcctgtaatcccagcactctgggaggccgaggcgggtggatcacgaggtcaggagttcgagaccagcctgaccaacacggtgaaaccccgtctgtactaaaaatgcaaatatcagccgggcttggtggcgcgcgcctgtaatcccagctactcgggaggctaaggcaggagaatcgcttgaacctgggaggcggaggtggcagtgagctgagatccgccactgcactccagcctgggcgacagagcgagactccgcctcaaaaagaaaaaagaaaactaagaagggaagatttttccaagaattggagacttcattccatctgaggagtgcagtgtaggcccagtggttaaaaaccagactgcctaggttctcaaatatcagggccattgctacttagctgtgtgacctaaactctctaagcctcagttttcccgtctgtaaaagggggatgatggtattttctagcttgtgagtttacggagaagagtaaataagacaatttgtgtcaagtgcttactacagtgtctggcaggtagtaagtgtagtaagtagcttttacctgtcactgtaaagggactagctggtatatttggggctcttctgttctaagtaaaatttatagtcaagaatttgactgtagacagggctttagagtagtatctttgtagttgttgtagggttttgttgtaagtcatttggctttactggcttggtggacctggggctgaaagtccagtaccaatactagttctcctccgtggtattctcaaaagttcacctgcagtcttagcagggcatgtttttgtccttctgtgactttgaaatacttggctttggtttgctattgcgggagggtgtatgacttgaagaaagaatgcaagattggaaatttgcttagattgattaatcaactgattatacagttaggtccccgtgaggtgacttttctttaaaaataaaaaaaagcctagttatgtactcctttgtggaatacagagaagagaaatacacatttaaggaggagcatgggttagtttctaagtagttatgggtgaagtgccttgcaatttgaggatgaaacaggtggcaactccttttccatactgcgcgtccttttcctactcactcatccagagtgagtccttgtttttactattgtctctatctctgaacatacatctttgtgtcacataagtaaagacatatgtatgtatgtatatatactttacttcacataagtaaaatatatacatctttacttcacactctgttaaagaaagggatgattttctttaggaagtgagtttaaacccttccataggacttggatttgtagtaggcagaattacatctccctcttcccaaggtgccataccttgatccccagaatctgtagctatcctgtgttacatggcaaaaggaacttggcaggtgtaattaaggttaagaatcttaaaatagaaaaattatcctggattttctgggtgggccgaatctagtcacttaagtccttaaaagcagagaactttctccaactgggatcagagaaatgggcagaaaaggaaatcagagatttgaagcatgagaaggactccatttgcctttgctagagaggaccacatggaaagtttatcagaaggaatgtgggcagcctctagtggcaaagaccagtccctggctgacaaccagaaagaaatggggacctcagttgtgcaaccagaaggaacctgaatttggtcaacaacctgattgagcttggaagtgaatttcccagtttccaccaaggaatgcaaccttgagacaccttgatttttggcctcgtgagaccctaagcaaaagacctagctagccaagcccacccaacttctgacctacaataactgtgagataacaaatttgtgttatttttagctactacatttgtggtaatttgttatggcagcagtagaacactagtatagattttggtaccaggagtggggtactattacctaaaaatgaaagtggcagtagataaaggttagaattgttttgaggggcatgatagaaaaggcctggaacacaggaggatcgcttgagcccaggaagtcaaggctgcagtgagcggtaatggcaccactgcactccagcctgggtggcagagtgagaccctgtcaaaaaagaaaaggcctaggacatacttttagtagcaatatggatgttaatgactctgctagtgagggcccagacagaagtgaggtctttcttattggaaactggcagaaaggggatccttgttacatagtagcaactaagtttagcagaattgtatcctatggttatatggaaagccaaatttgcaagtgatgaacttgtatatttagctgagatttccaagcaaagtattaaatgtgcagcctggtttatttgtgaatgtgaactttaatggagtggacccatgtggaatacttccacagcccattaggttcttgagaattttatgccaacataaacagttctagtttggattgaaagagacagaaagtaatagggctgttggaccccccaaattctactgataggaagcaggctgataaaactactcacatgtgaatgtgttgcttttcataaaagaatcagggtgactcagacggagataggagagcccagaggggtggagctaaaagctggagaggatttttcccaggctttgaaatggaatggagattccctagattttgaaactgctttggaccggaggctctgttttcttttacattttgcccatttgaactggaatgtctaactgttattctctacatgtctcacagtggtatgttgggagtagagaacttgtttctttaggaattgtgccccaggaattggacttactgttttgtccccagaacctcatccacacctgaatagatgaatgagatttgggacttctgaaatgataagctttagatgggaaacctttgggaccttgggatgggatggatgtattttgcatttgagagagagatgaatccttggaaaccagaaggcagactgcggtaagcagaatggctcccctacgatttccatactataaaccctggaacatgaatatgttaagtagatttaattaaagttaaggatcttaggtagattatcttggattttctgggtgggtttattctactcacataagcacttaaaagcagagaactttttctggctggtgtcagagatgaggcagaaggggaagtcaaatttgaagcatgagaaggactcagcctgccgttactggaggggaccagattgaaagtgtgagacggggaatgcaggcagcctctagtaggaaaggccagtcccagctgacaaccagcaaggaagtgggaactcagtcctacagctgcaaggaactaaattcagccaatagcttgaatgaatgtggaagcaaattttccccagagtttccagcagggaacccaccca

SEQ ID NO: 99635 - DNA, 1055 bp, Homo sapiens
cggcctctgcccccaaacctcgccctccgccctgaggggtggcccctgggcctccccgatgggctgcaggggcctcgcttggtttatgtgtgaaggtgggggcaggggaaggcgacgggccgctcaggagtctgctggaagcgtgagggtcggccgcgctccgctgccctatcctgggcccaccccacccgccaacgacctcgcctggctgctccctaggtacctgtggtggaagcggcagcggcggcggccgctctcccctctgctcacacagacaatatggcggcgatggaggaggagacacacggctcggccgccagccgcagggaccagagcgaggctgcagccgctgctgccggaagcggaaaccccctcctaccaggaggcggggcgagacagcttccgactccgcccccagaggaatctctctgaatgcggccatgctgggatgtcctattgtaaccttagggattcagttctggcctagggtgcaaaatggaaggaatccccaacgcaaagcagaataaggagacttgcaatagttaagcgcattttatttcaatagtgttaacaagtgacaacagagagaacacgaacctcccattaggtgaacagttggtttgacccaagttaagatggcggtacccaggtttcccacacttcacccagctggcccccctttcttgaaaagaaccatgcgcgacctgcagagctgtagagccaagcattctgggagctgaagtctcttttgctctgacccctcgttttaaattagggtttcagcaacactttctattcaaacttggagttcggaagaagtgaatgaaagttggaccctaggaagggcatggcgcaggagtctgagaagtgaggatactagctctcaagagaccaaggcccaattccttcctcctacaggagtcctgccaagagctgtgcgtccaaaatacagtgtttttttttccttctatctgcctcccacccctgctctccttgcccgagctacctccccaaaacagccacaaagcactttctaccatgcagagctcatcatg

SEQ ID NO: 99636 - DNA, 1050 bp, Homo sapiens
atctttctgttctagctgctcttactagttagagactgagccagggaggcccagaggggtcaagcaacatctctggggtcacccagcaaatctggtggcggagtgggcctccagccagagcacccaagtgtctgctctgcccccactcccaggcttcctgccattgacaaggccacagtccttttcctgtggctttgccagaggctggctgtacctgggagggtaggcgcagggggagcaatgtgctttcctaatcagctcccaaagggggaagcacagccacgctgggacacaggataagcacgaccagtgttcctgaaacagcggggaagtgaggtagagggtgcttggaaagctctcctgggtgggggaccccggccccctggggccctccttcctctacttcttacaccaaaggaattaagcatggtaatttcatggcctgctccagcctagggactggcaattccacaactcccttgatctccctgggcctcggttttcatctgtgaggaagaccaggttggtcgggctcattcctgtggcatctggcacagtgcctgccacacagagggtattgacaatctgtttgtcaatttgcaaaatcggagccacaattcaggctcagatggtcaaacgcaggggagtggggtagaggcagaacagaggggatacgaacgtggactctggggccagagtgcagtcagtaaacatgaaatagatcacttgagctcaggagtttgagaccagcctgggcaacatagtgagaccctgtctctaaaaaaataaaaataaaagtgtttgttaaataaataaactgttgaaataggcatatgaatgtaccttgctgaggagagggtggctgcctggctgccctggcctttccctggctctcccaccctcgggcctctcgagcttctctgatcctgacctcacagggacacagccccagcccgagagccaagaactcctagctgcactgatcagctgacgcatcgctgtctctgctgggtctgcagtggggaagacaccagctctcacctcccaggg

SEQ ID NO: 99637 - DNA, 1171 bp, Homo sapiens
tttgtccctaaacattgtcatttggcagcagtctgtatcagtccagaaagggtttcttctgctttctgttgcagagaacttgatcgtgtggctgaactgtgatttattgatcaggatccctcttgagggatacagaggttagttccagtgttcacactggcctaatcgaacctctttatactctttctccccctctgcagggtggccgtcgtgacctggggggcagctgcttgaaggtgaggggggtggccccccttcgagggccacggagatgagcctggaccctggagaaggaggccaggagccagccactggctggacagggaagaagaccccaggagccaagcccaccccttctttgtgtagggaccgggggaccatggcctgttccgggacactctgggcagggccctcgggacatctccacccgatcctggagagctgtgaggatccattcagcctgcccagctctggctggtcagagacaaggcagaacttttggaaaaacaaagactgttggtgacagggtgtgtgtgtatctgtgcgtgagtgtgagtgtgtgtgagagagaattggtgagtttaaaataaaagctatttttaaataaaagacgtcgttctgagctgaggagagtcccgtggacatcggaggtcagaggtgggccctcccctggacctagagagaggcacagatgttctgggggctgccctgagccctggaagggtgggggtggggcgggggaaggcaggcagagccccctctccgggcgccataaccaaactttcctcagtctgctgtttatcagatgttcttaacaactgttaggtgtctgatatggttggtaaagaaatcttaattttacttatttttgaataaggcctgtgttcatttcattcacatggttcaaaactcagaaggtaccagagggtatgtgttgaaaagtctccgtgcccctgtcctccagccaccagctctcctctctgcaagcagcctagggcaccagtttcctgtgatgtcccattcactatgaatgatcaggcaaatacacaaatgacagcacatcgtacacacttttggctccttctttttttccttaatctagcttggtatcatcccaagtcagtacctaaagggtatttcatttcttcctgagctgcttattattccattt

SEQ ID NO: 99638 - DNA, 1492 bp, Homo sapiens
ctctgcatcttggcctgagaccaccctctgtctggctcatcagatatccagcctggttgctcaacacttggctgcctcagttgccctgaatcgtcggtcttcttagcctcaggcttgtgccctctccagggtccctgctgctcccagctgtgggcccctgtcagtgccccaggctgggctgagaagccaggagtgggcctttaaggcttcctgggatgggagggcctgaaggggctctcagggatactccctgactgcctttcacccattcattccagttagcaacccttagctacccaacagctgccttctgttggctctgagaaccccagagaagcaggttgtaggtccccacccttccaccagtcaggacctgacagtacagccccagggtcagggcagggagatgaagatgaggatgctgtggtctgatggtgggggaggggaagcacaaagggattctcagagcccagagaaagcctccaacccagggtgagtgctgacagggtttctgtgtctcatttctgaaggatgctttagaacaggggcaggccgatgaaggggtaggaaagggtgttctaggattggggcatacagcaagagctcaggcctagagaaggaagagggaagaggttaaaagtggcaggagtgcagagggggagcacaatggccaataacagcagtgacagcagccttcatgagcactgatctgtgctaagcgctctttatgatttatcattaaaatcctgcaacagccaggaatgaggcgctgtggttatccccacttgcttagaggtgctgccagtggcgcagagacacacagtcagtgatggaaccaggattcaaactcaggcctgcctggttgggacgtgggataggttacagagggaagtccctgtaactgtcatgtgtccacccccatagcaagcaggctgggggacttctctgcaggtctcaggcctgtcccacagctcacaggggcctcccctgggcctggccgcttccctgggatctgtctatgggaccaagaactcagccaaatttggctgtagaaaccatgctctcaaccccacggtctcctctgggaataggcgagaggggcaatcctggccagctatggccccttgaagactctgctggaagaaaactggctggcttggggagctcttgctcccttctgagctttgtgggccagaagagctttaagacccaagaccccgttcctttaccctgagccaccacctccctcccatcctggccagtctggagttggggttgccgtggaaacagtttcctgtagcatctttctgttgaaggaggggttaggtgtggccctctgtggtagaattagcacgtgggaggtggaaagggggttcttgtctctgccctgttttccctttgtcacctgggggtgaggattggacaggatcatcttgtaaggctctcccctgttggtatacccagagggtagctgggaccaggaggcactgtc

SEQ ID NO: 99639 - DNA, 1049 bp, Homo sapiens
aactgaggcccagagaggagaaagggatctgcccgcgtctcccaggtggtccaggctggagacaaaaagttcggatctgggcccaccccggccgaccctcccagacctccagcatctgccgggctagccagccgggaacgggggccttcggggtgggccgccggctcccgggccgctttcaacctgggggacggaggcggtgggagcgtcgccattggccagggcgcggcggacgcctccccattggccgggcggacgcctccccattggccgggcggagccctccgcccccggccggggcggccttgccattggcccctccctcgcctataaggcgggggccggcggggccgtgggagcgcgcgggagcgcacggcggggcgcggccgacgctgggacgcggcgcacggagggacgcggccggcgcccatggcgttcgcgctgctgcggcccgtcggcgcgcacgtgctgtacccggacgtgcggctgctgagcgaggacgaggagaaccgcagcgagagcgacgcgtcggaccagtcgttcggctgctgcgagggcccggaggcggcgcggcgcggcccgggccccgggggcgggcggcgggcgggcggcggcggcggcgcgggccccgtggtggtggtgcgacagcggcaggcggccaacgcgcgggagcgggaccgcactcagagcgtgaacacggccttcacggcgctgcgcacgctcatccccaccgagccggtggaccgcaagctgtccaagatcgagaccgtgcgcctggcgtccagctacatcgcgcacctggccaacgtgctgctgctgggcgactcggccgacgacgggcagccgtgcttccgtgccgcgggcagtgccaagggcgccgtccccgccgccgccgacggcggccgccagccgcgctccatctgcaccttctgcctcagcaaccagcgcaagggggtgagtgtgctgcgtccctcgctgcggccgccaggtcggggtaggcggggggcagcgcctctgcgggaaccggagaggtgcaggggtccccaacg

SEQ ID NO: 99640 - DNA, 1054 bp, Homo sapiens
ggcacactgcctcctgcaataaaactgggatcccattaccaagagagaaatgcagaattgtgtaccagttagcttttgctgtgtaacaaaccatccccaaacttggcagctagaaacaaaccctgtattttcccacaatcctatgggttggcaatttgggctgggctcaacagggcagttctgctgctcacacctgggatccctcatggagctaaggtcagctgttacctcagctgggcctggatggtctaggatagccttactcacttgcctggcaggtgacaggctgttggctggaattgcttggttctcctccatgtggcctctccagcaggctagctcaggcttattcacatgatggcttcaggattccaaagagagtgagagtagaagctgaaagacttcttgagttcttggcctggaactgggactaggacagtgtcacttctgctaagttcttttggtcagagcaaatcacaaggctttacccagattcaagggatgagaaacagactacatgtcttgatgaggggaaccacaaagagcttgtggccatttttcacctatcacaaataattttggatgggtatttatttggataaaggtatttccctcttccccctttctctctgtctcatggggcctcactctgccaagttggaaggcactaagacattgtcctggccctcagggtctaggggaagaggtgttggggcaggaagtgagtctctccatgggctggacccactgtagtaggagtgcctccttgtctgcactgctggtatggggttaggccaggtaggacattccagaggggcttctgaaaaccaagagtccctggggaaagggaacagagtaaggcaggccttgttctcactgccctctaagggaacttggtcactcggcacttttaagcctcagtttctccagttcaataataaggacaagagcttttcccatgcattctctttccccgggaaagttgactgaggtgaccagtaatagaattgaaaagggagagtgtcttcagtgcaatgtggcatcctggattggg

SEQ ID NO: 99641 - DNA, 1048 bp, Homo sapiens
gggaagcgccccttcctcatttgggagtggaggcttagggaatcgaggtgactggtaggcctcttcccaccatgtgtacctcagcaggggccttctctcaagggcccttgccctgatcatgggcacgtgaacccagaaaagccactggattctccttcgcccccgggcggccaactcatgggacccgtcggccccgcaggctcactcccagaaggcgctcctcgcacctagagagtattccgtgggttcccctgagccctgtgagagttctttgctccggcgctcgccccgcaagccccgtgactctgcacctcttccctcccggccccgcaggtggcctcgtgggtgcttttcagcggctgcctcagttacgtcaaggtgatgctgggcgtggtcctgcgcgacctcagccgcagcgccctcttgtggtgcggggcggcggtgcagctgggctcgctgctcggagcgctgctcatgttccctctggtcaacgtgctgcggctcttctcgtccgcggacttctgcaatctgcactgtccagcctaggcaggccgccgaccccgcccccatcgctcacggacggaactggggtccagagaggccaggtcacagagcaaggggcaggaacagagagacagagcctgagtaattgaatcatgaacgcaagtgcccactggggactgtggggaagatggcacctggaaatgcaaggtgcggctctatccccaactctgtgtcacactacctgtgacgaccagctcagatctcctttgctttgactctcaagagaggactgatttgcagcatctagctggaggcaggcccaagggtgttagaagggaaacagctgggacagccggctgtcccttcaggctgtgtgaccttgggaaagtcatttggcttctctgtgcctgtttcttcatgcatgcagtggggattccagtaagtaccaactacctcacaggcatggcacggaggcaaaaggaaaaagcagcccgcatcaagcaagccctcctgggccacctgctgatctgacagtccatcgtag

SEQ ID NO: 99642 - DNA, 1036 bp, Homo sapiens
ttgaacttttctttcatgaatcacggttaggaaaggcttctcttgttttctgctaataaaaagacagcttgggccaggcgtggtggctcacactgtaatcccagcactttgggaggccgaggcaggcggatcacctgaggccaggagttcgagaccagcctgaccaacgtggggaaaccctgtttccactaaaaatacaaaattagctggcatggtggcatgcacctgtaatcccagctatttgggaaactgaggcaggagaatcacttgagcccaggaggcagagggtcactgagccgagatcatcccattgcactccagcctggactaaaagagtgaaactatgtctcaaaggaaaaaaaaaaaagccagcttgttcacaggaaggggagtaataagagaaaactctgggccccaggtcccagcatcttgctaggtggtgaagctggaattactcacctggtgtccttctctgccagccccgctgcaggctgatctgagaaagcctctggcccagggcagataccgccatggccttcctgatgcacctgctggtctgcgtcttcggaatgggctcctgggtgaccatcaatgggctctgggtagagctgcccctgctggtgatggagctgcccgagggctggtacctgccctcctacctcacggtggtcatccagctggccaacatcgggcccctcctggtcaccctgctccatcacttccggcccagctgcctttccgaagtgcccatcatcttcaccctgctgggcgtgggaaccgtcacctgcatcatctttgccttcctctggaatatgacctcctgggtgctggacggccaccacagcatcgccttcttggtcctcaccttcttcctggccctggtggactgcacctcttcagtgaccttcctgccgttcatgagccggctgcccacctactacctcaccaccttctttgtgggtgaaggactcagcggcctcttgcccgccctggtggctcttgcccagggctccggtctcactacctgcgtcaatgt

SEQ ID NO: 99643 - DNA, 1048 bp, Homo sapiens
cccgcgtcgtacctgcgtgtcatttcacagatgaggactctgaggctcagagaggcaagtgtcccggcccggcgagctctggcggagaatccagttcaagtctttctgccccacctcgcagccccctagtctagtcacatctggacttgccttgagaggcccagacgggcaactggtagtcattttcccagcgttttatcggcagggacctgtagacccctggctggatcacatatccccgcgccccacactgtcctcgggataccccctttgggcgtctgtctttccttctccgcagtccggggttggactcggctcatttggcgcctttctgtctacggggacagaggaccactctttggggatcggacgggactgacatttctgggctggatgcaggggcagcagattctccagcccccagagccgctgctggcctcttgggaatcatccccagtttggggaagggaatagagccagtccctaaaccaaagccactagtcaccagagactttggaattgggagtggggccggaatccccccaggtggagcagctgacctaggccagaccctgctgtgtctcctggggacaccccctgccccctaggttgctattgtcagtctccttttgtaggtggggaaacggaggttctaagaagttaagccccttttcgaagtcacagtcagacaatgcagtggttagctcctagtccctctggcttcaatcttagaatccttgacacacagaatcatgcattttgagagtcttcaatctcttcataagggagttacatatcctctctcctctggagcctgcccctggctttgggggacaggatctccgaggactcagaaagaaaacaaggctttcttttattctttcaacaaatattatttattgacttcataagccctgctctggttcttgcatgttttggtttttttacttattagcaaatgtatcatcttctcccactgtgatgcaaggcaggggctgaggcaattgagccagtgcaaaatttagggatgcccaaaacctcagtaatc

SEQ ID NO: 99644 - DNA, 1116 bp, Homo sapiens
atgaagtgggcgtggttcccatttcctccagcgtagtctcagaagcgggaagccatgtgactgaggttacagccagggagggcagaggcccccggcactcacccctctggggtccaagccccgctggcatgtgttgtgtccctgggtaggtgtgtcactccctgtctgtgtctccagtgttcctgttggcaaatcaggggtgggacggaggtaaatggagaggccctgcccagtctgctgtaatccaggatctcggacttagtggggccaaagcttccaagttctcctgattagtgaggctgcaaaaaatgtttggcatgttattctctcaccgtttaaatgtgggcaagtaacaacttacatgtaaaattacccccatataccaagcatttaagttatttattatatcattgcttacaatagcaaataattggaaattatttgagaaatggctaaagaaactcaggcccaggtacgcaagggaatcctaggcagccctcaaaagatgtcctgcaaacacctgatgtggaatcacaagatacacaacacaggtcagtgaacaaaacaagttgtggcatgatacccacagtgtgctgctgcttgtggaagcaggaacacatgtccatgtactcttgtactggcacagaaccctggagaattatcctgggaaccctgcatgctggctgcccctggggaggggaacccgagggttgggctcaagggtgggaggcaagactcactactttgcacaccttttgaattttgaatcatgtgaatgtgttatctgtgcagaaaaaataaaaatacatttaaagtaaagtgaaagtagacaagaaacctgaaacagagacggacaagcaagcctgcaggcccagccagctaccgcccccgggcaacctcatgccacactgtgggctctgcccagcttggttttgtggctccaccctctacggtcatatttgggtttccacacacacagcacccaaaggaaatcccagctaacgcacatcaggttctgggctgggccacccgccaaggtggttggtgggcatgacaccgccccgggaatggcgtcgtccaaatgcctgagcaatgacacggcctcagatggaatga

SEQ ID NO: 99645 - DNA, 1056 bp, Homo sapiens
gatgtccaaaggccgtatcatcatgcgagaggcacgcagtgagtagctggggcccttgaagtagtgccagcggatgccgtccatcttgtacttgttgtcgggagcgtggtagtagacgccgttgaggtttgacaggccacaggcgtcaaaccaccaccctggtggaagagggaggacaggcgcttggtggaggtgggagcccagccagtggcaagagggcagcccctgtgtcccaaagagaacaaagactaatcggggctgttgcctcctctgggaagccagctggctggggatggggctgggtgggagtgggggtggggtggacaacagaccctctgctcagccggggcctctagagggcagcaaggggctctggccactcctcgagcccccttgctcctcccggccttctccctgagcccttggcgtccctgtcttcctccctcactgaacctgtctttccagctccccaacctcccctcatcgctctgctcactgctttctagtggtctctgtcactctctctgagtctctcactctccaggttcatctctttctctcttatggtctctgtgcgtgggtctgtctctgtgtgtcccattgtgttcatctttctctgatggtctttgtccctctctgcctttcgtgtctctggccctcccttcctctgggcccccatctttcacatgctgtgtttgtctcccggcctctccttgggctaagtctttctcccccatctccctctgtacttctctgccccagtatagctctccatctgctgctcaatgactctgacagccttggtgtctctctctttctccatctgtcctctgtgtctcagaaggtctctccccctgtctctgttcttcttactttgtctctgtctcccattcaccccacttcctgttctctgacctctgtgcctaccaaggaacactgcctgagccacagctggtgtggagctgcccctctgcctccctctggtctcctgatcctggttcggcttgcctggggttgggactgatagggtatagggtgcctcccccccggggccct

SEQ ID NO: 99646 - DNA, 1062 bp, Homo sapiens
tacaaatagactcctacagtatggaaccattggagttgcatatttttcactcatgatccatctgaagttcatctgtgtgtttgcacacatcaatggttctttcctttttattgctcaatggagtccactgcatggatggactgcagtttctccattcaccaattgatgtccattttatataaataatgcaggagagaagcaggcttgagcagatctcctcggccacggaggctgctcatccacggatctgcacctgttatttgtctgaatcaccccctctcccccagcccctgcctgtgaaaatttctttcttttccttcaagaccctttgcaaatgccctctccccagcaaggagcagggtgtgctgacccatgacccagatctgtaaagtggggctcagagaaacacagtagtctccaagggcccacaatgaaagtgtggcagagccagaactcaaacccagggccaaggggatggggcagtagaccagggaccaaaactcagtctctttgccagctggaagggtgacaaaaggtcaggcctttgtaccccatcataggcctgagaattcggcagcctgagagtgatggagaaggggcaggtctaatcctggagtcggtgcacggcatagagagaagtagatccaaaaaaacaagagaagtagatcccacgctgggtgagttcctccactgggatccattccctgcccttccagctggtgcctcagccatgggccagacctagctcccaccacccaggccaatattagtctccagagcccagcccagcctaactgagcccatctggcccagattatccatcccagggcctgtgctggtgggcgggtgtggcaaactgggtgatgggatccagctgtgggtaacctttgccctgcccagccacttgcaaccacaggacaagtgggggaccagtgaggtgcttggggagctccagtcacttgaggggaccctgagctgccctgaatcaccagctcagctctgcagccctcaggcaaggagtcttagagcctagcctgccagatggtgaccttgggcaagact

SEQ ID NO: 99647 - DNA, 1035 bp, Homo sapiens
ctaatcattggtcactgttgggaaatcgcatctctgatggcgatgtggccacgtacttggggcgctgaccacggccgcggtcctcactgggattgtacttccctaagtgtctgttggtatgttgggccaagcgcttccatcaagaaatttcttttctttctcctctatattacagttaggacactatactgataaaaaaaaattacctttgcaagtaggccacattctccatgaacttcattaagaatgataaagagggtattcccaaatccttcttattaaaaggggggtgttcagtttgagagggttgggaactcctggccagctcaattttcctaatgtatttgggactgaacccagcaaggaaggccctcctttgaaaggacaccagggaaggtgatgtgtactccacatgatagtatggctaatggtggcctttcaggcagtctcatagatactatttgtggggcagtgatctgagtccgccctgtccctgtgggcctttcccaccgcagcctcgtgtgcctgtcctggggctcacctcctgggcagggcctctggatgggacatttccttgactcagaaagcacctggcaggtggctgcctcctcatgcccagcccggccagcctctcgtacccggctctccaggccccaagccgagccgcaggtctttccattgtgtgtgcaggggctccagccgccccagggacccagttcacactcccctgtggggtgaaaggagagacagacagacagacagacagggtcagccggcagtgagggtccttcagatccaagggcagggtttgaggggttcagtcctctgaagactgaagacaccacttccacctgctaggagcagagttatttataagagcctggaatgagagcgaaacgaatgcatgcacagactaatatgggcctgaagccagagcggccgactgtctagctttaaaggaaaggcttcctggaggaggtgatgtatgagttaaagggagagaggggagctcgtcaggtgagaagaaggaagccc

SEQ ID NO: 99648 - DNA, 1022 bp, Homo sapiens
tgaaagcttcctgtctaggaaggacagggtaatcataagagatgtgtcatttggaatagcagtgccccaaccatcctcaggcccagagcagggtgcagcaatggatgtagcagacctgggctacccagacaggggccaggggccaggctgtgcactagcccagacagagaggaccagctggctggagataaagaatcaaaggtgcccatccagaggtctgagttctagctcctcccctcccatgactcactgtgtggcttctaacaagtgcctacccctctctcaactcaggacacttcctgtaaaatgctgttactacctcaggctacagataatagactctgcctaattgccttctcaaaagagggtgccggagtcttttacagtttccgtatcttgtaggtcatggtggtatttcattcttgttctcatcttcaatttgaaaattcttagggaagtagaacagctttgcgtatggttattgtcctatttgtctttcttttttaaattccttgtaatgtctttgcccattctccctccacacacttggatcattcccctttttcttattgatttataggagctcgttgtgtattaaggatattcttggcttactttgtgtgtaactggcttaatgatgatactgaagttgtaacagagggttacaaacatggcatgctttccatgcaccccccaccccccacccccaatgcacagtcgtatttttaaactccaatccttaataactttgggcagatctcaaagctttctggtaactttcagctattaaaaagcctagtccagtgctgaatttttaaaatacaggtctgatttgaagctctcctttcccatcactgcttccccatcactgcctgactcagcttctgactccactgatttgccctgtagggagatatgtcatgctgtctcattctcttctctcctccctctgggttgatttctcccctgtatgttggggagcagaagaaggaatggggatagagacagctgtcactaccctg

SEQ ID NO: 99649 - DNA, 1046 bp, Homo sapiens
tgcatgcacatatatgtggatgtatgtgagtgtgtgcatgcatgtgcacgtgtgtactactgtgtctactgataccattgtcaaaatagtgtggaggctgctggaccagctgagcccatcttctgtgctcagcccctttcagtcatggcctaatggaggccctcctgacagctgtaaggggcagattccaggaggatctttatattatagatgaggagactgaggcccagtgggtggtatagcaacagacaggggtgctgggatgtaagcccagagagtctgtctctggagctccaaacaattgccttagttcagatgcttgtttctaatcgccctgaatctgacagctacatcattccccaggtgtgtggattttagctcctggaaggtggaatgatgtgtcggggccctaaatctcctcctgcatcaaacacctctgctcggccagggcgtggcagacattgcacgctcctttcctttggtcctcaccccagtcctgcctggtggatatgcctctaccgccagcttacagaagagggaagttggttcagagaggggaactggcttatccaaagtaacgtcgcaaatacatgtgtgagctgggtcttcttaattccaaaacccacagcaaatcctgcctacggtagacttctgaaaacccatctaatgctgccattaaccaccttcttgtttgtgtagcactttatagtttgcagagcaattcagctttcattttctctctgaaattctggagaagggttctagaataatgaagtgataaggccaaaaaggccaagtgagacctttgagaccaatccttgtaaaattggagactcaagcagggaagtaccttactcaaggtcacccagctgtgagtagaagtgagggttcaggagactagcggtgaaggcaaaacttgaattggtagaggaaggcagcctgctccagagcctgataggttgagagcctctcagagcctcagtttccccccgcgtgacttggaaatgctcagtgtgctttgccttttttcccagggctgggacaaa

SEQ ID NO: 99650 - DNA, 1726 bp, Homo sapiens
gctcagcctcaggcctttgatttttcatcagaggaagttaaaccacgtgactgtgtacttaggctactttccaactgtggctttctgggactcttgatatttgatgtcagggtttacagggcagttgcagaccatgtttggcctgatatcgccagggtctgtcctctgtttactggggaacatcaattgcactgcagttagagatatcagtttcacctgacttcagggattttctgtaactctggaagccaaaggtgatggggtggtgagcagaccaaattgtttatattccaagagagaactctggtggattgaatgctgtacatggaggatataatataaatttaaaggcgtttgccagagcaaagatgaggatgtcatcaaattcctggcttccaaagtaaacaaatccacgacactaaacactaaacatattcgggaaatttacccagtttggggtgaggggatagtttctttttcgcagaagaatggtttgattagttttacttttgtttttcctcactctcatttctatgcttcaggcctatgaatttcattgtcatccagccaggttttaaaccatgacagttgcgacatcctgaattttatttgggatctctttccccagaggatttctgagcaccaggggtgacgaaacaggagaggccagcaattctcaatgtgtggtctccccttgtccttggtgtgtgaagttttgctttgctggacctttgtcttttccattttcttcatctccggtcccactccctcccgctgtattctcatgactacagatcttcccagtccacctgccccatggtgagcaatataaatatacatccatgaaaaaagattatagcatttttttgtgctttttaaaatttttacataagtggtactggagtgtaaacctcattttttggggaacttttctttaaatcatattttttcttttatatataatactatcattagatctggtttattccttctgactgctatatagtattccactataagcatattttgcattttatctccacttttgctaccttagccaaggctataatgaagatcctttgttatgtaccctgtgcacagggtttcttctgggagtagggattttggatcataggatattggctcatctaattgcactaaaaactgtcagattgctccccgaaggggctgtgcaagtttaaatgcccaccagcagggactggaggttcccattctccccacacctacacagacatctggcaaaaaatagaaaactgggtaataacagtccgaatcatgtaacttagtgtctcattatttcagttctgcttctctgattgctagtaaaattgaataactctttagacactattagccgctctttttcttgttcatatcttttgccactttttggagttcccaattgttattgttcattttccaggcattccctttatgtagaggttattaatttctttcctttgcagccatggcaaatgtctcttcctagcctgtggctccttattaatttagtagtgtctctgtagaacagaagctttcaattatgaacagtgtcaaaggcagcattttcttttatggatcttgtttaagaaatcttccccacctagaaatcactatattatttttcctgtagaaataatttgagaactatttctcaaactttagtatggaaagtcttaggatttttaaaaaagaaaagaggaag

SEQ ID NO: 99651 - DNA, 1057 bp, Homo sapiens
aactgcaagcagttgactcttcatctgcttcctgcaggacctacaagaacagtgaggagcttcggtctcgtattgtgtctggaatcatcacacctatccatgagcagtgggaaaaggctaatgtaagcagtccccaccgggagttcccccctgctaccgccagagaggtggacccactccggattcctccacaccacccacacaccagtcggcagcctccctggtgagtacagagtgcctagcgggaagcccatgcttctgtagagggattccagccagctatccccatcctgccacttgaccccatccctggcccgtatgtgttttcaacaaaatgatcagtgtcttggggtgcatggagttagaaagtggagacgtaagtggagcagtgagttcttgaactgctactagtcaccctaattacccaaaatcctaagcctgcctgatttctttctaggggccacacagagcccctgagtctgtccaaggatcagtgcctctggggcttatgtgcagtagtctaaggttgctgcccaggtaattcacagctaattcattccagagctttttgtctagacagggccctgggccagtctttctgagaaaatgtaaacatgtagaggtactagcccagaggagatgcagtcccagtgtcttgcccatttcatttcattgtagtcccccaatctcactatcaagttcagaagttttccaaaatagcatgggatgtgagtgagtcacattccaaggtttttgcagattaggatggcagcattaggactggagacttctgctcagagggaggagacaaggaccaggggaccctagtctctagctgagacagcacttctcagtttggagcccgtactgtgataccatactgttggtagggataagggacagagttcactgtgagggacatgaataagcacttaataaatgtagactaccattgttattttattctggtttgcaattatatgcctttagttagctaaaaatgggaaatcagtttaattattccaagtaatgattggcgtatctctttggcaaaatc

SEQ ID NO: 99652 - DNA, 1103 bp, Homo sapiens
cattttgcaaatctctttaatgtctggcttaatggaagacaactagattctcatttctgcttctgcattcagtctgtaggggatatgttgttttcattgaagcctttcacatatcagttgttggaaaaaaagaggactagtttaataaccttttcaaataattctagatattctttactgttaaaccaacttgacgagtagtagtttttgtaagggttagttgtaatgtggaatcaatccataccagtgaacttgttatatatctgttacatcaaaatctgctggtctatcatgccatttgaatggaccttttacccgtgtataatactattgtagaagatcgtgtattttggtcatttggaaaatactgattcactgagatatgcagatctgctcaaagttgacacatcttattatacaatatcattgctaatttttgcttgaaaacttgaattttctcattggcagtaaatagcattcattattttccttgaagtaatgggctcacatccttttcgagaaaatgtccgctatgtagccaagttgaataagcatggtttgtcattctttcaagtaaaaacaaaaaacaaaaaactgttttctttgaaaaaatgactgcttcagccagcagcttgaacaactgcacaagtacttttcatcatgacaacattgtgcctctgtgtgcagtagaagtgctttatgcaaggccaggtgtggtggcccacacctgtaatcccagcacttcaggagactgagacaagtgaattgcttgagcctagaagtttgagaccagcctgggcaacatggtgaaactctgtctctataaattagctggatgtggtggcgtgaccctggagtcccaactacttgagaggctgaggtgggaggattgcttgagcccaggaggtggaggttgtggtgagccatgatcacaccactgtactccagcctgggcaacatggtgaaactctgtctctataaattagctggatgtggtggtgtgaccctggagtcccaactacttgagaggctgaggtgggaggattgcttgagcccaggaggtggaggttgtggtgagccatgatcacactactgtactccag

SEQ ID NO: 99653 - DNA, 1055 bp, Homo sapiens
gcatctgaaccccaggactaatgcgtcactgcattaaccccaggacacatggaccaagtcactgcggccgtacttggccctgaatctgtcctggagggtgggtcaaaaggcaagggtggcaggtaggatggtaggcagtgaggggtggcaaggcctagctgactgaggacagacccagcaacaatgacaggaggtttgaacacctcacgagtggtagtgcccatgggaggtgcgaagtggaaggcccagcccttgcttggaggaacgtgaggctgatggtgcagtgcaatagaggtcactggatgcccatttgaacagctgcgttccagatgagccacctaaggtggatgttgtgagagtcacagtgggtttagagggacaaggtagtgagaggatgctgctgacgcattagtcctgggattcagctgcagtaaacagaaatttaccttttgtaaccaaaaaggtaatggtccagagagcagcaggatcacatcatcattgctacaatctggggattaggaactccagagccacacagcagctgcctatatctgcaccaaaaagtagatgtccttcacactgccatctggacaccactcagctagctcatccaagttcaaggctcaattgaatgcgtctggttgttggaacctacatggcctctcaaatggtactggcatggaatattggggagatgtctttattccctcttcccacctttcctggaaggtgcactgggacagaggtctagtgagccaatcttctgtgttgtctacgccatggaccatgatataaatgggtaccacagccttgcatgcctgagcctaaccatctcctgagatgcttgctctaagtacacattagtacatgctgggccccaatctagatctcaagggaacggccttcagatccatttttgacaagttccttttgtgagtcctatgatcatgcaagtttgagaactgagaagggaggggaagacctacctccttgttactcagaccaccagcaacagcagcatcacctgggaacctgttacacatgcagaatctcaa

SEQ ID NO: 99654 - DNA, 2563 bp, Homo sapiens
accacctgcacaacctccattccacagaggaagaaacaggctcaagaaacccatatgtgatggggagctcctaacaggcttccctgggccacaggaatgggctcgggctctctgctgggctctgtcacctggctccatgtgctgctcacctcggccttctgagtttagtaggatggcagctagtcttccctattgacaggtgaaaaagcaggtccacagctgttgagtgactttcccaaggccacacagaccacaaatcctggctccaagtccagggcgtttccagtaagcactgtccaaatcagtcatggaggtccctgagtgacaaaaatatgcaggaccccttctttccccctcccagttcccgcagctaggctgagtgttaagaggaaggtgccatacaggttcagcaccctggtcagcgcccagcctccctaaagccgctggaggaggcctttggagccagctcaggtcagtgtctgctgcttccttacccaggatggcccactcttggggacagacaggcatcctgagaggagggggcctggacctaggtgtcttgccacccaatacagagccctgccctctccctctccttcagaaggaagtatgggagcagttccatcctcaaggtttcttggttcccaggacagaaatttgagtgagaagcatgtgaagagagggatggcccaggggcccttggccatggtggccttggacaagtttggctttccccatctgtaaaatgtagataaggatggacccacctccccaagatcctgcctatctgtgagagtccatgactaagtgggccatgggctggactgagttcagtgctcccccaacctgccctcctcctctcccccacagagcttcccaatttacatgtaaaccttgggcatcaaagtgacagctgatagcccaggtttgcccacaaatgtgctctgactggcgtgcatgttattaaatttgataagatgcatgatggcagctattagagttttgactctgttctttaccagtagtgtgaccttcggcaagtcacttaacgtagctgtgccaaagcatcctcatatgtaaaatggaggtagtgataggacccctctgtaggattgttatgagctttaaatgatctagtccatgtaaagacatagatgagggcttggcacagagagaacactattgtttaaaaatagggtgacttaatgtgtgtaataagtaactggttcattgcagtgtacaaacatgaagtgttttctttttattcagctgacctctatcaactactcctttcgtatctcaatatcttgggcccagccaataagtaactgggcactttgattttcaaactcagtccagcccagcttaaactttccacctcccaaacttgcaagaggtggtctctggcttcttctgagctcttgctcctccagtgtggtgggtgagggggaggaagggagaaaagtaaagtctcttcactggccatgatgatgaggatggtgagaggagattttggtttttgtttatttgtttttttaagaaacagagtctctgttgcccaggctagagtacagtggcatggtcaaagctcactgcagcctcaaactcctggcctcaagtgatcctcaagatggagtcttgctatgttgcccagcctggtcttgaactcctggccttatgtgatccttccacctcaccctctggagtagctgagattacaggcacaagccactatgcccagctacaggtggtcttactctaatccatactaggtttttgggttgggtttggtttggtttggtttgatgctggggttttcagtagactacatgcataatttgggagtggtggtgagtgctttgtcctggaccctcagagaggagtggggatctctgtccaatctaagaggctaagaggctcacagcccatctctttgacatagtatgctggcctgcagtcacttgcgccacccacagctcagcctcctctcacctccctgcatcagtgcttggaaccccaggaacactggggtccttcccctacctacaagggctttgggacacttggaggggaggtaggactgtccctcctcctccctgatccccaataccaccatcccttcaagtcagcgtgggctgttcccacgaggggcttcccacttcaggaattttctggtcagaaatagacctcatctccatgttcacaaactcttctgagctccagaagataacatttcaagccctctcaagaatactctccttacatttttcatctgttcagtgctgtatctccaaaacctagcacagagtgctcaaatctttgttgaaagaatgaataaagggtgcttggatgggtaacactcaggtggtctgcaggccctgcagctcagccctgcagctgggaggcaggcatcggtccccttcttaagtgatttattaagtcctgggcagggggaagggtgtggaggtctggtcccagcaagtggcatctcattggacactcccttgtcctcaaccaccattttcaggcagcgggataatccctttcagcattcttttaccca

SEQ ID NO: 99655 - DNA, 1068 bp, Homo sapiens
atccaaatgagtctgccaccatcacagtaatccatatgacttggttgatatttttttaattatcattatggattgaaaagccttagcccatgatttgggatgtccaatcctatgtagtttacttagaacagctcatgccacgttctgtggctgtgcctacttggagcctgggagaaagcgacacaacagtggaagcctaggacttgtgaatcttttaccatcttggagctttgctctttccacaccataccccttcaataccacaacaaaaacctgggaagccaagctaaacaacccttgtcctttccagtcttcctctagctctctgctcttggtaaaacctaccagtaggagcagatatttgatctgtcatagaagctgtgatattacactccccagatgtttaactcactggactgaaggctcaagttacagctaatcagggcctctctacactacagaccccatgcccccccaccctcccacccccaaggaacaggatcctcggcccatgtggccaactgagatggagtaagtaggacctacattgggcaggggattcactaaaatggctcctgtagggtctctacaccagtggcttagaaggcatgtgctctcaaagccctctgggtccattcagactgaaggatgcctccccacagtcctcaaacacctgtatctccttgccccagggcctacttcctttccttaccaagagtttaaagaaagtctgcaggaacctagaaacatttcataagaaaaacacaaatggcaatgtggccagcgtgtccaggccacccaaatgtgcctgatttctcccccaaataaactgtggcttcactttactactatatgagggagactaaggttacaaattcagcataaatttttttttttcctgttatccaaataaggtcaggagcaagagacatactatggaggagaaggtgatcaaggcctgcatcatgcccacagaaatacaataaagccctcaccctttcctgtgtaaaagatccttcttgcccagagaactgggtaatattgtgcacttggctttgtaaaaatgtg

SEQ ID NO: 99656 - DNA, 1027 bp, Homo sapiens
taagaggaggtgtctgatgctagtccatattgacaagaaggtcagaaagattgaaaaacatgtcttcctgcactgaggctctttgagtttcattcattcattcattccattcatcctcacttcatttgctcatatttacacacacacacacacacaaacacacacacacacacacacacacagagaacgaaccacagtgcactggagaataaactccggcatgagaatgcagagaatcgtgtgtgtgtgcatgtatgtgtgcgtagacacaccggagcatgtgagccactctgcacctggtggtctctgtagcccatggcttgtgcgcctagggctctgagtgtatgtgccctcaggccatcagtgtatacaaggaatgatgcagttctgctgtggattaggaatgacacatgccaggcagggaagggggctgaggtgggacctgtcggggagaggctagatctgcctaagagccccgattgccaactccaggcgagtgttacaagggaacgggggcctaaggtggccagattctttcattttgcaggagaagccaggaatccaacatttaaaatgtaaaatctaaaatcttttgctttttatacatttgcaactaattcaccaaaaacaaatgaacaggccaggaacaaaacaaagcaaaacttctatcagccaaatatggtccccgggctgtaagtcagtatccttcagcgggaatgcacatgtgctgtctgtgtctgggtgggtttgtgttcaggttcttgggtggggtaactcctcttgcagcacagagagtgtccctcttctcgcctctccctcccggttcccctcctgtggttctagtccaggtccccacacttctgtttacataaaggcatttggctttgacctagtcatggctctccagtctgccccttcctcttggcccttttagccatgccatccccaacctgctggcttccttgctggacccccatcctccactttgccccctcccatctcatcagtcctcctttcttctgaagcc

SEQ ID NO: 99657 - DNA, 1023 bp, Homo sapiens
gtgtgtgtcagtgtgtgtgtccgtgtgtgtgcctgtgtgtctgtctgtgccgatgtgtctgtgtatgtatctgtgtgtgtgtgtgcctgtgtgtgtctgcgtgtgtgcctgtgtgtgtctgtgcctgtatgtctgtgtgtatctgtgtgtgtggcgtgtctgtgtgtctgtgtgtgtgtcagtgtctatgtatgtgtgtctgtgtatgtgtgcctgtgtgtgtgtgtctgtgtgtgtatctgtgtgtgtctctgtgtgtgcctatgtgtgtgtctgtttgtgtgtgtatctgtgtgtgtctctgtgtgtgcctatgtgtgtgtgtctgtgccggtgtgtctgtgtgtgtgtatctgtgtctctgtgtcagtgtctgtgtgtgtgtttgtgtgtcagtgtctgtgtgtgtgtatctgtgtatgtgtgtcagtgtctgtgtgtatgtgtgttgtttgtgttgtttgcctggcttcctaagacaactcctgtttgctatgctttctgttttctttcctccactctttcccatcctcctccttctagctttattgaaatatagttgatatacaagcttcacatatctaaagtacagtgtggtaaattctgacatatttctatactgatgaaaccatcaccacaattaggatagtgaacatctccatcgtccccaaaagtttcctcccccttcatcctcaggcaattactgatctgctttctgtcagtacagattacttcacattttctagtagtttatataaatggaataatataatatgcacatttttggtttggctttttcactcagcataattattttgagattgatgttgtgtataccaatagtttattccttttttttcttttttgttgagacagagtctcactctgtcacccaggctggagtgcagtggtgcgatcttggctcactgcaacctccgcctcccgggttcaagcaattctcctgcctcagcctcctgcgtagctgagattacaggcatgcgccaccatgcccagctaattttt

SEQ ID NO: 99658 - DNA, 1050 bp, Homo sapiens
tatttttttttttacaaagagctagtgactaaaaatgtacacgtgttaaattttatatcggggaaaatattcatgaaagcaaaatgaaaagaatgtaaaatagttacttcctctctaatcctcaatccttactagtttagctaaccttgggtcccccactcctaccaccccttgccaaggggtgactcctccgccccttgccaagcagagaggagacctgcgtgacttggcttgagttgacctaggggccatgacgtgagtacatagaagaaaaccacttctcattccacttctatcaccactttctctttgacagtttacgacttacaagtactttttcctcggtaaacaccatacagcttccatggaacttttaaaattgcctccagctcggctgcttcagcaaatgggcctcaccagggcctgccttttccaggctcataaagggacattgcccctccctagacctgccagtcactctcccctcaaggagcagagttggatggcaacaaggcctgagtctctagtcgcgagatacatgcccaggttttaagccaagatccaaggtttctgtttgagcaaaacaaccagcagccaggacactgagaatagagctggctgggccatagtctgttgtggaattggggcattctccttccccgtgaaagcctggccctccctcctccactggcacctgactgccctctgggtggaaattccttctcctttgccctggtagggcaccatgtcagtgccgccctgtgctgggagcagtgcacttccagcctgctgccaccccagagtactgcagtggacaggtccctgcccagagccggcaggtgttcacgtgtgtgctcccatgtgcccccggaggtgaaagtgtgaacatgtgcctgggctggtgccctagtatgtgtgagtacctgcgaggcacaagtgtgtctccatgtatgtgggcatgcaggtgtgaatggactgggaattgacatcccaggaagtgtgcgtgcatgtagtgctcacccacgtgtacgcagtgggggtgaggagtga

SEQ ID NO: 99659 - DNA, 1001 bp, Homo sapiens
tgacagaccaggcaggcaggcagtgagcgtgtgtgtgtctcctcggctcgcagggacacagagattgatgacctgaagacgcagctgtcacgcatgcaggaggactggattgaggaggagtgccaccgcgtggaggcccagctggccctgaaggaggcccgaaaggagatcaagcagctcaagcaggtcatcgacactgtcaagaacaacctgattgacaaggacaaggggctgcagaagtacttcgtggacatcaacatccagaacaagaagctggagacgctgctgcacagcatggaggtggcccagaatggcatggccaaggaggatggcactggggagtcagccggtgggtcccctgcccgctccctcacccgcagctccacctacaccaagctgagtgacccggctgtctgtggtgaccgccagccgggtgatccctccagcggctctgctgaggatggggcagacagtggctttgcagcagccgatgacacactgagccggacggacgcgctggaagccagcagcctgctgtcgtcgggggtggactgtggcaccgaggagacctcgctgcacagctccttcggcctgggcccccgcttccctgccagcaacacctatgagaagctgctgtgtggcatggaggctggtgtgcaggccagctgcatgcaggagcgtgccatccagacagacttcgtgcagtaccagcctgaccttgacaccatcctggagaaagtgacccaggcccaggtctgtgggacagaccctgagtcaggggacaggtgcccagagctggatgcccacccttcagggcccagagaccccaactcagcagtggtggtgacagtgggtgatgagctagaggccccagagcccatcacccgtggacccaccccacagcggcctggtgccaaccccaaccctggccagtcggtgagcgtggtgtgccccatggaagaggaggaggaggctgccgtggctgagaaggagcccaagag

SEQ ID NO: 99660 - DNA, 1042 bp, Homo sapiens
agtgtttggaccacctggcacgctttgcgtagagacttttaatttcttgttcttcccatgatctaagtggtgtctgcaggcccatctctttttatcaaacaagcaaatgtaagaggatgtaagaggaggaggatccttatggccctggaggcagcaggagccagagggtggatgggtacgcctagtacctcccacaggatggggaggcatttatgctttgaggccagaacccaaatgtgactgtgggcttggtgagtctctgggagcccttggaagggggaggagaatcgcattgatgaggccctgttacgcgtcaggctcacaccgctggccttcaagctgagggtgggaagaggcatgctcatttgaccaaggagatcctcaggtgggagacccatgttctcactcaagcaagaccttacctgggagtctgctgggaccctcatctgacaggctcggggtccgaggcagccctgccctgcagtcagccatcagtggtgtcctctagcagtggccatgctgatccctccacagaggggcctgtagagttgcccctggtccccaatccttagggtgatcgcttacttgcctcctccctaggacaaaaagatcatggagattctggccacggctgggaacgttgtcaccctgaccatcatccccagtgtgatctacgagcacatggtcaaaaagtaaggctgcacccctcctcacccctcctcacccctcctctgccatccccttcacctcccggcctcccaggtgcacctggctcagccacttccactttctcagtgctgacacagggcacaggctcagccagctctatcctcccttcccctccctccaaggtagcttgtggcttctggtgattcgaaagtcttagaactgggagtgaaggcccacatgggatgcactggctcggaagggggtggaggttgctggagggtggagagaaggagctgccaacctggtcactgttgttgctgtatccaggttgcctccagtcctgctccaccacaccatggaccactccatccca

SEQ ID NO: 99661 - DNA, 1095 bp, Homo sapiens
ccccctgccccctggtgtctgcagacagcggtctcgggccccgggcccggccagatggtggcaccggtaaccgggtacagcctgggcgtgcggcgagctgagatcaagcccggggtgcgcgagatccacctgtgcaaggacgagcgcggcaagaccgggctgaggctgcggaaggtcgaccaggtagggcgcgggggctgggtgggaagaggagctcgagctgcacgcgctctcccgccaggcctcagagctcagagggcccgtccacagtaaggaaggtgcagagcgggcctcctaaccccagcggccaggctcttgcccccagtccctcctccccgagacccgggcggggctggtgctgggttgcgcagggccctccactggcctctccgtgggcttccgtcgctcggaggagcctcccttccccacctgcccttcgctgcccagggcatctagcttccaggcgacggtgtagacagccgacgccagggaagcccatgcctttgtgaatggtacagtggagtgtttcggagtgcagccccaggccagggttgaaatcctgactcacctgcttcctaactatgaggcctagagtgtttcctccccggtaaatggggtaaccttggtgcctgccatgcagagctgtgtccctggcaccctgtaggttcctggagtatcaggaggaaaacaacaggttggaagagggatctgtgcctagggtgggccagggacactgactctggggccctgcctcccccaggggctctttgtgcagttggtccaggccaacacccctgcatcccttgtggggctgcgctttggggaccagctcctgcagattgacgggcgtgactgtgctgggtggagctcgcacaaagcccatcaggtggtgaagaaggcatcaggcgataagattgtcgtggtggttcgggacaggtgagtagccaggcccgggcagcctctccgtctcaccccagccatgtccccaggacagctcactgtccctcctgccaggccgttccagcggactgtcaccatgcacaaggacagcatgggccacgtcggcttcgtgatcaagaaggggaagattgtctc

SEQ ID NO: 99662 - DNA, 1005 bp, Homo sapiens
accctgagtgtgtacagcgtcaatcctcatgggactgcccagcacacgagtccctcgtccctccccaggcacccagtgcgacaggcaccctcacccaaccaaacccaccaggatctaaactaaattcttcctccttttctgttcaaatttatataattatttttggaataagtagtacatttaaacttttcaaaatttaagacaccaaaaatgtgccataaaaaaaaaaatctccacctcagcacacagctccttaggtctgctcccaagagacaaccactctaaattcccattaaaataatcaaacttaattgcttcccccttacaaaagtcatgagcattcagagcaaaagctaacttaaaaaaaaaaaaaccaccttggaacacacaaaagtacaaactgaaaacctcaccctcaatgctgccattcagagatactcagcattttagcgtatgtcctcctagactgctttcaacgcacatccactttacaaaaaatgaaaacaaaatgcaagaagagattcacaatattgatttttcaacatctcactagaatctcagaaatgtttcctcataccttcttccttaagtgactttaatagctctgtgatcttccacagacaatgatttattcaagcagaccacagagatgggcatttgggatttctacattttccttactagaagcagcagtgatggatgggccctgtgactccactgtaacaaattcctagaagaaatgctgggtcacaggatatgaccactttttaatatcctggcctagacccctagatacctatcacaaaccgccctctagccaactgcctcgatcagcaggactaggtgtccaacccaaatttagagctatttaagaaaaggccaagaagtcttggttcataaccgtctgaacagcagctgtgagggccttaatcccacctccaaatccagactaaggccaaaggcctcctctgggctggcaacctgccttgtttacccagccacagc

SEQ ID NO: 99663 - DNA, 2008 bp, Homo sapiens
actttcctgatgcccaggtcaaaccctaaaccagttaatcataatcatgggagtggaacccaggcattaagagttttttaaagcccccaggtgatgcctatatgtagcacagtttgagacccaatgatagtggggaactgtattgtcagcagcatgggtggctagccctcctgctgtcctcagcaaggcaaacttaaccttagattaaacaaaacacacagatcaatttaaggagaaagtttgtttcacctgggacccagcccaagtctttctggctgtctccagctggaacagaagtggcttggtctcagactgctcagctgttggggaagggatttggcgtggcagatggcatcgtggctgtcgccactgcacacaaagaacactgagttgctggaaactcacagattttctgtccccaacagatctgccatggagggatctggtgcctccagacatgtgcacatgaatccatatggagcttttcctgatgttccactccactttgtatagacatctgccctgactgaatgtgttctgtcactcagctttgcttccgacacctctgtttcctcttcccctttctcctcgtatgtgtgtttacctaaactatatgccataaacctcaagttattcattttattttgttttcattttggggtgaagattcagtttcagtcttttggatataggtttccaattaagtacatggtcaagtattaacagcacaagtggtaggttaacattagaataggaattggtgttggggggggggtttgcaagaatattttattttaattttttggatgaaatttttatctattatatattaaacattcttgctgctgcgctgcaaagccatagcagatttgaggcgctgttgaggactgaattactctccaagttgagagatgtctttgggttaaattaaaagccctacctaaaactgaggtggggatggggagagcctttgcctccaccattcccacccaccctccccttaaaccctctgcctttgaaagtagatcatgttcactgcaatgctggacactacaggtatctgtccctgggccagcagggacctctgaagccttctttgtggccttttttttttttcatcctgtggtttttctaatggactttcaggaattttgtaatctcataactttccaagctccaccacttcctaaatcttaagaactttaattgacagtttcaattgaaggtgctgtttgtagacttaacacccagtgaaagcccagccatcatgacaaatccttgaatgttctcttaagaaaatgatgctggtcatcgcagcttcagcatctcctgttttttgatgcttggctccctctgctgatctcagtttcctggcttttcctccctcagccccttctcacccctttgctgtcctgtgtagtgatttggtgagaaatcgttgctgcacccttcccccagcaccatttatgagtctcaagttttattattgcaataaaagtgctttatgccggcttttctcagctctgtgtcatggtggttattttcaggtgcctcccctgccatttggtgcagggggatggggttgggcagggtgaaggagggtggcagtggggatgcagtttcaagattgtgtcttggcagaagaatgcagcagtgaacatccttcctcactggctattaacgggttgggggtcagaggagggggaatgtggggtaggtttgcatcaaaggagctgcctgaaagggcaagctgggatagtcagggaacatcccctcccctgttaccaaatgtttattaaatatgtgttctgggtagagcactatgctcggggttcttgggttacagaaaagtgggagatacaacacatttttgagaagtgagtcacagtccacttggagatgtgctacaagcaactgcaagcaaattaatgagatacgaagagaagactctgattttaaattggtattcctcagtaacatttaatgtagaaagacagtcctgtggaga

SEQ ID NO: 99664 - DNA, 1108 bp, Homo sapiens
caggatgaaaaaaaaaaaaggccacaaagaaggcttcagaggtccctgctggcccagggacagatacctgtagtgtccagcattgcagtgaacatgatctactttcaaaggcagagggtttaaggggagggtgggtgggaatggtggaggcaaaggctctccccatccccacctcagttttaggtagggcttttaatttaacccaaagacatctctcaacttggagagtaattcagtcctcaacagcgcctcaaatctgctatggctttgcagcgcagcagcaagaatgtttaatatataatagataaaaatttcatccaaaaaattaaaataaaatattcttgcaaaccccccccccaacaccaattcctattctaatgttaacctaccacttgtgctgttaatacttgaccatgtacttaattggaaacctatatccaaaagactgaaactgaatcttcaccccaaaatgaaaacaaaataaaatgaataacttgaggtttatggcatatagtttaggtaaacacacatacgaggagaaaggggaagaggaaacagaggtgtcggaagcaaagctgagtgacagaacacattcagtcagggcagatgtctatacaaagtggagtggaacatcaggaaaagctccatatggattcatgtgcacatgtctggaggcaccagatccctccatggcagatctgttggggacagaaaatctgtgagtttccagcaactcagtgttctttgtgtgcagtggcgacagccacgatgccatctgccacgccaaatcccttccccaacagctgagcagtctgagaccaagccacttctgttccagctggagacagccagaaagacttgggctgggtcccaggtgaaacaaactttctccttaaattgatctgtgtgttttgtttaatctaaggttaagtttgccttgctgaggacagcaggagggctagccacccatgctgctgacaatacagttccccactatcattgggtctcaaactgtgctacatataggcatcacctgggggctttaaaaaactcttaatgcctgggttccactcccatgattatgattaactggtttagggtttgacct

SEQ ID NO: 99665 - DNA, 2115 bp, Homo sapiens
tcatagctcactgcaacctcaaacctctgggctcaagtgatctcccacttgatccactcaagtagctaggaccatgtctggctaaatttttttttttttttttttaattttttgcagaaacaggattggggacatgagtcttgctgtgttgcccaggctggttgcaaactcatgccagtctcaaactcctggcctcaagtgattctcctgccttggccttccaaagcactgggattacaggcatgagcctcctccgcagctggcctcattgtactttttgtcattaagaaactcacctgcgtgttgaaagtagaaatccttttccctctccaaactgtaaatggcaaggactttattttattttgaaggtttggggcttaggatattctggttttttgttatgtttgatttttggtttagtttagtcatttttttttttttaatcttaaaacttcccatattttgtccctgtaaaatgctgcctataggaaacactcctgcaaagattcatgagcaactataaactgcattgtgagtcatgagctttcactacaagtagtgaagccataagtctgtagaggtgccttcttcagtcctgttacccagtagaaggtatatggcactctgcccttccccaaagcagagtgccttggaagtgactccatttctattgggttattagtgaaatagtatcccagtggtccttgtgaatctccaggtcctggtcttgagtcttaaccaccgcttcagtggcttgagccaaccaccaggaacacagtctggggatactttgctgcccaggagctgctggccaggtctccctctgctgattccttgaaaagcaacaggaaagagcaggctgctgtggagtagacagacttgagactctctgcaccgtcttgttttgtaaacccttttgctccctttccaaggatttcagttcaggaggagacccaggcgaagatgacgtcaacagcctctgcatgcagtcagtcatagctttggcttctttcatggtcttgtgcttttaactggagcacattttcacatttttcttactgattagtaactaaaggtgcttaaagtaaagtttaccattctgggattacccctcatattcttgttaccatatagggaagaaggtctaaatatgaaggcctcatgcttgtccttctggttcttaaaaatcatgcaagtaaagcaaatccaagagtgctcttgagtaccagcaccatacgtgccaccaggacacagaacgcaggccaggtctgtgagcttgggctgcattcagtcaggagagccaagactaaatacttaaaataagaatatggagctattccaggcagtttgttaggcatgagttataggcttgtacggccaggaatgaaattggtcagttctgcaattagaaggcaatgcttgtgatgttttatgctgagtggcctttagagcttaaagactgtcagctgtcttgtctgcactgtaacctcagttgccttctctgagcagggcacgctttctttaggaaattatggcactaacttggcaggtggtttcactgttcaagggctccagctcctggcacaagtgatctccagagttaaaattggagcagctgctgagacttgacttgctgcctgctttacctgttccctccccaaagagaggaagcacttttcattcattgccagtgtgtatgtgggagctaaacatatatagcattttagtaaatgccactgcctactctttttcttttccttttttaaaaaagttactgaggcgtgattgaaatccaatatactgcacattttaaaaatgtacagcttcataaattttgatgtgtcattgtttccctttgaattcacccctccttaccctcctctaacaactactgatatgcttttttgtcagtgtagatttgttgcattttctaaagttttatataaatggaatcatacagtacgttctcttatgtctgccttctttcacttggtataattattttgagattcatctgtattgtcccatgtatcaattgtttgttcctttttgttgctaaatatttttctatatatagaaacatgtatttaccaacttacccgttggtggatgttt

SEQ ID NO: 99666 - DNA, 1076 bp, Homo sapiens
ggtcactcagtgaatatataaggagctgggcaaagcctcaatgttgccctcaagaagcttaccctgtagggagtggtcagttacaatgaaagtacctcaggcaacctacacctataggctagaacttcttggaggaagtgccatttggtcttgggtgtgtatggtgcagtcaggcaggaggaaagcgtcttccaggtatatacacaggccaggaggagaaaagggtacctttgatatttctgtaagtacttgatgaatgtctgctatgtacaagacactgtcctggctaccaagaatttaggagtgaagaagacacagttcctgccttcatctcacactgtagtggaaaagacataataaatatgattaataagcaagactgttgtgtataagctagtaagtgttaaggagggaataggaaaaggttgaggttttagatagattggcaaaggcctcaatgagaaagtgacatttgagcaaagacttgaaggaggtaaggatgtaacctatgtgactgtttgagcaagatcattttaggcagagagaacagcaaatgcaaaggcccacgggtggaggtatccctggtgtgtatgtagaacataaggaaacaatgttctgggactggaaaagtacaagagtaatcagaggtgaagtcagagggatggtggtaggggcggaggcttgacacttcttagagggtcttgtaggccattttaagagttttatctcctgagatgggggagtcacaggagtttttcagccgaggggtagtagggtctggctgctgtgtcaggtttagactgtaggagagcaagagcagaagcagggagaccagggagggagttgtaataatagtctgtaacagaggtccagaactcatgcctttaaccattataccctatagaaaatgcatatttctaccacttccagctagctattgttaagtggtatttcttttgatttttttggagatggagtctcactctgtcgcccaggctggagtgccctggtgcaatctcggctcactgcaacctctgcctcccgggttcaagcagttctcctgcctcagcctccca

SEQ ID NO: 99667 - DNA, 1076 bp, Homo sapiens; identical to SEQ ID NO: 99666

SEQ ID NO: 99668 - DNA, 1076 bp, Homo sapiens; identical to SEQ ID NO: 99666

SEQ ID NO: 99669 - DNA, 1062 bp, Homo sapiens
gaggcacacaggctgtaactgttgggcagggctgcaacaagtccctttgccttcccacagcagatgttttttgagcaacagcagcaagccaggctctagggacatggctagtgaactaaatagacaaagacctgatctggtggggctttgcttatgatgaggagactgatagtatggccatggagcacatcaggtagtaagaagcgctggagagattaaagcagagtgagggatgggaagggaagttggctgcttttcgtgagggtgattggaaaaggcctctgaaaaaaatggcattttaacattcactcaaaggacattggagagggagctacagggctgtctagagtatccaggcagagggaagagctagtgcaggaccctgaggctggagcctgctcggtgcattagaggaacagtaagaagaccggtgcgttagaggaacaggaagtggattgtgtgaaagggtatgtggcaggagatgaggggatggtggagcctcgttggtttttataaaaacgttgcctttttctaactcaggtgagagccactggctggcttggcttttaatgcccgcccccgcccccccaacccacgctccttctggctactgtgtggacaatgggcttttgggggcaaaggcagaaacaggacactggttgtatcccaggtgtgtggagtgccagctcaggcagtgggcagaagtggtgccaggtggacagtgatccccaaagagcatgtgggttcttcgctgtgttctgatcttgaccctgccatacaacgggctatgagagcttgaacaaattgtcccacagttcccagcttccacatgctgtctataaaatgggagtaacgatgcctgctgtgaagcaaatgcctatcgagactacccagttgtctccaaagtgttgctcttttttaaaaccacagttccattgagcctcactcatcgcagttgttatgtctgtaatctcagtctagaagagtccttacgctgtttttttcttaataactctgatttcttcaaagagagcaggctagttatagaatactccacatctg

SEQ ID NO: 99670 - DNA, 1062 bp, Homo sapiens; identical to SEQ ID NO: 99669

SEQ ID NO: 99671 - DNA, 1062 bp, Homo sapiens; identical to SEQ ID NO: 99669

SEQ ID NO: 99672 - DNA, 1076 bp, Homo sapiens
ggaccctggcatgcattaggacaaaagctttctttttgatttcgttttgataagccctataaagacgccttagtgagaagccagctctgcctcatgctcacagaatagactgttttcgagcaggctggtggctttgttcccgtgggtctttgtcaccagcctcccaggaataacctgtttgagacctgtgggggcgtgagaggagtgggtaggcactgggagatctcatctgtagcagttaaggcttttaagtcactgggaacagaatccatcttgggggaacatgatcagaaggtggaggttataaaggttccaggggttttcaaaggcagaagcccactgggtcctaagaagggaaaagaaataatcatgatgcctctagttctcatctctgttttttggttgttgttttgtgttttgttttgtttcctgcctgactgcctcagtagtctcctgttagagatttgtgtttgtctgcttctcccaactggtgggtggtggaagtcccctgcatgctcccccgtcccccctcccccctcccccctccccatggccagcttctctgtcttcttttgagtatctggctcagatttcttggctgtgattctgattgttacttctctgagaaggagagtttgagtaaggtgaacactcttgatccagtcagctcttgccaggtgtccactcagctgatttgggcacgggtccagagaaagaggcgtggaagtaaggtggccaaaatctccccttagccatcacaggtgtgcagagcacagactgacctttaccacatggatgctttaaatgccactaatggctgtcagtcaccttgatgtcactctcaagggtccctctggtgacttccgtgaccttctggcagagcacagcatgagcaaggcctcaaaggaatgcctgcactacctctgtggtaccagagggaaaatacaaagttcactatcaccagctaagcatctcctaggagcatgacaggcattgaggtgggagggaggtggtggaaaggtaagctgccaagtaagtgcctttaggagccagggaattctcatggcgcctccctg

SEQ ID NO: 99673 - DNA, 1076 bp, Homo sapiens; identical to SEQ ID NO: 99672

SEQ ID NO: 99674 - DNA, 1076 bp, Homo sapiens; identical to SEQ ID NO: 99672

SEQ ID NO: 99675 - DNA, 1403 bp, Homo sapiens
gggaaacatcccacttcctaagtcattgctttggcccttcctggccttgggggaagtagagctgcacggccttcttccgtctttttacttttgagccacttacaaatccaaggctcagtgacagcgctggctcaggctgaccgaaagctgcacgtgtaatttagtcccccagctcttctagaagtagagacttttctcgtcctcattttaaagataagcatctggaggctaatacatagtgataatacaagccaaaggaaattttagacacctccccctccccagccagaattcagacatcagagtcgtgtgccttggggctgtcttactccttctccttacaagcttgtcctggtttgtatgggggcgggggagggggagagctgagttggcggagactcagtggctgtgggtcccacaagggtggcagtgattggtgtagccacagttgttgatacgaataaccttccctccccctcctccttcccctttctcaaccttcccaccctttcctctgttccccctcctcctccctctttttttcccactccctctcctcctcttcctcctcctgggtagtaggctgtgggcagttctggccaagttgctcacgaataagctccacctttctcttccaaatcatggaaacatggagggatccctctattgagggaaatgactttcactggaaagaggaaaaggcaactaacatcccccctcccatgcccttttatttctgtggcccttccccgtgggtagaaatgggggcaggaggtagaagttaaggactagaactttaaaaattctgccaaaggaggagttactgaaacccatctttctggggagcaggcagtctcatgtccgtgaaggaagctggaaagtgcttttgatgttttagatagctgtccttgtaggccacagtcagcacctgagcctgggaggtctggtagatgaaagcgcatccttttggtgatttgtcatcggaaggatgaggagagtaaccatttacagtgctggggtgagtgggcagttcattcagttccgcagccaactggggcaaagattgggactcaagccgtgaggagctgccttctgccgcaccccctccccaccctagcttgtacatagccacactagggtgcttggcagcatgtgtcccactcccacgtctgcccctcatgctcgcccatgttctggtgctgccaacaggactggaccccagcatgtaggcagtgccgcacttcaccatgtctctttgtgaaatatccccacacagcatgtctggagccttttcctatgagaacagatggtcatgagacccagaacaccatcagggtttccagtgcctcttgaagtgtgtgtttttctcgcgggtggcacgcacccacatgtttccagagcag

SEQ ID NO: 99676 - DNA, 1403 bp, Homo sapiens; identical to SEQ ID NO: 99675

SEQ ID NO: 99677 - DNA, 1403 bp, Homo sapiens; identical to SEQ ID NO: 99675

SEQ ID NO: 99678 - DNA, 1102 bp, Homo sapiens
tccctggtactttcctgtttcctggggctcccttttcacgctcccagccagaaagctaaagctgcagcatcccgctgtgctgcactcttcatggcagggccaggtggtgggagcacaaagaagaaaaagcaacaggggtttgctcccttccttttgggatcacaactctgctgatgcatgaagaacattctcctccctctgagtttcagctcctgcaggttcccaatgctttgaggcctctgtcattcctgccagggactccctggtggctggggcataggagagcaggaagaagaaagaaactcagggcaggagagtggcattagaaattcctggtccttaagccagcactagagggcttctactggagttttcctgtgtggtcccagtccccacttccaggctacattttgttctagccaggaaacaagaagggggcaaaaaggtaaactcaggatggtactttgatttctgatcttcttcaagttaccttctaccatttacttttcagagtcctcacatagctggcctgtgcatcctgtccaggttttatagctgccttcagcaggagaggtggggtggaacatgcttattactccatcttgcccagaactagatctgaccccatcatagtttgccttaacatttccctgattatgaaggatgttgagtatcttttcgtgcagtcagaagccattgcatcctcttttctgtgaacctctatttatatcctctgttcacttatgtataggaaactaatgtctcagaatcagggagacatacactttgagatatgaatcacaattttttttcctattctgttttttgtcttttgacttgcttctggtacatttttatcattgcagaaatttatttttatgaatagatgaattgaagctctttgaggggaaaaagtgacaggaagactttcaattaccagagtcactgggacctgccctagattccatctcagtgcctgtgaagattccagttcacccatcagggtgtgtggacactgggatgtcaaaataaagctgcattatcattgctcccaccagtcccactgattcagtcaaatgtcacgtgcactagactgggcact

SEQ ID NO: 99679 - DNA, 1302 bp, Homo sapiens
ggccttgtttctgcttgtgttctgatgccatcctctctcctcagcactgccccccaggtgttgagtaccagctctccagcccaacaggcagaaaatgaagccaaagccagctcttccatcttaatcgacgaatcagagcctaccacaaacatccaaattcggcttgcagacggcgggaggctggtgcagaaatttaaccacagccacaggtaccttgcattgtgtggcctagcttattctaggagtgtcctctgggcctcacgcaaatgtgtgggaagcagagagccgttcttcctcctaaataccagcaggcactccatgctttccccaaagcagacacgagggtggtaaggactacaagtctgaagccttaagttctggtccccactcttccattagtgtggccagtgactgttcacttccccctgtgtgtctcattcttcatctgtaaaattagagtattagatttctcagggctttttttaagctaccagacttcagaggaagtcccatgctaaagtcctgtgaagacatcaaattagaactgctgtggttgatggaggagaagggggtgcagtgtcagcgtcccactcacctggcttcctccacctccctccccacaaggggcctgtgaaaattactgggccaggaagatctcttctagatctggctgtcgagaattctgggaatgcctgctccacatctcagaccatctgggctggatcagtgccttcttcattttaaagatggggaaactgagccacagcaaagtgaagagactagtaggagaggtgctagaggactgttgccagtaaatatatttggtgcctcctttctgtagaacagaagtgtctaaatgttattggtcatgagccaactaagccagcacccacatgtgggatcagtgaattgtttgtcagtcgttgaatattgactgggctcgcctgtgggtgacagcgggagacaagccccagctgtgagccaggtgcatctagagcctattgagacctccttcatcaggaacattcattacactcaagtgcctggtggttaagcgagtgacccatcccagtgatgtgagttatttgtctcagtttcatttcactcattaagctcagcacactgctgcccattcccagggtggacagcccatgcagaggctttgctaggtgaaaaagcttggtttgctaaaagtcacaggcagaatcctgcaggtccatgcccttagatgtgccaaattgtaagttgcatagattttaggggtttggggcaaaaaggaaacttatgtttaagtgctctagg

SEQ ID NO: 99680 - DNA, 1096 bp, Homo sapiens
ctgttggcagttctcaggaagagctggcaggccagctcctttgaacagatgcgtgtggctgccctgcgggatgattagagcactatggaactaatattctttgaatgatgtgctcttattatttgaaaaatcaggaggcctggtcttcaggtttcccctcctcttccactccccatcctccttgagagcagtatagactgggaatgcctgtcaggtgaccttccacttacagcccatggcagctgatagcatttctagtcgattttggtccagaattgaggcaaatataagtggggcaggaccttgaagaatgatataattagttagtcgagtgttttatgttgttagctaagcgctatgctaagtatttcatttattttatcttctttaatcctgttttaatccccattctacaaagaaggatcctgagacttggtgagatccatattgctggccagtgcagagctgggtccctccagtctctgcctttacctgccaacctgcatagcatcctggatattcttgcatagccacatagacatttgtttgtacttttagtatgtgttgggtacagtgcatgtttttagctattttctcaagtatctgggaagttttaactctgttttattgatgaggaaactgggtcttgaaatccaggcctatacctgtctgagtgtaaggcccaacaggagagtgggacagtgtgaagagcacaggatggagagccaaatagctcggattgtatactgcctctaccgtgaaccaacactgggattttgggcaagttgcttcaccctgctgtgcctcagtttcttcatctgtaatgaatccctacctcataggctgggggttaagcctgtgggttaagtaagttaatacatgtgaagtactcagcacagggcctggcttaggaatgggtgcctcataaatagtcaccatgtttatcaggccaccctgcctcacctaatttttagggagtgtgtaagagaaacagccagtcagaagctacacagccaagtccaggcatcaggctttcctcatctcttccagtgatgacccaccagcagtctgcaatgggacgtgctgggaagcaaac

SEQ ID NO: 99681 - DNA, 1050 bp, Homo sapiens
attgggttctgcatacatgttttgtttggcctatcaaatttgactgacttagtgttttattttgttttacttgaattaatagtcatctgttttatataaaatcgggatttctgtctcctttgagaaaatcaaaaagtctttgatattgtcttgtacccaaattcctacatggtcacggttaatgagagtttagtagcatctgtttcctttagccaggcactgccccttccagctcttaaccccaattctggccacctaattcatttaccatactgcctgggcatgtaggcactgagtctgatatcagagaaagtgcatctagtagctaacaagcttgatcaggaaccctgtcctctttcttcctcttacctaagatatatatatcattgtatctgagtaacccttgtaccatggaccaaccccttaaatgtgtatgaacttgtcccttatagccatttgcaggaggtggctaccgccttggggcagcaccagaggaagagtctgcctatgtggcaggagaaaagaggcagcattccagccaagatgtgagtgcatccaccttcccatgagggaagcttgtggactgttctgccatttttctgaagggattggttacatattgtgcattaaccagcagcctctgaaagggaaactaacagagacagtgcccttgctgtggttcacgaacaaagacgcttactggaaaatcaaaggaggtttcctgggtgctgggtgagagagctggtgagaacaggtggggaaaggggatgggcaaatgaaggagttttttgagcagcccatggatctcaggcagaggtacagtgtatctggggttctctagtgatgcgagtatagctgaagaacttggtcttcagaccaccagagaagacttaacaccaatttttcttttctttttttttagttttcctcattgtccactactttttagccctgtgcatagggtctccttccccacaagtgtaatcatacacacaattttgagtcttttttattcaatattataccacaaacatcttcttgtagtcttgt

SEQ ID NO: 99682 - DNA, 1583 bp, Homo sapiens
gtctttggggaagtgggctgagaaattacatgtgttctattctctattttcattcctattgtgaccttcacaccgactcaaaaccttccttttagatacttctggatataaaaatatatgttaattttggggtttcacactcctgagtgaaaggcagtgtcatcaagtacgtgaatgcccagctcctaaatgtctttctcgttctcctcccacccagtcacgtcctccaggcagtgaccttcctttatttcacattccgcttacttccttgacccctcagcatttcagacctgaaaggacactggtactgttgtccttgtcggggcctgtggctttgcctctcattccctggtgaatgtcaggaaatagagggctgagactaatttttataggttctcaatttttcttgcttggggacaagctgttgacttagctctgaataggagtaataaggaggcagtgggccaggctgcatgacaactggttttcaggcccatataaaaaagtactaactttattatctcaagccatgcctggcctattgcaaagcccagtgtgggtgtcttggggcttgtatttgagattggagcttctctgacctccagtaccctttcctcaggggccacagtgtgtgtcacatgaatggcaaggtgaggtgaggcttgggggagctcctggtgctgtgtcacaccaccttacctgtgtgcattactctgtgcttgttcttttgcatacatctgctgatttgaacctcacggctctgacttaaggagcaggtaggtagggcatgtggtccttccctcccgtttcaaagacaaggaaagtgagtcacagagtagtgcactggcttacccaggacatacagtggcagagccaagactggagcctagctgcttgtactaaccatgccagtgccaccattaaccccaagtcactagtggtagctacttctgactatgactgtagtcactgtctcctggagaggagcctggccaccagattgatagtcccagctgagactctctcctgaactgataagctgttttgcatgcttggaatgcctttccccagtttgttcacctgataaactcatccttatcctcaagattcagcccagaagacacccttaaaggaagccttggctgtccttcccacccagtgttccctcactgacttctgttgctgctcacactgcattttacctgcttgcctccttccatgtgttcccaactagccagtaaattctttaaagacaagcattgtaccctttgcctcagtgtgcccagcaccaacctggcacatgctctattcatgttttccatgagtgtttcatgttagaggtgtattttgtacacaggttttatgctgggggctcagagagaagtggacagcagattgttggccctcccaggaagaaaagtcccaacgagctggtggatgatctctttaaaggtgccaaagagcatggagctgtagctgtggagcgagtgaccaagagccctggagagaccagtaaaccgagagtgagtataagggtcattgtctgtgcccacaggactgagattccagaactgggaatgcca

SEQ ID NO: 99683 - DNA, 1052 bp, Homo sapiens
taaatactttctagtttttattaaagccagggcagcttaaattgggattccattttacctcatgataggactttctaatttatactcaatctgtgtgatcttgaaaaaataaatgccacattattttatgtgtaatcttaggggattaacctttctccacataacgtcctcctctcgcctaccaaaaatgtaacctcagtgtcttcacctccttagcagctggtgatgagggttacctttcttaatgctccctgagatcattttgctcctttctgtgtctccagtgataatagagtgacatccttcagagacctcattcatgaccaagatgaagatgaggaggaagaggaaggccagaggtgagtcttctagagggggtcagggggacagttcacagggaagtccagggtaatgtgtaaatcacctagaacaggacctggtaaacatgtttggttattgttagccattactactgtgggctggtctgtgtgggttatatcttaggaagtctcttctactccttgtagcttagaagtgacccctgttccgttacttaatgtatttattgaggaatattaggggagggaaacaaggaaaagatctagcagtcccactttttggtattgactaaaaagatttgaaatcagtttgtaaagaggtgtctacgttcccgtgctcattgcggtgctcttcacagtagcgaagttatggatcagcataagtgtcttaccagcagatgaatggataaagcaaatgtggtgtatatacacagtaggaatactactcagtctttaaaaagaaggaaattgtcattttcaacaacatggatagagaacattatgctaactaaaataagccaggcacagaaacacaaataaagcatgctctcgtgtggaatctagaacaattccaatctagaacaatcgacagagtgtggttacagaggcagaagtgagggcataatggggagatggtggtcaaagggtataaaatcttaagacaggaggaatatggtttggggctttttcttttttagatctcttgcacagcat

SEQ ID NO: 99684 - DNA, 1064 bp, Homo sapiens
cttttgtggcaagagagtccatggcttttatgagattctcaaagggctgacagacataaaaatgttaaccattgctataggagacagtttaaactcagtaataacagctgccatttattgagtatttacgagtgaggcactgagttaagcttttacatgaacatctttttagtcctcacagcaaccctgtgaggttagtactgttgttagtactgttagcactgaggttagtactattcctattttacagatgaggacactgaagttgggtatctttccaagatcacagagctagtaaaacaaggatttaagtgtagggctgttttctacattcagcatttcagctctcagccccaacaatgttctgcctcttcttgtggacattcaaagtcctccagagtttacccttggacccaccttcctaatctgattcccttttcctcatttcttaaatcctttgttccaaccaaactgatttctttggtgctctaattcttccttatttttggttctcctgcttttgtttgagcctctcacctgatcaggtgtgcccgctctcttgctttctgcctatacaaatcccatgcatccttccatgtttacctccatccccactctgctgagcgtgttattgctaaccctgtgaccaggctgcacgccataattctgttccacagaactccagtcacaactatcactccttcagttctttgactatatccatgtactactgggtggcatctctcccacattgccctgaactcttttcctgatatttaacttaatttttctccccaagtaaattgtaaattcctggaagtgggacggctagtatttcaggagcagtcaccaaagctctgccatgtttctcacctgtgttctcttctgatactgttcaacagctttgaaataggtaaggtgcttaccatttcgctggtcaggatgctaattcttagaaaggtcaagtaacttacagctgctgttaccacagattcaaggcgaagtctgcctaagtccaaagctgcttctgctgccacatgctacctccctgccagcacctccca

SEQ ID NO: 99685 - DNA, 3159 bp, Homo sapiens
gagagggaggaactggcccatctctcatgggtcctgcaggcaggccatgagactgtcttttatgcggggcgagataacgaggcatggacgtgttgtgagcggaggcctagcctgttcaaggtctgaatttttacccctagaatgtaagaagcatgggagcagggactttgttttgctccctgccatatccacagccctagaaaaacgtcgggccattgatagctctcagtaaatgcttgacaagtaagtgaatgaacgaatgcacaattaatgaaatgagggctgcgtcaatgaataactgggaatctgactcctgcagggagccttcagcccacaggtgtatgtaagacccgccccgcctctcatccttcgggctcccacccccgccgttaggctgcggttcgcgccgcggtcgccagagggcgcggagcggcggggcttcccgcacggagggctttgcgtgaggcaccgcgtggggcggggctgcgggcgggctcccagctgctgggccctcatcggctgggcctcgtcgaccggcaagcggaacgcggcagcggggctgggcctgtgcggcggccgccggagcgctttggaaggcgcacggggcgaagatggcggcggagcgacaggaggcgctgagggagttcgtggcggtgacgggcgccgaggaggaccgggcccgcttctttctcgagtcggccggctgggacttgcaggtagcgccgcgcggcgggctgtgtcgggtgggccggggactgctgggagcgggcgcctggtgccttaagcccgcggcggccgaagcgcacagtcatccccgctctaccgcggcccgacccaggcctcatggtcccgggaccgcttgtcacgcgtcgcctgctcggcttgggagtgggggaacgcgggccagccccagccagttctgccgtgccagtttcaccctgcctcgcccgcttgcggcgtcagcgagacttcgggcgctgcggcagccggcgaggagagggagcgcctgggggcgtggctgccgcgccgagtatctgctggaggccgggctggtccgagtgagcagctcttgggtgaagccccactcgggactaggtggccgctcatttccacttccgaagtccagcccgggagttgaccgccgcccagccttcctaattgctgggagaatacctctggggtggtggcgcaaggttggagcttcttcaccttgcgtagttaacttatctgtaaaatgggagtctcgtggaaattgctgtgtagttcattggcacgtactgagtattcactaaatacttgctaagaagacttaagcttcacgaggcagggatttttgtacactgatgaattcccagtgcctggaacaatgcctggcacataataagcattcggtaattaactgtagaaagaattgcataaatattcttggccagcttcgtcttaggtagatgatgacggtgatgactaatatttattgagtacctaccatgagccaagcgctgttctgactgctttacatgtcttttgtcatttaaccttcgcattttgcagctgagattaaagaggttaagtaacttgctcaaggcctcactagctaccaggcagaagaggtagaagtggaacccagttctgtctgattgcaagcagacagagcccaagctttaaaccaccatgtgccaagcactttacataatatgattcgttggatcctagcaacactatgaggtaaagactagacccattttatggatgaggaattggaagcacagagggcaaagaatttgctcagggtcacatagccagtaagtagcggggttggaatttgaactgagtctgctgccaaacgtaaattactccccaaacataagaattcggtaaagcatcacacctagatcacacctagacacaatgggaagcccctatgctgggcagaaataaaaagtttctacctgaaagacctaaaagcacacagtgttgtgaccaacagatcttctgtctcgttcccctcacattgtagtggggaaactgaggatcatgcatgtgacttgcctggcaggaacaggacttgaatgtaggctccctgagaatgccagttcactacatggcctgagacagcacactgcctcccagcagattacttttatcccttgacagctcactgtctcctgtgaagttggtgaccctgaggacagaggccatgtctatttcatctctgtgacctcaatgctttcttgtgtttgtgcaaagcaagtgattagtgaatgcctgtccgttgagttggtgacagagatgtcacaaatgaccaaaggattcccatattccttctgtatgtgtaaacctaagatgcgagtatgcataaatcttaatggattatctcatccagtgtgcaggttggtgagacaggtacccccatttcacagattaggaaacaacttgaaagaaaggaaaagtagcaacctggactgactccacagttcctgactccgggctgtactggaagcgcttaagagtgagggcctaagcacactagcagggatggaacctggctcctctctttaccagttgtgtaaacttgaacaaatttttttttaatcctcagtgcttctgtatcaactataaaatgagatgataagagtactaatagcatagagttcttgaggattaaacaaattaacgtatgtagaatgctcagaacaacctggcatgtaaatgctcactaaatgtgtgctacttttactagatcacgtttcttcataaaatgagaataaagagtgtcttccaccccagccattcttactgccttcttttcaccttagtgggtggaatttgtttcagttgacacgaagactaacagctgagctgttaaccttctggtctaattttctttggcccatggatgcaagctaccttgtaagtgttggccatgtctgtattcctttgtgctcaaaggagatgtgcgttaggtgaaggcctgtttaagggtcccaaggtactacctctctgtttcagatcgcgctagcgagcttttatgaggacggaggggatgaagacattgtgaccatttcgcaggcaacccccagttcagtgtccagaggcacagcccccaggtaagggccagcttcaattatcgctacatgagtgtttccagcagtgaagagg

SEQ ID NO: 99686 - DNA, 1284 bp, Homo sapiens
gggggcggggagggggggtctccaaaaaccgcggcggcggcggcggccgctccaggcgcccgttccggagtcggggggaggcccagccgggaggggggaagggggggagccttagtcatttccccgctccagcctgctcccgcccgagcgcgcactcacggccgctctccctcctcgctccgcagccgcggcccatggagcccgccggcccggcccccggccgcctcgggccgctgctctgcctgctgctcgccgcgtcctgcgcctggtcaggtaagcacccccccgctccccaccgctgcactccccaaactgcgggctcaggcctctcagactggcactgggaccccttcggctaatgccgagcagtaatagggggagagacgcctgtaaccagggttatagatgcagaaactgaggcccagagagggccagcgacatgcccaaggtcacacagccaagggtagaacccaagtctcttctatgagagtttgtctctgtggactctgactctgtgcactgtgctgggcactgagacaaaagagccgagttgcttcactcagcccctgcccggtccaatggggaaggctgactgacagtggctttcagagcagggccgtccggcttccccagaatctgtccccatggacatacgactttccacatgtttgacttcagggtgtgaggggaggaggtgagggcagaggtcctcccgatgctgcctggaatggaacagagacaagctgttgcaattagggaagagtgagccctccctctggtgcgcagagtaaaccggtgttagtgtgtgcctgggagagagggagccgggaggccgcggtaaccccagagcgagctgctgcgagcaacagatccttatgtaaaaacacggtggattgtccctgtggttgccaaagcctctccctggtggtcttgctccttgaggcgctcccagctcccccttcctcctgccttccccgagcttccaggcagctccctgcagttcaggtgctccgcggggatgttacctgtggctctgaccatgtctttctgttggcctacatcaaacacctggctgtcgccggcaggcgggctctgaaggctactgtgcatgttcaccaaagggtgaggtcaccattcaggagtcttgcttcttaaatgggttttgcaaaaccatgggtctcctgggagggcaccgggtggggggcggggggagcagagaaatggcattaagggagttgggagggagagaaaaatggggatcttgttttttgtcgtcttgaaact

SEQ ID NO: 99687 - DNA, 1031 bp, Homo sapiens
tgaacttatgaacgagaggcatttgatttgtagtatgcccgttagcatgtggcctctctccgtttggtaaacggttttctacagatccatgccctcagctgaactctcagctctgtgccttggcccgtgctgttcctgccatcagaaatgccctccctgtacctccttgtcttcctgtgtctgaatcctactcatcctccgaggttcaatttaatgtgcctcctggggagaggtcagaggagcctctccacgcagacacacaccctggcctagcgctaagatggtgctaagacccctgggtgttgatctgagccctgctactgacttggacaatttgcaggaatctgtgtctcattttgctcatctgtaaaagaggaatggtattaaccactctattgcaaggattaagttaattaatgcgtgtataatgctggaagccatgccttgtatgtagtaagcactcaatacatattaaccagtgttgtaattagcatggctttattctggtttgattcctcttttttaacaattgggacggattttcataaaacatctaacacagttgcttacacatagggggtacttaaaaaacagcaaaggctgttcagtgaacaaatgtccttcagcttgatattttccttgtagctttttttttttcttttttttttttttgagatggagtttcactcttgttgcccaggctggagtgcaatggcgtgatctcggctcaacgcaacctccgcctcctgggttcaagcgattctcctgcctcagcctcccgagtagctgggattacagggatgcgccaccatgcctggctgattttgtatttttagtagagacaaggtttctccgtgttggtcaggctggtctcgaactcctgaccccaggtgatccacctcccaaagtgctgggattacaggctgagccaccgcaccacccagctgtccttgtagcttttatgctgttgggggatggacaagttgagtagaaacccaggctagagtgatttaattgcctgttactaggga

SEQ ID NO: 99688 - DNA, 1043 bp, Homo sapiens
agtggttgatcaggaaaaggaagtcgaaatggtaatatttacacccaaagcaggtggagtggtcttaggcactctgagactccactcacctgccatgagaaccgggccccaagggtgatcccttgccagagtcaagactgggtgaggctgggaatgggagaaagaggcaggacaatgggcagatagccctgggcttcctgcagtgagggcagataggggtctgtgagcctctttccctggctgccctgcccctgccagtggggtggtgccaggccatgggttggtgggcaaattcacagggtctctctcctccccagccagagccagaggggcacagcagctctggacatctgccgcagccttgtctgatgtacaaggcaaaggtggcccaggtcagggcaggacaaggtcacatgaagggtcagtggagagcccaactggggccccaggtcacctgtcacctgcataccaggtagctgccactcctctgtctacctggttctctccttctcccctattctagctcgctctctcactctgcgtctgtctctcaggcatgtgtttctctgaggtctttatgatcatgatctttcttttttttgtttcttgtacctcaccttgttcagaatcgaggccctggctctgccttgctctgaactgttctcacttggtccctatccatcttcaacgcatctcatgacaagctcgtcctgccctcttcctgtctgggctccccccgtgcaccccaatctctccacccagggtccctgtcttgtgtgccccagtgtctctgattggggctcaggctcctgcagccaacctctacaattccttccagctgcccatttgggagcccttgaggcctggactgggtccagctccagtgtgtccccatcacagtgaggcctggatcacagggcatcagcaggtgttggtgagagtgaagtttgagccacagccacctccttgtttattcaatgtatagtaacaacaacttcctcagggcccatctcagggctaagtgacttctatgtgtgatctcg

SEQ ID NO: 99689 - DNA, 1029 bp, Homo sapiens
cccctagatgtgccagccacttactaacattttaatggcagtggctgggtgaccacaccacccaccaggtgccaaggactgtgctagccgtttcatttatttcactgatagcaaacacagttaatgagtacctactatgaactaagcctctatgtgcttggtgattttctttattttgctacagttacaacattccaactgcatgccaggggtggtgcttatagatttccctcattcttagcctagtaggagctaccagtccttgagcacctactgtgtgctgggcgttgtgcttagtaatttcattcatatgcaaagagcaccctcaatgtctgagcacctgatgcctgcctagctctgtcctggtgatgacctcaccgtggtgggggagctacgttatggagccctccctgtgatctgtctgtgccacaaggtcagagcttctgccctgtgctgtttcagttccacccaccttggaggttactcaacagcccgtgagggcagagaaccaggtgaatgtcacctgccaggtgaggaagttctacccccagagactacagctgacctggttggagaatggaaacgtgtcccggacagaaacggcctcaaccgttacagagaacaaggatggtacctacaactggatgagctggctcctggtgaatgtatctgcccacagggatgatgtgaagctcacctgccaggtggagcatgacgggcagccagcggtcagcaaaagccatgacctgaaggtctcagcccacccgaaggagcagggctcaaataccgccgctggtgaggcctctatttcagctgacccagcttttttaaacttttagttttgtgggttttttaaatgttaaaagtagtaattcatgcttattatagaacaatctagaagtctataaatataaagtagaattttaatgtcagctccatttccccaaatcccacactccaagagtcaccactggtaagagtttgatgcacatcttgatagatcttttgacatagatttatatcacagga

SEQ ID NO: 99690 - DNA, 1170 bp, Homo sapiens
gggggttcagtgaatatttccccaagaaaaggctgtttaaaaatagcatctgaaggaagaaaaggattaaagcagattaagaggcagcagcatggagcatgcaaaggccctggggcagcctgactggcattcattccaagtcactgtttttgagcacatgtggtgaggaagcatggcaggcaggcaggcagacagcaatagaaaccagatatgcagatagacaggagatctgagattgtcatggaggggcagcccagccagcgcagcactgtcagcagagccatcacaaggtgacaccatagttgagtcttgaaggaaacaggaaagttagccaagaggaaaaatgatcaaaggggtccttcgaggctgctattgaagcatgaagtacataacatcaaatgccaccccccccccgaaatatctggtgggcagatgagtgggtacatgagggcagggcagtgaattagcctggaggcagcacgtcagaccacgtgggactctgagcagggcgatgagttggacttgaaccagccagccagtgggaagctccaggagggctggaggccagtagtgtggggacagatctgcgtgatcttccccagcagacgtgcccctgctcctggagggttctttctgtggccacgtggggcttgtcatgtctcagaactgctttcagagccaagcactcatgccaaatccattaataaccctgctgccaagccccactgctcatttctgacattatccatgctaacatccccggggttgccggcttgagaatttacacaacttctgccaagccagtggctctggtttgctcatcaccttgaccgtgaccctccagtgagtcaagtcatgacctccaattacagaagcaagtgcacgaacaacttctttgattaacttggacatcttggtctttttcttttctttctttaatgatgatacatagatgtttataatacagaacatttggagaatatgggaaactaaaaaggagaaaaaaaataccatgcaaagaccactgcagtttgcattttgctatgtttccttccagtgttatccacacatttttcataattgagataatcctacagagaattttcctttttcacttatcattttaatgtaagcaattttaacttaaaaaaaaaacctcctcataaacct

SEQ ID NO: 99691 - DNA, 1435 bp, Homo sapiens
gctctagcacccatctctacgcgctttcttgtcccacagggagccgccgtgatgagcacagccaacccagttcccggagggctggggcggtgcaggctctgggacccaggggccagggtggctcttctctccccacccctccttggctctccagcacttcctgggcagccacggccccctccccccacattgccacatacctggaggctgacgttgccaaaccagccagggaaccaacctgggaagtggccagaactgcctggggtccaagaactcttgtgcctccgtccatcaccatgtgggttttgaagaccctcgactgcctccccgatgctccgaagcctgatcttccagggtggggaggagaaaatcccacctcccctgacctccaccacctccaccaccaccaccaccaccaccaccaccactaccaccaccacccaactggggctagagtggggaagatttcccctttagatcaaactgccccttccatggaaaagctggaaaaaaactctggaacccatatccaggcttggtgaggttgctgccaacagtcctggcctcccccatccctaggctaaagagccatgagtcctggaggaggagaggacccctcccaaaggactggagacaaaaccctctgcttccttgggtccctccaagactccctggggcccaactgtgttgctccacccggacccatctctcccttctagacctgagcttgcccctccagctagcactaagcaacatctcgctgtggacgcctgtaaattactgagaaatgtgaaacgtgcaatcttgaaactgaggtgttagaaaacttgatctgtggtgttttgttttgttttttttcttaaaacaacagcaacgtgatcttggctgtctgtcatgtgttgaagtccatggttgggtcttgtgaagtctgaggtttaacagtttgttgtcctggagggattttcttacagcgaagacttgagttcctccaagtcccagaaccccaagaatgggcaagaaggatcaggtcagccactccctggagacacagccttctggctgggactgacttggccatgttctcagctgagccacgcggctggtagtgcagccttctgtgaccccgctgtggtaagtccagcctgcccagggctgctgagggctgcctcttgacagtgcagtcttatcgagacccaatgcctcagtctgctcatccgtaaagtggggatagtgaagatgacacccctccccaccacctctcataagcactttaggaacacacagagggtagggatagtggccctggccgtctatcctacccctttagtgaccgcccccatcccggctttctgagctgatccttgaagaagaaatcttccatttctgctctcaaaccctactgggatcaaactggaataaattgaagacagccagg

SEQ ID NO: 99692 - DNA, 1035 bp, Homo sapiens
gccatcctgcccattcctggaggtcctacaggtgaaactgcaggagctcagcatagacccagctctctgggggatggtcacctggtgatttcaatgatggcatccaggaattagctgagccaacagaccatgtggacagctttggccagagctcccgtgtggcatctgggagccacagtgacccagccacctggctcaggctagttccaaattccaaaagattggcttgtaaaccttcgtctccctctcttttacccagagacagcacatacgtgtgcacacgcatgcacacacacattcagtattttaaaagaatgttttcttggtgccattttcattttattttattttttaattcttggagggggaaataagggaataaggccaaggaagatgtatagctttagctttagcctggcaacctggagaatccacataccttgtgtattgaaccccaggaaaaggaagaggtcgaaccaaccctgcggaaggagcatggtttcaggagtttattttaagactgctgggaaggaaacaggccccattttgtatatagttgcaacttaaactttttggcttgcaaaatatttttgtaataaagatttctgggtaataatgagtccttccggtgttcagtattcttgtctttgtgagtgcgtcccggggccgcctcggggcctgcctgccctcctgccaaagcctggaagaggattgaatggaccccagggtttggaaacaacctacagcatttgagcccctcacgtaggttttagagacgtacaatttttgtttgccctggctcagaaggagccggtgtaaggttgagataaaattccatatagacaactgagtttggatctcggctctgctgctttgtagctgtgggagttcaaacagcacctctttgagacttgggccccgcgtcggcacaatggggcaggaatagtccctgccagggtgactgtgtggattcaaggaggttggaagcactgagcccacgcttggcactgggtaggccatcactgaggcttgtgt

SEQ ID NO: 99693 - DNA, 1024 bp, Homo sapiens
gtggggcttttaaaccgtgccccagtatggcaacgagatgaagcactgccttcttttgccttatttccaaatttgagatactttgtcttattaaaggaaagtatactggcttcattcagcctgcacagggcagaaaaagacttcttgaagaggaaatccctgaactgagatctaaaaaataagtaacaagaagccaggtaagtgcaaaagagccagtgcaaaggagttccaaggagccagtgcctggcagaggccagccgtccctgtgtgcactggcccctactgagctctgcagcccgattcacaccactctctccatcactccctgcactggcaacaccagcctcctgccagtttctaaaatgaaccacaggaccccggcatgagctactccctctgcctgcaacactccctggatctttcctgcttgtcctccaatccagaggctgggctaagttcccttgtcaaacacttccatagtaaccatgtccagcccttctttgtagccctcatctcaatttgtaattatacattggcactgtgattacatgattaccatcctctcctctactgccccagttgctgcctcagggcaaggagggtgttgattcactcatcagtgtaactcctatgctaagcccataggaggcacccagcaaatattagagggatgggaggatggacggagtgatgagaaggaggatgagaggatagatggatggaagaagggaggctgaatggatggctggattgatgcaggagagcacggatgggtggatgggtgggaaggaagaaaggaagggggagagggagggaagagagcaaagggggagaaggaagagcataaaagtcggagtctgcttggcattttaggagaactgagagtccctggctggcaggtttggaactagaagcaaacctcagtacatctgacttttcccactgagtttctctgcctttcatcatgatcctgggttcagggcaatcacttttttaaaaaaatgacgcatgatccccaacaggc

SEQ ID NO: 99694 - DNA, 1026 bp, Homo sapiens
gccccgcggcctacgctcctggcctccccgccttggcctggccgtttaaccgattctttcgcccgcaggtcacaatccaaggtccggctcctccgcgtcccagggccggacggagggatgaggcagggggggcccgggcagcgccgttgctgctccccccgccgcccgcagccatggaaacggggaaggacggcgcccgcagaggtacacaaagcccggagcggaaaaggcgaagcccagtgccgcgggcgcccagcacgaagctgaggccggcggcggcggcccgggccatggatccggtggcggccgaggccccgggcgaggccttcctggcgcggcgacggcctgagggcggtggcgggtccgcgcggccgcgttacagcctgttggcggagatcgggcgcggcagctacggcgtggtttatgaggcagtggccgggcgcagcggggcccgggtggcggtcaagaagatccgctgcgacgcccccgagaacgtggagctggcgctggctgaattctgggccctcaccagcctcaagcggcgccaccagaacgtcgtgcagtttgaggagtgcgtcctgcagcgcaatgggttagcccagcgcatgagtcacggcaacaagagctcgcagctttacctgcgcctggtggagacctcgctgaaaggtaggagcaccgcgggcctttccacccacgcagggcctggaccccctgctctccggacggcttggcccacactgttcctggccttcctaggcctcagacctggtccctgtcaccctgtgccctgacacaccctcctttcctgggcccaggcattcggccctctcttctcaggtcctaagatcagtccctgggcctaaagttggctggtgtttccataacaagagctcgtttaagtgctaaccattaacttaataagtgctcaagaattgcgagctatggttattaaacgtcttctatttttaagatcggttgggggagtggaggaggggtcgggttcagttagtagcagaactgcggagc

SEQ ID NO: 99695 - DNA, 1051 bp, Homo sapiens
aaacaaacaaaaagaaaaaacttgactggacccacccacaccctctccctgtctggttccaagtttcctgacaccctccagctccaacccccaaactcctgtggcttcctcgtctgccttttcctctgaggcccccggcccttcatcccaggcagccgagcaaactgactgtcttctggcttggtcctctgaggggtgcaggctgacaaccctcacaggtggcctgagagctgtcacataacaaagcatccggcatcttttccctccgttttacattcttaatctttttcttaacctcagaggctggctgggaagtggttttacttaaaaggaaaatggggtacattgaggcaagaggtcttgcagtcctggaggaactaattatcttagtttccgggttttaactgcagttagggaatgtattcatcctaactactcagtactcacaagcctttttcatactaccagtagctaagtgtctgcttggagaggagagaggcggtagaaagtttgaggagactttccgaggcaggaggatccaggggaagaaagtttactaatccgagtcccagctgtggtctcagtgctgaagtaatttttaggtaataacttcaaaagtaaattctatcctttttctataaataaactaaggcttagaagtgaacaaataacttgatcagggttaatccgcttgaaagggaagttagactgtactcctggtttccttacatttctcagagcttaagtgacggggatcccagatctgtcttgattcgaggcctggatcctttcgaaggcgtaatgctgttctctgcaccctgaggatgaacttttttaagagtgggtaggatttggggtgagtttggagggggtggtttcccaaaatcttgttacttttgcacaacttaaagatcccccaagtctttcccaagagaacgctttgtcccattgcaagtcagttgtttgacagtggagttggaaacatgaatcagtatcacctagagtcctttaattagatgtctaactttataaagtccatccgtgccccatc

SEQ ID NO: 99696 - DNA, 1895 bp, Homo sapiens
ggttgaggctacagtgagccattatcatgcaatggcactataacctgggcgactgagcaagaccctgtctcaaaaaaaaaaaaaaaagactccctaggggattcgtttatcttacctatattctaggagcgcatcacttactttgaagtctttctattctcagacttctcttagtcttctcctttactgccaatgaatggtctggacttcctactacaggattgccttgggatgtaggaatttgccttgccgaatgtttattccttgtgtcctcagttcattgacgccagtctcgaaccttcaacctcagcttgaagctcttgcttactctctcaacatataaatactatgtggactttcctcacctgaagaatttgtcaaaattccaaagtgaccccatggcagcatagcatagtggttagtaccatggactttggggttagaccctctggctcatcccaggactgactgcacaaaacatggagcaaattgtttgaaccctgtgaggagcattcctttattgtaagatagtgggtatgtacctatgacattaggtacatagggtcactgtgcaaactgttaatgtcagcaagtgctccacatagggaggaattcactgccttatataagttcacaccatgttctgtactcttctaccctcacccccttcaagattcacattgttcttgctcaagtttcccaaacttgtttcatcatagaacacaccttgttttctgtgttgtcaggcacaccaagttgacagaaacactggtgttttcatcctccctttgtgaactaaaactgggacctagaaaaatgaaatcttttgctttaggccgtacactggattggattggtccctttcagttgtttggagtctttaaaatatttgaacctctacggtgttcagggctcagagacagagcagtgaagaaaatatgtgttgtttctgcttatgaaaatgacattcaagctgacttgcaatgtgtggatttttcaagtagtaaataggtaatcatttttgcttcttaaaatagagaacagataccaaaattactccaggttaaactttgcttattctggattccaaaatttaggggtcttgatctgtcctggggccttgggtttacagcatgcaaataccacccagtaatgttaaagctggaaggaatcgtagagataacctggttcagctctctcattaaatagaaaagtcctttacagtcacccttggccctgcctcctaaaactcagaatgattttgaacaggccaaaaagtgtgaatctgccttgaagtctcaactaaacctaatgctgagtccctactgtggtatttgaagggaaagaaaaaaagcaaagcaaaacacaccaccccttgccccaatggaacttacatttgaaaagtttgagaactggaagaagatttaaatgctattcaagatcactggaggaaatgaccagtcaactcataagcaagggctttgcacaagaattaagaggaaagagaatcaggagttagggagaaggtgggcttgaaagtagggtgcctaggactgtggataggcgaagagacaaagggagtccgtttcactatttggccagtaaaataatccagtatcgaaaagagaaatgtcttgaaatgctgttcttggtcttaccccattttgtttgatagccttaaatgcattgtctccttccattctgtgcacagaccaaacacgtcctacccagaggcattaagacagcagaagcttcggaggaatagaaagaggtcttagatgtgtgacctggctgcctgtttcacaaggaaggaaactgaagcccagaaaagggacaaaacttttatccacaatgagttagtgatagcactcaaaccagcctcccaggctttttaa

SEQ ID NO: 99697 - DNA, 1050 bp, Homo sapiens
cggaagactgagtaagaaatctagtcccccgacctcaaaacatctgcagaatgtgccagcatttctcagggttaagtagaagagttaagccatagattgctaaccagaatatctggtataatttaataaaaactaaaataaaaatatgaaactagggccttggctggtcagaagagggaagttactgggaaatcaagtgagtataagatagactggtgttgcagctagccttaaggtgcacatttcaattgtacctgcagagattgtgggggcagcaggcctagggagagggatcacttcaaataggaatagcctggtctgcctagaacatgggtttcagctgttacagcctaagaagtgtgatgtcttagatggaataatacactttcattctaagatctaaatttcatcttttgcctaacatgtaaaaacttactcttacggcctacagcactgggattattgaaatcggtgacttccaaggatttggttggggttgagtgggaatgatgatgttagtgatggtcagtggttcatttccccaaaaagatcttacattctgccaaatgtagttcctatctgacttaagtcacagtactcatgtggtatagtttcattctctcatttgatagatgtgaagactgaggtaccaaaaagactgaggctcagagagcttcagggacttgcccagggttccagccatcttttcatcacacctcagtctccctgtgttttccttgaaacaaagaatccacccagtgaggcagtggtcagagttggggtctgaacccaaactctttgtttcctggtctgtgtttttcctgttacttcaccaagtgcctccgagtgcctggcatcatccacgtcgcctccttccatctggtcgtgaggtagctgagaccccgttagacagtctgcttggagtaaaggactagaattctgacatgtttgttttctcccgggagttcgtgtgtgaaagcatacgctgcagcttctcatgaaagaagtccaggggcctttcctgcgcaaagaagtacttttgaggccagg

SEQ ID NO: 99698 - DNA, 1615 bp, Homo sapiens
gcattaacaagaatccttctacaagtcaggaaaaaagagagggaaggtcatttgctcagcatggagtaacaatgatattagaagcaacagacccgtgacagccttcttgcatgctttcccttgtcccatctgcccagcagctttgggaggtgtgggtggtatggcactccctgtttggagacagtataatgaaacaaaaaggcttcgcagtcaaccagacggcagtaaacccgagtttccacctgggcctcattccaaacccaggtacctgacaccagtccctggtgcctgtgtcataccttagaaaggcactcagtgccagttgtgcaggtccccttggagcagttgtttgtcaccaatgtcactcttgaatacactgcatcctttagttaaaaagaagtgtgactgtgtccatctcactcaagctccttcctgtcttctttgatttaggagaaaggatcctgggttatgctgaggagccctgctatctctggtttgtcatggagttctgtgaaggtggagacctgaatcagtatgtcctgtcccggaggccagacccagccaccaacaaaagtttcatgctacagctgacgagcgccattgccttcctgcacaaaaaccatattgtgcacagggacctgaagccagacaacatcctcatcacagagcggtctggcacccccatcctcaaagtggccgactttggactaagcaaggtctgtgctgggctggcaccccgaggcaaagagggcaatcaagacaacaaaaatgtgaatgtgaataagtactggctgtcctcagcctgcggttcggacttctacatggctcctgaagtctgggagggacactacacagccaaggcggacatctttgccctgggcattatcatctgggcaatgatagaaagaatcacttttattgactctgagaccaagaaggagctcctggggacctacattaaacaggggactgagatcgtccctgttggtgaggcgctgctagaaaacccaaagatggagttgcacatcccccaaaaacgcaggacttccatgtctgaggggatcaagcagctcttgaaagatatgttagctgctaacccacaggaccggcctgatgcctttgaacttgaaaccagaatggaccaggtcacatgtgctgcttaaaattcagggctaagcattttgggtgattttaaactaggtgagtgctctctgttgttgttttttgttttttgttttgagacagggtctcactctgttggtcaggctggggtgcagcgggtgcagtggcaggatctcagctcactgcaacctccacctcccgagttcaagtgattctcgtgcctcagccacctgggtagctgggattacaggcacctgccatcatgcccggctaatttttgtatttttagtagagacggagtttcaccatgttggctaggctggtctcaaacttctgacctcaagcgatctgctggtctcagcctcccaaagtgctgggattacagttgtgagccaccatgcccagcctctcttttttttctgtatgcccacttcttggaccgggttcttcattctggaccctggcatgggccctgtgaacttgcaggggaata

SEQ ID NO: 99699 - DNA, 1049 bp, Homo sapiens
agcactttgggaagccaagtaggggcagattgtttgagctcacgagtttgagaccagcctgggcaacatggtgaaacctggtctctactaaaaatacaaaaattagccaggtgtggtggcacatgccataggcccagtacttgggagactgaggcaggagaattgcttgaaccagggaggcagaggttgcagtgagccaggatcacaccactgcactccagcctgggcgccagagagggactctgtctcaaaaaaacaaaaaaactctagttgcataagtaaacacacttgacccctataccaccaagatgaaaaaacacctcaatgttttaggattgtagatttcagagtcgcatttaagtcaggactaactagtttcagtttttttgcaaaaataaaaggaaatgcattttgggttggaaacctgggattcccctgaaagaagtggtgtctagtaacaatgcagggatggagtctcatatctgcgttttcctgactgtgtggccttaggcaaattattccacttatcagggccgcagttttattatctataaaatggagttgatcctatatatcttattgaggttgttgggggaatcacaagaggttgtgaaagtgccctatgtaaacagtctgaattaattgtaatacagtagcattgtttagatccatactttggcctaggtagaagtattggcttccatttccctctgaagacagtggtctttggtagcctcacttttgtggattgccaaatagcttttcttttgaaacaaagctgtagtcaaggcccacgctgtccaatcacttgttccagaaaagtatatctatttttaaagaccattcagtgatgggtctgatctctttcttatttgtcgcttttgaaagatgtttaataattcctaatggctcctaccagctagccacagccttttatcccatgcaggaagccagccaaactgatgttccaggtgcctccgcccacgtgttaccagggagagtgttgtgggatgagggaatctgcattcatggccaagtctgctgtctga

SEQ ID NO: 99700 - DNA, 1053 bp, Homo sapiens
agaggagctagttcctctcctactctgcaaaggtccagaatatggtgataagcagccaggtagcccaaaggaaagtagaagcaaggaaggttcttccttcatgggaaggtgtaactgccaaggggtcgaagtcagtggtttggttttgcaccccagaagctgatccctacttagtctttggtggagccttgaatttcccaaagggaggatgggaaaagggaaacgctaagctgtaccccgaagtgggtaagaatggaggtgttattaagagcagagagatcatggggtcgaggtggtatctcttgatgatgatcaattctttaatccaggcagatccagaacccctgaggttctttgagtccctgcccatatagtaggggtcacagctttgccacaacccatctcactagcactaaacagcttcacaagaggtgggggttatgagtgaagagtcagagtgtttggttctcttttctcgcaggaaattgaagctcagtcttcaactgtgaagaccctagtggcgctagatacctgtatacaaagagacatgtcccttggggcctcatctctctgctggtgttttctgaggagttttcctccccaggtggggaaggctggtattttattttttttgtaagtccccacaagctccccagtgacctgctgttgccatctcttgattgtttctgccgcatcaacagcaggaagctgagctgtcagttatgtaatggggccgatggccccccagggatcatctgtcccttgcagctctgcaggacttgaaagcatccatgaggggacaggcctggcccggggctgttgacgtcaaggcccagttgctgctcacatgttcctcctccatggcctccttggtgccacctaacctagatagcatccctttgggcaaatcagagtggctcttgtaatcgtccagctgtgagcaaagctgcctgatggttcaggggtgcttccaactcccatttcctcttaccccagggacgcagacactcccaccaacagctactggttatcaaaacctgctctgagggaccc

SEQ ID NO: 99701 - DNA, 2317 bp, Homo sapiens
tggtgggttcccctccagtagtaccatacagtaaagcagccagggctgccatgggtgtccttcacagtctgacactggtttcagcacaggcacactgtggcagggccaccagccatcccttcaggcgaggtcagcctgcatgtggattcctcctgtgttacaatgactgccccaaacattggcagaggaggcaaggctgggatagtgtgaggtgcccatataaccgaggtctggcagcagagaaggcaggagccacatatgcagccaggtcaaaattgccaaaagtttggaaagtaggagatctaaagcacacctccacccaccggcagctgggaaagcacccagcactgagggaatgctgtcattaggccagcgtctggcaccagctgcaaggaaagggctccaataagagccaaaggcatcatacgtgtctgtggtcctggtgccctggcagaagcccattctgagtgaacccagggattttaaagttgatgaggacccagcagaatggcagcggttgctctgtttctttctgacaaatcttccagctcactcactgaatcctgacttaagcaagggattccgtcactcatgcttactccaattgatgtggctgcccatagccctgtgtcgaaagattctggagccaagtcagattctggcatatggtaggcacttgcccagtggaggcattgattgtttagaccccaatatggtctcctaggaacttagtttaataatgcagatgagatatggacacttggtggtaatgggttatagatggctcagtagagatacaggaggacaggaaagagtggaggaggtggtattccaggctggttcttgaaggtaggttttaggggtaccttgtaagccaggtgggatgcgcaggagccacatctcagggtacatactcaggtttggtttcattacagtattctcagctacaggaggaaagggtactactgttcaggtagtgaaattcccaactggagatacactgtggacccaggacctagggagagtgcccaaggctctgtcttgattagggcagccgcattcgtgctcccagcccctcttttcatttccactagtgagtccgctgtgatattacaaaatcagaggaaatggagatctcctccagcgtttctaggattcagaggcatggcaggccttaaaactgccaaccaagtttaaaataaatcaataccataaaacactgcaatgaatttcccaacttttaaagaaatttcactttcagttagaggtgccaggggaaagctataactcagtttgcatcgtacacaggtcagaactctatattttgtttctttattaaagaaagtgatgtctagggacatgggaggaatggattagggccacccaggcactccataggccatagtgaggaagatgaaaatgcttccatttttccaggctgcaaaaagcatcttgatgtggggcttggggaagtcgccttatgaatggtcacctttatttttttttcccctgaactcggaggcctggtagtgtagctgtaacaggaggcaggttggctttgttatatcgtgttgggttttagtattgattatctattttaatgggaaaatcacaaagatgatgtgaaccagttgactcattctgcatttacttccatctttgtggggaaagaaaacccttcaccatgtacagcacccctttgtttttttttttctactttttttggatgtgcttaagacaagccctctcagaaagctaggcatgcctagggcaaatctaaggcatggagttgggagtatagtgttgtcagatcttggcaggttgtatgggcattaccagcacagcccggccttgtaccagacagaaagagaactagaagtcacaagtaaagactctgttgttagtaaccagattgcatcttggatctgatgatgtttggaaggaacccttggtttgcatagaacagcagaaataagtgattataccacaccccagacaaacaggctaactttaacttttaaaaatattttggagtttaggccaagtgcctaaactgaaatccagatgacaccactgacatggtccagaggtcctcctcccttttctgacctgagcatcttaggggccagggtaccaacaggtatagcaggaaaagccttcagagagcacatagctccttcctgctgctctggagtcctgtaagcaggacaacagccgtcgtgataatgccagactcgctcctgctcttagaactgagttgggatcattgccatagagagatccagatgtgagtcttgagcctaattatatgaacctg

SEQ ID NO: 99702 - DNA, 1138 bp, Homo sapiens
cccttggactcggggctgcgttcatggctgagtcttgctgcgttttgttcttttcttggtaatcagcttctcattaggttatgatgtgttgctcttctgtccttatttgcatctgctctctgctataattgtgtttcaagaacatggcgttttgttgtttttgtactgttttgctttttagagctgaaaacctgtgcggggtcttgtcacatgggcagcctggtgatcctgtcacggggcagctctccagtgtgggcatctcgctctctctttatttatttatttttactagttatataacatcagagtcatgattgctggctgtaaaattgattttgagaactactttaatttgtaaattgggaaatactttctattttgggttagggaaaggcatacaggggagggagatgggggaagaaggtctgtagtccctggtttcagtaatcttcaggtttctaagtgcaagcacccggagctgaggggcggccctccaaccttatctggacggtcagccagtggggaaggggctttggagtcactcctttggccatcccgtcacaccgtggtttgaatgacaatagagggcgtgggtagaggttgtgtcatctgcctgctcaccagacccccttccctggaaccccctggggacctaggtctttatacaaattcagcaagtggttactgagaattagcagcttgccgatcatcttgcattcactatatactcatgcgtcacttaatgacggggatatattctgagaaatccactgtgaagcgattttgtctttgtgcacacatcatggagtgttcttacacagtcctggatggtatagcctcctatacacctaggttatatggtagatagagcctattgctcctagactgcaaacctgtacagcatgttgtggtactgaatactactataggcagttgtaacacaatggtgtttgtgtgtctaaacatgtaaacatagaaaaggtacagtgaaaatacggcataaaaggtaaaaaaaatggctgggcttgctggcttatgcctatattcccaacactttgggaggccaagacaggaagatcacttgagcccaggagtttgagaccagcctgggccacagagggagacccccatctctaca

SEQ ID NO: 99703 - DNA, 1875 bp, Homo sapiens
tgggtgagtcagtgagtgagtaatgagtcagtgtgaaggcctaggacattactgtacactattgtagaatttctttctttaaaaataaattaaccttagcttactgtaacttttttgctttctaaacttaaaatttttaaaaaatttcttgattcattaacatttagcgtaaaacacaaacataagacagggtcgcgctctgtcacccaggctggagtgcagtggcacgatcttggattacttggcagcctcgaccttctgggctcaagctgtcctcctgcctcagcctcccaaagcgctgggcttacaagcctgagccaccgtgcctggcccttctttcttcatatccttattctgtatacttttttctattttaaaaaagtaatttttttactttttaaattttttttgcttaaaaacaaaaacccacacattagcctaggcctatgcaggctcagcgtcagtactccccactcttttttaaatgttgtgaaatcctcacctgcatcctaagtattgttgtccccccaactcccactccagagaaaggaagtgatttaccactggccacatggctagctcatgccagctcaaaggccagagctccagtgctcatgatctccatcgagctaccaaagagagttcatctgagcaaatccatatgcaccgcactgtctcagggccaccaggagctcagaaaagggagctggcttttgccaaagaagtaagtgatggcaaagtagaggacacatgacttaagatggaccttgaagaaagaagaacagattaggatatttgaagcaggggccatagcacgtccaaagacagaacactggaatttgtgaagagtgcctatccctgggtgggttcacacagaggctagagtagaaagctaaatagggctaagttgccaagagccttgaatgccagcctgaggagaatgaacttcatcctgccaaaaaagacaagggtgagtgggtggtggtgagcaaggctgtattttaggcaggtgagtcagtaacaatgaggggagaactgtcagtcccccaggaggggaagatgaattgccacactggcagtacctgtctccaaaaagtgtgagactgcacaggcaccttccagagcatgggaaggcggtaagggtaacatctgaataggaagatgagaaacctttgcttctatattggtgtcaagacatcaacagacttgctgttgaacctgttggactggtcaatctaggtttaaacggcagctctcctacttactagctgggcggctttgggcaagtgatctaccttctctgggcccccatttccttgtctggtcagtgcagtaagtgttgctcactgtaggctgtgtccggcgcagttcctagctcctgatgacagttgagtcagtggtggctctgtgtattgcccccatcctgctattttgtttgtttttgccaaatccttataggctaatcacacgttttcactttgcttctcactaacaatttgtgatagcattctttctcccaaagagatctccaaaccccttagcaattgcctccagtgagttccccttggcttagtgggctttaactggttgttgtaaccaaaagtccatgtggacctctctgtgggtgtgaccttcttggcatctttcttataaccacaaattgttctgtccccatatggaagagtgaccgttcccctttagctagtaatggcaccttagcatcttcctcctggcaagggcccctgaggacctcagcctttcccttgggctctttctttgctaatcacagcagccacaactgaacctgtctctggggaccaattgaggcagttggcagcttttattttctgccccacacttaataagttgaggagg

SEQ ID NO: 99704 - DNA, 1120 bp, Homo sapiens
gggcctcggagatgatcagaggtgaagaaccgcctggaagaggaaggccagggtttggccaggagaactaagaaggtctcaactccaggctttgttgtgtttaagctattgagagccccaggccacaccaggacttgcagtggtgggaatccattcctcttctgccctgtgttgcagggaactaggaggtaagggtggagggcgaccatctcgctcttgctggcggtggagcagccatccctgcctttctgttgggaaaaactgttgtgccaaactcttgtgtggaacacagctgggtcttcagcaggcatctgtcactgccgtgaggtcagcgcttctcacctaactgcctcctggattgtcatcttcccagatgtgtcccatagtgtccaggtgtcacagagacggcctgaggccctaagatctggttgtgactttgccatgataacagggtgtcctgaactggctgccgttgtcgtgttctcacagtgaagggcgtgccctgtgtgccggggtccatggtgtcatatgcagtgacacacactgtcaagcgccatttccctcacccctggagacttactgttaggtgcctgccctcagtatagacgtatccaatgggaaaacagcggacctgcccagagcagggaggtgtcgtggaactgggtagaccccctgcagcgttaggggcccatttgtgggctcgccaccttcaggcttccccagccatgacacttcagccccgccacccatgcctgtctgctgcagccatccttgcactctccagcgacactctcgcacctccctaggggaagcttccctccccctgggctgctgctctgagcccatctgttctccccctgcaagaaggggcaatgctcttgtgttgtccctctgtctggacgcgcctggccactccgaaggcttttcaccccattatggccaaatagtatagggccactggggagggggaagggaatcattttgtgttcatttttgttttctgtttcacctaaaccagcataggattgataggggagacggttggcgggcatttccgtttctatgtgaccaaggcagcaggggcttttacctgctaagcggcaatcctttggccctgaga

SEQ ID NO: 99705 - DNA, 3230 bp, Homo sapiens
ctctgtacatgagcaaatgggcaaaaacagtccccaaacccagcacccccctctccctggctgcagcccacactgtaacatccctagtgaggctccagcctaatgagccccttattttcttttttttccctccccaggtctagtagctctaactaaaaagttcttggagccatcgtgctccccctttgttatttttcttgctatcagagtagcaagaaacagcacccctgtaggtgacaggtgggcagcctggtaggggtcgccagcctccatgccccctcatcttccagttcttgcttagtggcacgacctctttccatagcataaatgcaggccagcgttttagccccaagtgcctgcccttgcttcttacccctcccctgctttctcaaacacttgcccacctcaggcactcagcgggctccgccgtggtgagagaactggccgtggctcagccccgggtagcacctgtagtttcagtgccactctccactgtccccttgtggaccagcttccactcactgtcacgtcccccctcctgcgtcttcactgggtctcaggctgccagcagctctctggtgcatcgtctcaacaccaccaagtttgtaggacctgcccaagttctagtagtattcaaaacttcaaacggcagtcatttgttctcctcggctctgtggcaaggatagccctttggagggggactcttgacctcggctgttagggatctgaacttggttttcccgtcagaagaatcagcaggacagatcgtagtgccttattccattgtcctcccctggccaggcctcctggctcagctggaagtgcatggcttctttctccctatctgtgtcctctgtcacttgctctttcactctctctctcattcccagagagccacgggggagggatcaccctcacccccaacaccctcttcctgagggctgtagccaggtccgcatctccccaccaccaccagggcactcactcgcagctatagcccaggacagaaaaactgtgctttggacaggtgcacactctctgcctcttacctctagccaggaggatgcctcagtctgttcattcgagactggccccgtctgaaccttctctgggcactggggactaaggttgcaggccttagcctcgtctcgtcccagaggcattggatcaggagaatgggaatttttttcctcccacctggacatagtttgcccctgtggctgcctttctgagggagtatactaaatgtttacttaagaaacaccctgtttacagccagaggagaaacacccaacactgagtggagatttgactctggacagggcctggcctccttagtggcactgccggggggccccagagcgaatgagggcagagatgcccggggcaggggcaaacgccctccgctccctctgctcccaaccctgtggtgctaggaccactccccgccttccctacggcctcctcgccctgcacattccccacctccacattcccctcctccaagatctcagctccttaacatatcagttgtctcctagcctagaaaaccagtgtttggagcaataagatgattatttttgcttgaatctttttctaagagaaggaaaagagctggcattgtgggaattttctttttatgctgttagctgtttaccttcttagaagacatcctaataggatggatgtctgggttttagccttggggtatcttttggaaacttagaaaagcaggagtcaggctgccaccccctaaggagggaccctaacgttctgcccttgcctggttccatatggctccttccagccctgcccaccaagtgcagctcccactttccatcctgcccatacgcccctcttcccccgacatctgggggcgctggtggcacttactctaggttggtctcagactatccctccccttggctggttttccctcctaggcctgtctggcagcccccagacagacgtagctcctgggagtctcggccctggcaaccttggaagagccaagctgacattgtttagctcttcaggccactgggttttggaggcagaagtccagagatactggctctgccaagctgtcgtactgggctgtggcacagccttcgagacaacacgggtgtatctctgatcctgccctacctaggcttcaaggggcttctgtctggagaaatgccctcaaagggtaaccagtaggtgtggcattgaattggccagtgttagcatctacagccatcaccgagatgagtccactgccgttgcctgcccgagggccccctaaggttatagacggtatcagcagggaggccgtcccgctggttttctaggagagcccacaggaggaagggagcctcttcaggggcactggaatcttttgtgccaggggcttcttttcatcagagccggggagtacattgcagtgacttcttaaacatttgtgtgggacagacgagcgtgagggaggttttaagccaggcacaaagttagtttccaatactagttaataaatctatttttcttcatttcctttttttgcacagaagctggtaatctaggacctacgtgtgaacaactttatatgaatattttttgtacttggtttacttgggttggtatgatacattatatttaagttccttgaacactgtggatcccctaatgtgtatgaatgactgaggctttgtaaattaagggacgtttgtgtgaataaagttatttgatggggtcaaagaagccatatgtgatttgaaaaagagtgttttgtggtttgttgcccctgtttgggagggtggcaaggccagcccatgcgcagccccccatcccagctggtgggtggtgggagagaaggatccttggccgtttccatgtccccgtgcttgaagaagctgcctgatggcctttgactgaccttcccattctacacctgagaaaccagcacttggaagtgcaggaagctatctgaaatcgtgcagctgccactgggggatcctggatccaaactaagcctagtctgcccttccagggggtccggggcctaagcaaacattgtgggcccctcctccagacatctcagaagccccctcaacccccaaccctgtggttctgcaagttctgcctttgagagagttttaacaaagagctaaaaagggggggtctccataccacagcagtaaaggtgtaaggatcaagttttggaaaagctcagcagagaggtcggttccatg

SEQ ID NO: 99706 - DNA, 2177 bp, Homo sapiens
attattcctctatgggtttttatagacataggaacccagtcagcctcagagtagtccctagttagcacatatgccatgtatacccctctcctcactcgattactgcagggcgtgggaggctggggcagggttggggattcaagttgcagatcaggcactgactaaacttcttactcttacttcaggccttctttgacccttggccacagagtatggaagtagctccgcagaggcgtgggctcgattcctcagggccacgttaccacagacctgtttgtttcttatgctgttgttcgtggagtctcatgggattgtctggtttcccttacagggccccctcccccgggaatgcgcccaccaaggccctagactcatcttggccctcctcagctccctgcctgtttcccgtaaggctgtacatagtccttttatctccttgtggcctatgaaactggtttataataaactcttaagagaacattataattgcacctatggatctttatttttagaaaaatctttgatatattgggtgcttaatagagtcaagaagggttgccttggaaaaaattaaccctgatcttaccttcttccctataaaatgttttactacccatttgcatctgtacatcctcatacactaagatacttacaaaattgaacattttcacttatcagattcaaagatcagttttgttgaaatcagtacccataatatcctcttgggaaggcacttgtctagatagcttctccatgaagcaaatgctaaaaatgaaaattctgctgggagaggaacaattttggcataactttctgccagggtcacacacgtaacatataacctaacgtaacttttgaattgtggtatcttcatgagttcttccacccaaagcctgtgttcactgagcagcactctagtacttagtgcatcaagctctaagggtacaaaaataaggtgaacactgttgtaaagttactgtgtagggggaagataattgtaaatgcaatcagtggtacttaccacattaatggaagaaaaaagccataggatcttctcaacagatgcagaaaaaacatttgagatgatttcaacaccctttgatgataaatacacccagcaaattaggagtagaagggaattttttttttttttaaagagatggcggggtgcaggcatgagtcactgcacccagctcagaaggcaatttttaaacaagattaagggatttatgaaacacagctaacataatagtgaaagactgaaagttttacccttatgattaggaacaagacaagggttcccactttggccactttcaacattgtactggaagttctagccagaacgattaggcaagaaaaagaagaattggaattggaaaggaagaggtaaaactatctctgcagaagatatcctgtatatagaaaaccccatcaactagatagctactagagctaatgagtgaattcagcaacgttttagggtacaagatcacataaaaactattccatacaccaccaacaaacaatctgaaaaggaaatggaagagaattccagttaggatagcaaccaaaagaatacctaagaatcaaagcaagcaataccagaatacccaggaatcaatcaaaccaaggtgaaaactacaaatcctgaaagaaaactaagtagatgaggaaagccaacatgttcatggatccagacttactattaaagtaacaaataatagtctccaaacattcaatgtaatccctataataattccagtggtcattgcagaaatggagaagctaatcctcatatatatgaagctacaaaaggccccaaatagccaaaacaatcttgatcacattagaagtctcacaaaacctacaaaattgtaataaacactgcatctggcataaagatagacaatggatagatgagagtacagaaataaacccttacataaatggtcaattgattttctgcagtggtaccaaaaccatctattgggaaaagagtagtcttttcagatggtgctgggacaactggataaccacatgtaaaagaatgaagttggaactctacctcatatgccttcatttatcactcattaactcaaaattggtaaacaatctgtaagagctagatctagaagaaaatgagtaagtcctcatcaccttggatttggcaatgg

SEQ ID NO: 99707 - DNA, 1211 bp, Homo sapiens
ttagccaactgtatttaaggaaaatatttccatgacagcatttgaaatcatgagtcatatttgaaaatgcagttgccttctctcacttggattggacatgcttacattcaggtctagaagatgggagttgggcattcaagcttgatctttcccgacatgtggttttggatgggaagtctggtgctgagagttgtagcattaagggatttggtgtctgttatttcccactgtccttccccaagttggggaggagagtgggaagctgcattgtactgtactcttctaactctttcttcttatgtcctcttaggtgatgaccccacaaggaagaggtactgttgcagccgctgcagctgctgccacagccagtattgccggggctccaacccagtacccacctggccgtgggggtcctcccccacctatgggccgaggagcaccccctccaggtgaggagcccataaggagaccagtgctaattgatagaagatgccttagctggattaatgatgagatataaccttgactgaagctgatgatgagtttgtataattaagcaggattactctgagatccagcgtggctgactgatgagactaggtggacaagagccattgggagccctgggtgttaggctcaaatgtcagttttctgggagctgctgagagggtggaatggtccatctatctcagaacttggtggaaagctttgtagtttttttgctaccttttcaagatagacacttgagctatattcttggggcttttctcttgcaggcatgatgggcccacctcctggtatgagacctcctatgggtcccccaatggggatcccccctggaagagggactccaatgggcatgccccctccgggaatgcggcctcctccccctgggatgcgaggtaagtgcctgcagtggtgactttggcttctttccctagagcctagtgggataggaaatggagggaagattgcatttagatcatatcccatgggctttcaagccttaaatctagggaaatccagaaaggaaagagaagagggaacatttcttaaattgggcttacctcccctcttagaaaagttagagcagccatgcacccagggtgtttctcaatatctaaggcagcggcctcaggacacaatgaaataatgcattctgaggatccctaacagaagttatgagattgtcttatgctctttggtttgac

SEQ ID NO: 99708 - DNA, 2420 bp, Homo sapiens
gcagctcttttgtcatatgcagtgtccatattattctgtcactcactttgaattccctttgattctccttggggctgatttcttctgtgacccaaggtcaagaagtatagtttaaaaatgtggtagggatgccttggtgccaggtacgtattagagaggggccaacagatgagcgtggagctactccaaagttccctcctgattataaaaaatgtttattggaaaatatttttgaaaatacaaagaagtctatgaatagaaactaaaataccccgaagggtttttttctaattatgaaaggacaatacatggttattattttaaaaaataagaaaatgtgagccaaaaaagggaaaaactgtccatccacagacaaccagttaatatactgtaaaatatcaaaacaaaatcttttgagttctttttttaaatcaggctattttttcccctttatttttaggatctagctttagcttttttccccactttcctatcctgttgcagttatttttcctacttcacatttatattttgttcatctttttctggttgttgctttttgggggtttctgtttttatgcttttgaggaacagatatgaaatttcaatttctgtgtatgtgaaatttctcttaaccttttccttctatggcttctcctatttctgatgtaagatgaggggcagaattataggcctgtgaggttgaattgatattagaaggacactgcacgtaagtgaggtgggtgggagtcatttgattggaattgtttaggcagcctcctgatgttggcaagaccttaagctgaagggagggaatagggtcctaagaaagaagacttggctgagggaagggccttcacggttgctgtggaatagcatttgggcccgggctgggctttgttgaccttgtcctatctcttggtcagtgtgtcctcttggcatggtaggaaacaggtagatagccacctaagaggttatgtgttcagcctgtagagactatccaggagggctatcttgggaaagtttgtgtactgtttgttaggagatgcagtataagcaaatcttggaggccactaggcaggtgaactttacccacctctaacactttttttgttccttctaaacctctctttaggccaaagaactccaaacaagcagaaagggaagagaagcgagtcctcggtctggtgctgctgcgaggggagaatctggtctcaatgacagtagagggacctcctcccaaagatgtaagtcagagcaggaagccttgtggaggaggggaggccctactgtgagccaggctctgtgttagattctgtttcattgcagttctcacaggcatcctctggattttgccccctttttcagataataaatgaaatcttaaagaggttaccctgcaagaggccgggcgcggtggctcacatctgtaatcccagctctcagggaggcaagaggcgggaggatagcttgagcccaggagttcgagacctgcctgggcaatatagcgagaccccattctccagaaaaaggaagaaaaaaaaaaagacaaaaaaaaaaaaaagaggttaccctgcaagaaagaagtggaaaaggggaactagaatttgggtatctcagactttaaagctctacctgtttctcagttgatgtacatagtgagtcagtggaggaagcacctgaagccatctgggtcagttcttaatgtgacgacaaagcctaggtagaccttaaaaagttgtaactccgaaacaataggaaatgtgtgtattttgttttgtacagttacagttcatagttactgagaatctaccttgcgccaaccacttcagtattttatttgatcctttaggtctctttagagataaattctcatcttataaatagaataaaccagggcttagtaacttgcccaaggtgccacagccactaagtggtgaaactgacatttgatctcagacagtcttgattctgtaaacaccaagctacacatagaaatagagcaggctttagagacctagtcaaatttgttttccctttccctttttcatttgaagggttttttttttttttttttttagatttttagatggagtctcgctctgtcgccaggctggagtgcagtggcacgatcttggcttattgcaacctctgcctcccgggttcaagtgattctcctgcctcagcctcccgagtagcggggattacagatgtgagccaccacgccctgccaagacgttattttaatcaaaagagaataatccttttaactttttaaaaatccacatatattatctggatttttttgtacttaacacatagtgggcatatattatgttgttctgtgttttcacttaatgttaacatttttctagttgctcaacacttttaaagtcaagttaatgactgagattttctca

SEQ ID NO: 99709 - DNA, 1491 bp, Homo sapiens
tgatctgcatatttgcaggttcagaactttgttgtctgagctcacagagatgaacagatgtccatagaaggcacttggtgggttaggacttgggtatagcagtcagactgatgggaggatgatatacagatcaaatgccaggtgatttgtttatagagagaaatacaactgcttagggtacctgacagttcacaaagtgatacctatatagtcacttctttattttagcacattggaacccaggttatgaaagcagaaatgtttgttgggttaaagaccattatatgtccaaactggttagcaccctaaccatcagaagtttccctctgccaaatatagtcttggaggcacactaacaaattcttgatatgtggatttcatttttcaccttgaagctgatctccttcctgataacaagcttcttgttgattagatttttagtttcagccctattctagctcttcctttactcagtgtttttaatgagatttgaatgttccatagcacttgagtcacatatctataatctgcacactggtagatggctctagtatgtatgcattggattattttggggacaccctatactctcatccctgcaactgacacgacaaggagaaaggcaattataatatgagaaagaccgatttcaagggaagagagaatagcagattactgggtagaggtcagggctaaaacagggtggcatgggagaattcctaggaaaaggctgtgggtgggagactgagctaagaatctgttgagaaagttggacacatggacaagaacgccatgggaagttttggggagggccagaggtgcttgggtccaaaagagcagagtctcatccctgtccatttctccttgcagacggtgggcaagagcagcaagatgctgcagcatattgattacaggatgaggtgcatcctgcaggacggccggatcttcattggcaccttcaaggcttttgacaagcacatgaatttgatcctctgtgactgtgatgagttcagaaagatcaagtgaggagtggactgtggggggcggagactggaggatgggaatggattgagtgggtgggccaagcaatagaggtggtgatgtagctagttggttcttctctgtttattctccagttttagagggcagacttaaatggggacattgaacgctaagaaatctttttgagtccagcaaaccttgctctctagtctagcaaagtacaagttgtgaagggctgctaggctttttgtttctctcactttgcgtgcccctgggtactggggtaaagggctctcatgttctccccacaggtgtgtgaggggggagagcttgagtttctggcctcattgcctatttgtaaagctgtagcctaaagggctctcccaatgcagcctggtctgaaactgctttaagaagcctctgaccctcttcagggtaagtgctcagctccccatgtgggtttggggccagtgatttttgttggcattt

SEQ ID NO: 99710 - DNA, 1028 bp, Homo sapiens
tttaagcttaaaccttgaaagaggtgagggcagcagccttctggtataccttggggactaccattccaggcagaggcgaaagcaaatgcagaggggctgaaaaaggagcacgtccagccagtggagggaaaagcaagaatagtgactgtagaggagagagccggggagggtgatgggaaatgaggaccgagaggttaatgggaaaggcggggtgaagagaaatgagtgtgacacagagcagctctcagtacggatttaagctaggaaggtgtccaaacaggaacttaaggctctccttacgtcaaagccggatgttaacgcccagtccccaggccccgcctctgctcggcagaagctccgctccggggccggaactccagggctagtgagctggaccggaagtaggtttctacccgaccgcattttacgtggtgctgcatttccggtagcggcggcgggaaatcggctgtgggagagaggctaggcctctgaggaggcgaatccggcgggtatcagagccatcagaaccgccaccatggtaaggagggcacaggctggcggcgcgggagcttccgagtctgttgtggagtgggaaccgcgactgatcggggaggaagccgtgggttggagccacttagggcggtgaaggcctgggccgaggccgctcggtctgggcgggaaagaccaggaccttggcggttcggctaggcatggggtcgaggaaaaggttggaaccggtgtcggaggccgaggtcgctcggcaggggcgagggtagaaccgcggctctcgacaccgctgtagccataattcctgggacccagtaggcactaagttaacttttgccgaataaatatatgtcccgggcttcggagcaggcactggagccgcagggggacccggtaaaaggctcagacttgcggaagtttgtgagtctgagaaagagttggcggaagtgggtggaaggggctcgtggaccacgctagagtctcgctaggtctgctggatggagaggagggcggaggagggt

SEQ ID NO: 99711 - DNA, 6629 bp, Homo sapiens
actattaccccgaaagggccttcccaagtcgtttcgccgcctgcagtgcccgaccgggggccgcgcgtccccggcaaccacgcccgcccgcgcagctgcagaggccggaaaaggcccgctcgcccgcgctcggcaccacccagcccgcgctccgggcgataccaccctgggcggcccctccaaaggccggagatggtgtcgtccccggcctccgattggtcgggggggcgggggcgtggcctctggagcctggttccgcgcgccggagcgcgctagccgcattgcgagccgaacccgggagctggcgccatggtgaggagtggttgcggggcgcgggcgacgcgacggtgggggtttcggcctgcgttcgggccgcagacagggcctgggcctgggcctgggcctgcgcctgcgcctgcgcctgccctgggaacgggttccggcagacgctgaggttgcgttgacgctcgcgccccggctcccgttccaggtgctgttgcacgtgctgtttgagcacgcggtcggctacgcgctgctggcgctgaaggaagtggaggagatcagtctgctgcagccgcaggtgggtgagatccgtgggctcctttggcggccccgcagaccctcatcgcgcgggtcccagcatgcacagcgcgctcccacgtggccggccgagcggttcggggcggggggacgggcctggaaagctctagatccgggggtctttaccttgacccatgggtagaatcgctctagcaattagaaataagcctcccggacgccgcccccgaacgattaaagcagaagctgggatgtggggcccaggtatcagcatattttaagagcttccaaggctgagaaccgctgcttgactgcgccgcagaggcaggagggagggaaggaaaccacttagcctctttctccccccaggtggaggagtctgtgctcaacctgggcaaattccacagcatcgttcgtctggtggccttttgtccctttgcctcatcccaggttgccttggaaaatgccaacgccgtgtctgaaggtaagtcggccaccgccaagtgtcacagagagatgtggttcctttcggtatcctctcgggcagcttgtgatagtatttgccgtccttggctggctctgagtctgataggcgtgaggcagtatttgagccatacaatgtgtaatttgaaataattgtcttcacagagctcaaggtctgggaactgtgctagaccaaactgtttaagcagacgatgtggaatgtgtgttaacgtttccttgtgggcactgtagtgacaaactattttttatttttattttttttgagatggagtctgtcccccaggctggagtgcagtggcaagatctgggctcactgcaacctctgcctccctggttcaggcgattctcctgcctcagcctcccgagtaactgggattacaggcctgtgccagccaccacacccggctaattttgtatttttggtagagacggggtttcaccatgttggccaggctagtctccatctcctgacctcgtgatccgcccgcctcgacctcccaaggtgctgaggttgcaggcgcgagcgacggtgcccggccgacaaaggggggtttcttaaagggggtcggcttaacacctacttgtgcctgaggttttgcctaaacacaatcaagtgtctggttctctgctttctgttcgattggaaagggcagttgggtaaacacaggctgagaaaaaaaggtttggttccagaaggcaaattctacgaaatactcgagggtgtgttacaagctattatttattgcccacttgtgctatcagacctgaatgcagttgttcccatggctgggccaggctttgcagtgatgacttgcgaatcaaatctgtcaatcccctgagtgcaatcactgatgtctccatgtctctgagcaatgcctgatggggagggatctaggtatgccatcccagcgtgctcggtgggaccagggtagtcagctgagggatgttagagttgatcgtccttcagcctgttagtgggaactgtgttctttcccctgaggggttgttcatgaggacctccgcctgctcttggagacccacctgccgtccaaaaagaagaaagtactcttgggagttggggatcccaagattggtgccgcaatacaggaggagttagggtacaactgccagactggaggagtcatagctgagatcctgcgaggtgagaccatcatctgttatattcctgttatcctggacattttgggggaggaggttctggaaacttggttgcttgttgtgatttctgggaaggccttcaggctgggctggtgcccgtgggtgcgggagctagctcagagccccttgttgctcaccgtcttgccctcttcttaggagttcgtctgcacttccacaatctggtgaagggtctgaccgatctgtcagcttgtaaagcacagctggggctgggacacagctattcccgtgccaaagttaagtttaatgtgaaccgggtggacaatatgatcatccagtccattagcctcctggaccagctggataaggacatcaataccttctctatgcgtgtcaggtaaagtgcaggggccacccataatactggagcctttggtctgtagttcagttaattttgagtcttgatgaggactgaccatcctgtgggtagaaccatgtgggctggggctgggtgtaggcctcctggtgcttaccacaggctgtgttcttacactgactgtatagaaagaggaggtagagtaaacctaccccatatacacctcagctcaggccctgtgcctggtctgtattgtgaatgggggaacatagaattgaggaagatttggatctttgtcccatttcctccaggcagagtaggtgtggagaaggcaaggctgtagctctatggtttttgatgaagcagctgggccagggagtgactgtggctctttgcagggagtggtacgggtatcactttccggagctggtgaagatcatcaacgacaatgccacatactgccgtcttgcccagtttattggaaaccgaagggaactgaatgaggacaagctggagaagctggaggagctgacaatggatggggccaaggctaaggctattctggatgcctcacggtcctccatgggtcagtgcagagcctggcaacctgcataaggtatggggctctaaatagctggcctcttgcattcacacttggtttttcctaggcatggacatatctgccattgacttgataaacatcgagagcttctccagtcgtgtggtgtctttatctgaataccgccagagcctacacacttacctgcgctccaagatgagccaagtagcccccagcctgtcagccctaattggggaagcggtgcgtcacaggggactcaaaaatgggagaataaggactgttgccatgtgcacctgcactgctgtatttcgtgacccaccatgtcttccctagttgtgcttgatggggaggtggggagcagggctgtcgtgcaactgggcaggtcagcagttcatttctctgactgcttccttgactctctctccaggtaggtgcacgtctcatcgcacatgctggcagcctcaccaacctggccaagtatccagcatccacagtgcagatccttggggctgaaaaggccctgttcaggtaccagtgagggcacctgcccacaatcaggtgccacttctggtgcccactgcttgttgggggatcacggtgatggctgaccagggctccctgacctatacaggcctctgctatgggggtgatggccagtcctggtgtctgagtgattcccagggcccagcaaagggaccaagtttccaggtcagcgacattggatgccttccctctgcctctgggagctatgggttggcatgcattggggtagagatccaatctggcctgaggctcactcaggacttcggggtgagaggaggggaggagctgagctgccttggctaatggggttgaaatttctgatcttaaactctccactgaatattctctcagagccctgaagacaaggggtaacactccaaaatatggactcattttccactccaccttcattggccgagcagctgccaagaacaaaggccgcatctcccgatacctggcaaacaaatgcagtattgcctcacgaatcgattgcttctctggtatgggtgggggggcgttggcaggtgtgagaaggggctgggtggctgggtggggaggcttgcaaccatagcttccacaatgatggcaatatttttcgtcaacagcagttcacctagtgagtgttgagactctgggtctgagtgaagctgagggtagagggaacacagggttggggtagtttctctctttgggctgacaggctttgtcacccacacacatccagaggtgcccacgagtgtattcggggagaagcttcgagaacaagttgaagagcgactgtccttctatgagactggagagataccacgaaagaatctggatgtcatgaaggaagcaatggttcaggtcagttgggctttgctgggtgtggagtggcatagctagctgttggaggtgatgaactgtctgagcctgaccttgtagaatggaggcaaaaaaactgatttaatgagcctgatccaataaagccagaaaggagtcctcagagcaccagaagtcttcaggcccttttagcacttttctttgaccaggcagaggaagcggctgctgagattactaggaagctggagaaacaggagaagaaacgcttaaagaaggaaaagaaacggctggctgcacttgccctcgcgtcttcagaaaacagcagtagtactccagaggagtgtgaggtcagtaggcagcacggccctggcagagatcctaggttgtaggattttcaacagcagaacaaaggatatgctgcatcaagctgtggtcttgagtccaggcttttggactgaaacaaggacctgaaacatctaaaactacctcttgattctataggaaggagataggtgctgaacttgctcaagagcccagagagctggttgtagctcacacccgttccctgggcatgtgtgttctgtcctcggctgcctcccaggagtcctcaacctggggtagtgtaaattcctgctctgcttattatcagacgtgtgtccggaggtggtcgtgtttcacagtggggatgggggcagggaggtccccaatgtgctaagctacaatcattctccctgagattttcatttagcacccagtttcttaaacagtgtttcagggccctgtctggaacttggcatgatggttctgttgcgaccagcatggtgggtgttttttaggtttttttttttaatgggctgaggtaatttctcatgacatgttttccttctaatttgggacagcctttggggtggatttctaaagttatacccacacaattaaactatcccagaaacactgggcaatgttaacgacacgcgttcccctgccttggctacttaattgctgaagatgtaatgagcactgttctcacagcctgttcccctgtccttccctttaggagatgagtgaaaaacccaaaaagaagaaaaagcaaaagccccaggaggttcctcaggagaatggaatggaagacccatctatctctttctccaaacccaagaaaaagaaatctttttccaaggaggagttgatgagtagcgatcttgaagagaccgctggcagcaccagtattcccaagaggaagaagtctacacccaaggaggaaacagttaatgaccctgaggaggcaggccacagaagtggctccaagaaaaagaggaaattctccaaagaggagccggtcagcagtgggcctgaagaggcggttggcaagagcagctccaagaagaagaaaaagttccataaagcatcccaggaagattagaatgcaaatggacattctctgggaggtggggcataccatagcccaaggtgacatttcccaccctgtgccgtgttccccaataaaaacaaattcacaagagttggttcatgttctttattgaacaccttacatgggtatggacagggcctatgggtggggcaaggcagcaatgacagcctcagtgaagtcatggcaagtagcatagccacccatgtcagaggttcgaacctgtgggggagaatcatcatcatccatgtggcctgggctccatcctaacaatccccatcaccacccaacagtctgtcccctaaggaagccggcccaaggacaacctaggctctacccagcaaggtgaccatggtccactgcttagaggcacaaggtctcttccctggtacactgcactgaagggtatggggagtgtggtccttgcaaggttggaagaaataaagggctctagctccctttagtctgcaggtgaccgatgacagacttgatgaagtcggttgtggtgctgtagccgcccatgtctcgagtccgcacctacagccaccaccggcaacagccgtggggagggagaaaagagagcccatgaagggaggtagggcaatgtgattgaggaaatggaagccaagaatgcgtgacagccagaaaaaaggcaatgcacaggaatggaaggaggagcc

SEQ ID NO: 99712 - DNA, 1881 bp, Homo sapiens
tctgacctcaagtccgccattcctctcccatcccaatatctccacttcctaagtgatcttggcctgttcttcccccacgctgcccaccatgcctcttttcagtgaccctggcctgagctccccctcccataatgtccttttccaacctaagcctctgcatacccctcctgcctcctcccagtgtctagcctgcccctctctccacagggtgcccggcacccatttgcccaggcagtgggcaggaatatagccaatcccacggccatgctgctgtcggcttccaacatgctgcggcatcttaagtaggtcatgggaggctgtcggcagaggttgggtgtcgtgaggaggagcaggtggggaaattagcgggaggtgtcttgggggagtcacagtttcttcctgtccatatccacagtcttgagtatcactccagcatgatcgcagatgcggtgaagaaggtgatcaaagttggcaaggtgagttgagaagagtagtgctggcttcaggatttagagtagttctggtgtcagcacctcggcactaccctctggggaacctgaatgggggtctcctttccccccaggtccccagaacatctgctccctgacatccctgcatccctctcagggctgttcttcatctcccttctcttggctgtttcatcctcttgatctcttttgcctcttagatcccatctgctgttccctctttcctgctccatccactgcccttttcatgggccatctgaatgcagaacttgcagctctccttgggggtggaacagcaagggatacaggcaggctgaagcatcagcttcaccttcacgccccatctccttttcgctgtgattctttccttccacctggtcttgtctctatttcttccaaggaaggtagccacatcctgcctctgatctgcgtttcccatcatctttgcctgctcagcctcctgtcctgccctggctgcagcacagctaatagtggcttaagaggagtggcaggtccatgtgcttcccatcctggctcctccttccattcctgtgcattgccttttttctggctgtcacgcattcttggcttccatttcctcaatcacattgccctacctcccttcatgggctctcttttctccctccccacggctgttgccggtggtggctgtaggtgcggactcgagacatgggcggctacagcaccacaaccgacttcatcaagtctgtcatcggtcacctgcagactaaagggagctagagccctttatttcttccaaccttgcaaggaccacactccccatacccttcagtgcagtgtaccagggaagagaccttgtgcctctaagcagtggaccatggtcaccttgctgggtagagcctaggttgtccttgggccggcttccttaggggacagactgttgggtggtgatggggattgttaggatggagcccaggccacatggatgatgatgattctcccccacaggttcgaacctctgacatgggtggctatgctacttgccatgacttcactgaggctgtcattgctgccttgccccacccataggccctgtccatacccatgtaaggtgttcaataaagaacatgaaccaactcttgtgaatttgtttttattggggaacacggcacagggtgggaaatgtcaccttgggctatggtatgccccacctcccagagaatgtccatttgcattctaatcttcctgggatgctttatggaactttttcttcttcttggagctgctcttgccaaccgcctcttcaggcccactgctgaccggctcctctttggagaatttcctctttttcttggagccacttctgtggcctgcctcctcagggtcattaactgtttcctccttgggtgta

SEQ ID NO: 99713 - DNA, 1054 bp, Homo sapiens
ctcagacctctccatgccccagggttcccggcggagaccagcgcctgcaacagggacacacaagcctgtaaggtcagctttgagacatccagaccccgaacactacagttgactttgccctgtttaggaaaccctaggacaaactctccgctccttcgcccgcccctgcccgacatgtcccggggcctcactcgggtcagccagcggactccgctcaatgccgccatgtttcccgcaggaagtcgcgtgggaagtgacgcctgaagctggcgcggccccgtaccccgacttccggcctgtactgagttcctggtatttctctctctgcgccaaccagcactgcttgctcacgcctgtttctccttttccttgccggtggggaggtcatgggatgcgcaagcactttgtctcttgctttgttttcagtcgccatatttaatctacgtcgaaacttcaaaataacattagggggaaaaatgtagcgtcatgtttatcagacgaggacctgagcttaacaagcgattgagagaaaatccttgggaagctgttaaaatttgtgtgtcaatgcgtttgttattcttttaaccagtactcactgaatacctgtatgtcaggctctcgaggaatacagtacagacatgggaggtgtgtgtcgggtttctccgccagtctccgagagtgcccaggacctctgtattacccgtcgcctcgtagttttttcttacagggttttgttctttgctctgacagttatttccctaatagtgtgtcccggacttgaactccccaggacaggcccataactagtgtcagaaatgagttcaagcgtgtaagtgtgactaaagggaatttcagactgatccttaaagtaacaatcataaaaactaaaaaaagcctggacaacatagggagacctcgactctacaaaaaatttaaaaattagccaggcgtggtgacacacctgtagtcccagctacttaggaggctgaggtgggaggatcacttaagcccgggaggtggaagccgtagtgagccgtgatggcaccactgcact

SEQ ID NO: 99714 - DNA, 1086 bp, Homo sapiens
ccccagctatgactgagccttaactcagtgccactttcctgggctgactgattccaccttctgcgcaggttaattctgagcatctatcccccaatctatcttggggacaaccttccagaatgaaaagcactccaaccaaatcacttcaaccatcacaaaaaggaatgctgcaaagtgagggcattccggcaggaagggccagccagcatgaaggctggagctgggagacagggagctgggtttgggaaacggtgtgatctcccatgctggataagcaagaaactcacacagcaagggagtggaggtaaggctggccggcaagagaaattggatagggcatcaaagggcctagaatgttcccaaactaagggcctaaatgtttatttgagaagccacaaaagacatttaagtttctaagcaggcgatggcccaatccaagcaacactttttaaaactgtggcaggaggatgggggtgtttgggggtgagcagctggggacgggagctaagggaggaggctgtgggcagaactgggaattccatatctgctccaagccagggtggagtccagtggaggaaaagtacgttttgctgttagatattctctgtgggcactggggtagggaggaaagggaagggggacccgttaagaccaaacaaacaggtagctgcaggacagggagagaaaagtattggagatgattcccaaactccaagcctggtgggcagcaggaggaggtgcccagcacagacacaggggagtcaggaagaagagctggctggtggagagtgaacctgtggagaccaagaagccccatcccagcctagggacagagcctcttgggatagggaccctccccggaggcaggtgctcctctcctctctgagggccaagcccagccctgtcctcacccactgatgttcaggactgacagaagtgagagtcccatatggggagaccatttcctcaaagatgttctctgagactgtggaggaacgtgaattctgtgaggggagaacagaagaagagcgccaggcacagcagcttgaggtgctcagagggcagaggagaaagacagtgtgctct

SEQ ID NO: 99715 - DNA, 1051 bp, Homo sapiens
ctaatcacaaatgggtgcatgtgtgttcataccaagcgcctagggccgaggacagaggctggctcagtaaatatttgttgagtaaacaaacgaaagaactgaaacttccctgaatctcgctgccgggggtgcctggagttttccgggggacttgggctgggcctggtggagggggctgcagcgaggctctcggactgggcgctggcctgcttttggcgccctgcgtctcaccctgggagtggggggctgcgggggagacgtcctccaaacgccgcccccttccccagctctgaacgagcccaccattgactacggattccagaggctacagaaagtcattcccagacaccccggagaccccgagaggctgcccaaggtactcagaggggcggggcggggcggggctgagggtgtcctgtgggcaagggggtgaggaggggctcccgagggccccttggtcgcccccaggggctgcccctccgtcccgctgtctctccccctgtccccaggaagtgctgctgaagcgggcggccgacttggcagaagccctgtacggagtgcccggcagtaaccaggtatggcgcctccgccctcccagcgccgccgggaccggggccccccagcacgcggcgcccgcggctgccccggccgtgccccgctcttgtcttcgcaggagctgctcctgaagcgcgcggcggacgtggccgaggctctgtacagcaccccccgcgcacccgggccgctcgcacccctggccccgagccacccacaccccgccgtcgtgggcatcaacgccttcagcagcccgctggccatcgccgtcggggacgccaccccggggcccgagccgggtgcgtgggccgcgcctccccgccgtcctcgggcgccgccaccgcccctccccggccggcaccgccccctgacggccgcgctctctctcgcaggctacgcgcgcagctgcagcagcgcgtccccccgcgggttcgcgcccagccccggctcgcagcagagcggctacggcggcggcctcggagctggcctgggcggctac

SEQ ID NO: 99716 - DNA, 1032 bp, Homo sapiens
ctggaagaggttgggttagagcacgtcctattgagtattccccaagacaataatgggtcagagcaacagagcattaggaaagaatcagtgttgaaattacgtaagtggctactgaagaatttgtcagagcctttcatgtgccagggtacgttgtgaaccttctaggaaacaggagatgcaaatttatttgagcacaaaaatgtatttttctaacagcatcttgagattagttcctggggaatgaccttgagatgcaggaagagacaccctcatggtttcctcagcctgatgtaggggctgatcaggctgggatgcctatcacaagagcaaggccagtggcttgggccccagaaccatctccaaatccaaggcaggggcaggtggggcagcctccaggctgagacaggggagggggctgtggaaaatgctctatggagcctctgtgctccagggtccctgtatgagagtccggggacgctggaaagaggatgggaaagctcagggcctgggagaacaactgaggatgatacatgtccgcagcgtcccacagaatcggctaccctgagggcagtcagagcaactaggtgcagcccagaagcttctgagaactgtgctgatgccctgccctgcacacagaatggggtcccttcccaccagggaaccccctctgcacagttcaggcaggcctgtgatggtgactcaaacaataacagacttttgtgccagggagggcgggagggcaagggggctgcttggtgacccatccagagggtagcccatattcagggaaggacttgcccaagcaaggtttgaagaaggcaggggttcttagtgggggaggaatgccctagatagagtagaccttaggctgaaggtatgtgggtgggaaggcagagatttggagcccacgttcaaaacattaagaacataacatggccagatgcagtggctcacacgtgtaatcctagcactttggcaggccgaggtgggcagatcgcttgagatcaggagttcaagaccagtctgggcaag

SEQ ID NO: 99717 - DNA, 1048 bp, Homo sapiens
tatgagatcgcctaccaccgggtaggccacccagcatgagggccactctgtccttctgccctggtggctggacctgctcgacttgaacaagcctcttgcccggcagggttcagagctggtgggctgggccgagggccgctggaacaaccagagcatcgatcttaaccataattttgctgacctcaacacaccactgtgggaagcacaggacgatgggaaggtgccccacatcgtccccaaccatcacctgccattgcccacttactacaccctgcccaatgccaccgtgagtattttgagggcggcagtggaggtctgtggggggcggaccttgtctctgtctcctgcccctcctgacctgccccatccaggtggctcctgaaacgcgggcagtaatcaagtggatgaagcggatcccctttgtgctaagtgccaacctccacgggggtgagctcgtggtgtcctacccattcgacatgactcgcaccccgtgggctgcccgcgagctcacgcccacaccagatgatgctgtgtttcgctggctcagcactgtctatgctggcagtaatctggccatgcaggacaccagccgccgaccctgccacagccaggacttctccgtgcacggcaacatcatcaacggggctgactggcacacggtccccgggagtatgtgcctgagggtggagttagccctggccccgtaacccccgccctgataagacagcctgcggttgcgtacagtgctggcgtctgttcccactctgaagtgtccctcagagaagggagggtagcgggaggatgggaccgcatcccgcctgcttaggcagcagtgtctgtggtccccttaggcatgaatgacttcagctacctacacaccaactgctttgaggtcactgtggagctgtcctgtgacaagttccctcacgagaatgaattgccccaggagtgggagaacaacaaagacgccctcctcacctacctggagcaggtcggatctgcgtcccggcccccagcctgcctgaatcactcctgctgtccatttagg

SEQ ID NO: 99718 - DNA, 1047 bp, Homo sapiens
aacagagaacttgctgcccccaggtatttcctgccaattcagacccagaaactccagtgctgaacctcctgccggagccccaggtggcccgcttcattcgcctgctgccccagacctggctccagggaggcgcgccttgcctccgggcagagatcctggcctgcccagtctcaggtgggcagtcaggccagggttggttgggcagggcttggatgcagggtgcatccttcactgtggacacaccctttaccataaactcaacctccaccagaccccaatgacctattccttgaggcccctgcgtcgggatcctctgaccctctagactttcagcatcacaattacaaggccatgaggaaggtcagatataacccctatgacctgggaaggagggcccacccatctcaggtccccttcccaccttcccaccggggcacaacctgctgtgactgcgcttgtatgcccctgctgcctcctgatgtctcagccttctctcctgtggacccctaagctccatcccactttcccttattatggcgcccccccagtcctaccccttcctcccggctctgctgccgctcccctcctgtaccatgatgggatgccccctctgtgtgggccatcgctgactttttaagtctttccatggcacatgtgatctgcccctgggtgtacccctcccatgcctcatgccacgctacactctgcccaccagctgatgaagcaggtacaagagcaatgccccaacatcacccgcatctacagcattgggaagagctaccagggcctgaagctgtatgtgatggaaatgtcggacaagcctggggagcatgagctgggtactggcatggggagtggggagaggtaggcacagggcagggccccaggcatgaacccgctgcaagcccccatgtgtccccaggggagcctgaggtgcgctacgtggctggcatgcatgggaacgaggccctggggcgggagttgcttctgctcctgatgcagttcctgtgccatgagttcctgcgagggaacccacgggtgacccgg

SEQ ID NO: 99719 - DNA, 1922 bp, Homo sapiens
tgctgccgtcacctcctccctttagcattgagcagccccggaggggctagccctgaggctgacctgcccagagtccccaccatcgcgctgcttagtggcctctccctgcagcctgtcgttgctggtggcggcatggtcttctgtctgtcgagcgaggagccgcgccgcccgctgcgaagcgacatggtccacttccaggcctcggaagtccagcagctgctacacaacaagttcgtggtcatcttgggggactccagtgagtgcctcttctagggtgacgcttccagtcccacaccttgcagcccgttcagtgtgtctggaccatttgtttccatctcacatctcttgtctgtcttctggtctgttccgtccagtaggttttctctttttatgtcccacacatcttccacaggagtcctgacaggtgtaataacctgtgcactttttagcccatccttgctcagcatttctcgccctgacagctccccataatttccatcacgaaagcgttgcattgtgtagtgtgtctcctgggtgacttggccgacttaatttctgccaggtgatcttgggtcactgtatactgctggccaggaggcacacagaacagaggcaatgccaggactttttaacctcatcttttctcctgcgtctaagtcaaccacagagctggtgtcgggcacctcagccctgggaaaatggggtcctggacttggaaggagctggggcaggctgaggtctgcctcagccttgggatctctgtctcctcccagttcagagggctgtgtacaaggacctggtgctcttgctccagaaagactcactgctcacagctgcccagctgaaagccaaggtgagggaagcttggtggccatgtcagtggtgggtgggcacagaccctggcctggcagggttctcctccctggcatgggtctgaccagtagggtggggggggtgggtagggggagctgagctttgaacaggaccagctggtggctgggggccagctgggcgagctgcacaacgggacacagtatcgtgaggtccgccagttctgctcgggctctggccaccaccttgtgcgcttctacttcctcactcgtgtttactccgagtaccttgaggatgttctggaagagctgacatatggacctgccccggacctggtgatcatcaactcctgcctctgggatctctccaggttggggcgagggaaaggggaatactggttggggctggaagtacggctgaggcagtccacccttgtgctcttgcccaccctgtgtgttatccaacagatatggtcgctgctcaatggagagctaccgggagaacctggagcgggtgtttgtgcgcatggaccaagtattgccagactcctgcctgctggtgtggaacatggcgatgcccctcggggaacgtatcactgggggtttcctcctgccagaggcaagtgactgaggcccatcaggacaagagatgggatagcagactggtagataggacaccctgctttcagaccctgctgcgttctgtggctcttagaggctgcactttctcacttagctccagcccctggcaggctccctgcggcgggatgtggttgaagggaacttctacagtgctacgctggccggggaccactgctttgatgtcctagacctccactttcacttccggcatgcagtacagcaccgtcatcgggatggtgtccactgggaccagcatgcacaccgccacctctcacacctgcttctgacccatgtggctgacgcctggggcgtggagctgcccaagcgtggctatccccctggtgagccctaccataagtgggggggtagtgatgcactggggccctcagaggacagggctcagaaacagaatgggacacagccactcaagggaagtagaggtcccttgaa

SEQ ID NO: 99720 - DNA, 1689 bp, Homo sapiens
atgaaaccccgtctctactagaaatacaaaaatttgccgggcgtggtggcacacacctataatcccagctactcgggaagctgaggcaggagaattgcttgaacctgggaggcggaggttgcggtgagccaagatcgcaccactgtactccagcctgggcaacagagcaagactccatcttggggaaaaaaaaaaaagaaaagaaatatgcctgtgcagtatgaaaaaattgcaaaaacttcattaaaaatccataaatgcagtaggaaatgatttcaacttgtttctgtggagaaggaatttcagctgaccaaggtagccatgtcatttagtatttacacaccagctagttgatacaacattcacttttaaaatatcaactttacttgtattattttgaagatacctgttgcctacccaggcttattaaatcaaagagtactgcagacattgacctcattaccacagagctcttatttgtcagatgtagtctttgctttgttgacatgttaataaggttttaaaagaatgtatgtgttgggtgcatgccacagacacaatctgaatgattaatctactcttacctgtgctgtactgccagaaaggattaggggtctaaggcttgctggggaggatatttatgttttaagttgctaacagctattgagcctttcttatgtactaaacatgctaagtactttatgtgttttaacttgcttaagccttacaatcccatgaggtaggtaccatcttactgatgaggaagccgaggcacagagaggccaggttatacaactagtgaccaggttacacagctattgagtagtggagtcaggctttgaacccaaacaggttctagacctctgttaaaaaatagggttttgggggcgggcaggttaacaggaaaatataagagcatgtttcaccttttccaccagaatggaaatgctttaagagcaagtacttagttttgttcatatgtgtgcatagctttatgcataggcaggacttgatacatgtctgagtcagtgaatgaatgataaaacaggtggcagacattacatttcaagtcctatctgcctgacaggattcttttgtattgggagtagtattctggagaacccactcaatttgggaaggcaaggaggagaaacggtgaccagttcttatgggactccagaagttaagctatttttttaatcctaaaaatgcaacttgggctaatctaattaattaatttgtcccatccctttggcaggctgagccagtatgataaaacagatgtggaagagttctgcctgccatcatagagcttacagccagcaggcgagacagttgataatcactcagtatttgtttgatcataatcactataaagagaggtatagtagcaaataacctaagagaacatgttacagactccaggagtcaaaggtagagaagacactctgaaagaagtaataataccctatccaggggatgagtagatgtaggtgcatgaagtgggatggaggtggagaagagcatatacacaaaagtcttgaggcaggaaggactgaggcatgcacagtgacctaaagagagccagtgtggctggagtgctgtaggcaacaagaacaggacatggatgaagttgatgcccttcgtgtaggggtcacacgctgcagggacgtgtagatcaccgttatc

SEQ ID NO: 99721 - DNA, 1045 bp, Homo sapiens
actatttaagtagttatatttttgtttcattttgtttttttgatacataaacatgaacttttttttcaaaaaagtcagctgtgtgtagtggcacgcacatgtaatcccagcaacttgggaggctgaaaaaaaaaaagaacattttaaaaaattgtggttaaatatacatgatataaaatttactctcttaaccatttttgagtgtaccctttaatagtgttaagtatattcacgttgttgtgcaaccagtctccaggactttttcatcttgcaaaactgaaattctgtaccctcaaacaactccccatttcctcctccccccagcccatggcaaccaccattctgttttctgtctcagaatttgactaccctagactccttatgtaagtggagtcatatagcacttacttcctgtgactggcttatttcacttagcataatatcttcaagatttatccatgttatagcatgtgtcagaattttcttccttttcgaggctgaataatatgccattgtatgcatctaccacattttgcttatccatttcatctttccatggacacttgggttgctggtagcccttggctattgtgaataatctgctgtgaatgtgggtctacaaatatctattcaatattttctgtactccgcttttttttttttttttttttttgagatggagtctcgctctgtcgcccaggctggagtgcagtggcgcgatctcagctcactgcaacatctgcctcccgggttcaagtgattctcctgcctcagcctcctaagtagctgggattacaggcacccaccactgtgcctggctaatttttgtatttttagtagaaatggggtttcaccatgttggccaggctgctttcgaactcctgacctcaggtgatctgcctgcctcggcctcccaaagtgctgggattacaggcataagccattgcacccggcctctgtactccgcttttaattattttgggtatatatccagaagtggaattgctagatcatatggtaattctatgtttacttttttccatag

SEQ ID NO: 99722 - DNA, 1377 bp, Homo sapiens
gcacatgcagttggaaaaatgacgctgatagatttgcttgactcagtgttgccacaaaccttcaatttgtaaaaagtacagtaaagcaaagtgcaacaaaatgatgtatgcttgtagtataaaagtggacagctccgcaggtgtctaccccatctaccaccctccccaaaggtaatcactgtgtctggtttagtatggaagtctcttgagcatttttctgtatattaacacagaagtaaaataatgaaatagcatttattgtggttcttcctatatggcccatagtctcgtttcaagtatcaatttccaccaatttgaaatgctagctttattatttgctcaattctgagatcttttcctagacgccatcctcttccattgatctatttgcacattcctgtgccaaaataatagttttaattaattttatatagtgtgtgtatctggtatacatctgttctcatattttcaaaatgttcttaaatattttgtggtatttcctctttcagatgatctttttcccctatatgaacttttttttctttttctttttctttttttttttttttgagacagagtctccctcagtcgcccaagctggagtgcagtggcacaattttggctcactgcaacccctgcctcccaggttcaagcaattctcatgcctcagcctcctgactagctgggatttcaggcatgcgccaccatgcccagctaattttgtatttttagtagagatggggtttcaccatgttggccatgctggtctcgaactcctgacctcaggtgatcttcccaccttggcctccgaaagtgctgggattataggcgtgagccactgcgcccagccccccatttgaacttcagaatcagtttgtgcattacccttccactggccagataattggcagaaggtgtttattggaattcctgtacatttatagatcattttggatattgctccatgttttctatatccttggaaaatatttaattttgtaaaattttcattagatgtatcatttgatatcttacagttttatcgccataattattaggatctcttaaaagttgtatttctttcttttttttttttttgagacggagtctcactctgtcgcccaggcagctggagtgcagtggcacaatcttggctcactgcaacctctgcctcctgggttcaagtgattctcctgccttagccttctgagtagctgggattacaggcacccacaaccacacctggctaatttttgcatttttattttaattttatttatttgtttatttatttatttgttgagatagagttttgctcttgctccccaggctggagtgcagtggcatgatcctggctcactgtaacttctgcctcct

SEQ ID NO: 99723 - DNA, 2295 bp, Homo sapiens
tctgagagaccttttctgagagtctcatttcctgctaaagctggcctgagccagccacttcactttagttctatctcagtttgtgccttggatgttggccacgcagcctgcctggctcaagagctcctgccatccttggacacttgccccaagaaccacatccttccctgccaacaccctctgctcccttgcctgctgtccctagacatgcatgtggtcagttcacccaactttctggtcatcaccctcctccctccctctgggggtagagagtggagacttcctctacagccttgtggaagacaaatggaggctttaggaattcctctggggttcactccatacggatgcagggtaatgaggctaatttctgctcatctctgtgtgggcaggaaatatgagctgtacagcatggactgggacctgaaggaggaactcagggattgcctggtggctgctgcaccctatgggggccccattggtatgttgcccctccaccaccacctgctctgggaccctgggatgaactcaaggtccttgattcctggggccctgctgtcaggttgttcttgttgccaccccccactcaccctgctgagatgcttttacttctggtttttataggcctgcttcacatggggtgggcctggggagccaggatgtgaggcctgcttcacatggggtgggcctagggagctaggacagaaggtctcttctcaaactgcagcactgctgaggaacccctggcggaaggagaaagctgctagtgtgaggccagtgctcgatatatactctgcttccggcatgcctctggccagcctgctggtgagcacttctgatggtccctggggctcagggctggacagggtttcctcacctgaggacagccttaggaacctctctcccctgcagtggaagagtggacccgtggtgtccctgggctggtcagctgaggaggagctgctctgtgtgcaggaagatggtgctgtactggtttatgggcttcatggtgacttccggagacacttcagcatgggcaatgtaggggtcacagagggctggggacgcggggtagagtttatgaccctgtggctcccttaacccatggccccctttcctcaggaagtgctccagaaccgggttctggatgcccggatctttcacactgagtttggttccggagtggccatcctcacaggggcccaccgcttcaccctcagtgccaatgtgggtgacctcaaactccgccggatgccagaggtgccaggtaagccctgacaccgctgagatagccaagcagtacccacagatgtgcctctagcctgtgagacccataaaaacagaagctgtggctagagacccatagaaacagaaacggtgggccttggtcatcctaacactgtccttttccctggccataggtctgcaaagtgcaccctcctgctggactgtgctgtgccaggaccgagtggcacacattcttctggctgtggggcctgacctttacctcttggaccatgcagcctgctccgcagtggtaagggccctgagtgggaatgaagtggacgggctgggttaggcaatagggaggttctgaaaagtcagtatgtatctgtcccacccctaccctggctctgcctcagacgccccctggcctggccccaggagtaagcagcttcctacagatggctgtctccttcacctaccgacacctggcactcttcacagacacaggctacatctggatggggacagcatcactcaaggtatgatcctggggcaacacaggggtactgtgccttgtccagggtacaagatcttttggtgatgcgggagggcttttcgactagaatggtgactgctgggacagggccatgacattgcccacaccatttcaggagaagctatgtgagttcaactgcaacatccgggcacctccaaagcagatggtctggtaaggatgggggtgttattgctgggggtgtgggtgagacatagcttgcttcctgggacaatcagttccttgattcgtcatgtctactggccaagcctagtggagtttggatcttaccttctctgccattgcacacttgaaggaaaccattgtcctctgtgggccacagctgccttgagctgagagctcagggataagagggaagtggagaggtcagtgtacagtcagtgatgcaagtgtatacaggctgtcccgagacaaaggattatgagcagccatgtgggagacatggccatgggacagtgtctagccagtgtgtatatgctgctcacaggtgcagc

SEQ ID NO: 99724 - DNA, 1020 bp, Homo sapiens
cacggagctggccatcaaggtgtgggtgcccagccctccacagacactctgatgtggttgttcagggcccccatgccagctccttctctctgtgccttccttctcacctcacagctgctggagtatgagccacgctcaggggagcaggtaccccttctcctaaagatgaagaggagcaaactggcactaagcaaggccatcgagagcggggacactgacctgggtgagggcaaggctggggggcccctgggctaagtgggagcctggctggaattcccactccaccttactctcctgcagtgttcacggtgttgctgcacctgaagaacgagctgaaccgaggagattttttcatgacccttcggaatcagcccatggccctcagtttgtaccgacaggtgtgtgtagtgggcagggttgtggtgtagccttctgagcacttgagttggccttgctgactgattgcctgcctgtggccccagttctgtaagcatcaggagctagagacgctgaaggacctttacaatcaggatgacaatcaccaggaattgggcagcttccacatccgagccagctatgctgcagaagaggtctgagatccatggggcgtgtggggcgtgtggggcatgtgggctggggctgttggtccggttccttcaggaatctaggccttcgtgttgggtgcacactccatctggtcctcactgtgagggagactctgacgtgaggccaggatgggggttagtgtcagaggagctagccatccctctaggacatcagagtggtgcacctagcaggcaaggctgaccctggcgaccctgggcacagggatgggggagaagactgtagcctgggtgaggagggcgagggtcctgcatgctgtgagttcaggccttccttcttgtctttatagcgtattgaggggcgagtagcagctctgcagacagccgccgatgccttctacaaggccaagaatgagtttgcagccaaggtttggcccacctttttccaagagcctcc

SEQ ID NO: 99725 - DNA, 1056 bp, Homo sapiens
aagctgactgccctggcagatttggaagattgggaagagctagagaagttttccaagagcaagaaatcacccattggctacctggtgaggcagggtcctccctccagcccacttccagtgagggtagtcttcgggagagagggctaggcagggagacagataggatggcccgttcatgctcctgttcagctgcccgcatagttagcgagtgcttcctgtatacacatttgtgggcaggcatcatctgctgtgttgggtgcactggaggatgggtccaagtttgcctgcagatgttacggggagagagaatgagctgctttccccagggagggccacagggggcactatgtgctagagggaaagtcttgtctgaggagggtggagggggcacagggagggtgcatatgggaggcagtggagatactgagggctgttttctgtggtgggtagttcagaggtgtatagggcaggtttgagaatgtcaatcacaagagaacacaggaaatgtgagggctggtggcaggaacgcctgttgcaaggggtaatggtgggtggtagagcagaagcgtggaaataattggtctcaagtctctgacagagctttggtttaggtgatttctgccctaagaatgttgagatcacaactgtctgtgcatgggggttgggggattatatgtactgacgggtgtatacatatagaatatatatggacgatgtatgcattgcgcctctgctcgtaagagagaggacaggagggctgtgcattaccttctccctccacccgcttcctctcctccaagccttttgtggagatctgcatgaaacaacataacaaatacgaagccaagaagtatgcttcccgcgtgggtcccgagcagaaggtcaaggctttgcttcttgttgggtgcgtcaactgagggcctgtgggtgctgggtggctgagctgtgggctggtgagaggcagggtttgtgcccttgagcagccccaacaccacctcctctcttgctcaaaccacagcgatgtggctcaggctgcagatgtggccatcgaacacc

SEQ ID NO: 99726 - DNA, 1036 bp, Homo sapiens
ccctagagcaatgctgaggagcgggggcatggtagcagggctgtctggttttaaataaagttggaacacttcacagtgcttgtcttacacagtccagcctaagcaaaggcaagctcaagacaggatcctccagacaccacagcaaaactccatgtgttccgttgtgttgggaccggaggtgggggcttctccagccatactcgcaagaaacgtgtcctctccacagttaccaaggaaagctttctctatctcacagctcctaggaagattatagggagagatggcacaaaacttaagcaccagctcaccaagaacatactgtaaagcattctgtgtgtgtgcgtgtaaacacgcaagaaccacgctaaacacttttgctgcctgtacttcctttattcctcgtgacagccctgtgaggtaacatcaccccactttacagaaaggagattgaggaccagggagttcgataataacaaatatgtggcaaaacagggatttgaaaccccgggccaagtgcaagctggaactggaatcgggccctctgtgagaagggagcctgaggcaaggccccaatttgcactgcagtggtgattggaggactaatgagaagtgtgtggcctgcgggccataggggtcagggggtggtggcctttggaactcttgcccactgaactgtggtgagcaattccaagttgtctctgggccaaatagagaaggaggatggaagatttcaattctgccaaaaagaaccatgaacaccagacccgcaatcagtaggagtacccgcggggccctctgctctctctatctagccttccgttggcactccagtgcaccccctctgctctccctgtctagccctccgttggcactccagtgcaccccctctgctctccctgtctagccctccgttggcactccagtgcaccccctctgctctccctatctagccttcccttggcactccagtgcaccttggcttcatgcccagggccccacccaacactgagggcattgccttttcctttgtcgcccc

SEQ ID NO: 99727 - DNA, 1579 bp, Homo sapiens
cgagtgcggcgctgacagagacgcgcgcgcgcgcgatcgcgctcggaccccggccgctgccgccatcactgtcgcccgcccagtcgcccctcagccgcttcccctcgccatggaggcgaggccgccgccgccgccgcggggctcggagccgcgggccgggcggcggccctgagggctagtggcggcccgaaacgccgccgcggagccgaggcggagccgctgtcctcgtccccagcggtcccgcccaacgcccgactctgtgagtgttcgcggccgctgcgcccgggtgggctccggaagggggagcggctcccgggggcggtgggaggggtcccgggccacagcccagagcccggagcccgaagccctaagccatcttttccgggtagaagcctgcgggcgcctgcaggttgattgtgcatccttgcgggtccgtcgcggggagggggtccccggaaacgtgccggcccgagtgccgacccctcgcgactgcccaggaactttgcatgcgtccttctgggaccaggccagggcactgccagagttgattctcagagaagaaacttagaacggcgagaacagaatttgctcaggtccatttaatgggaggaaagaggaaaactcttggcatgagaaaatttgcttttgcagtgaccaacttttctttcccttcaagtccacctccctcggtcccccggcccgtctcccaggcccctctccttgccgccctctcccaactgttgaggctgtttaagaagggaaataagggctgagagctgcccagaattcagaataggccaattgagaacgcaggtcccctccctttttactttcggtaaataaaaaattttttttgaaaaaattagttactaattatatctcctgaagattaaaaaaaaaaaatagcagagcagagtcctgtcttgagggtttcgtttttatttttgagatcactgatgatatttgtaagacaggaaaagaagaatgtgcaaatccaccctctgcagggtgaacgccatcagaagcctttgctcaggagagggattccggctctagaaccagtccacatcaccctggagatggcttcgtttgccacctgctagctgtgcaggcagcctgagaaacagaagatggtgggcgagaggaggactgactaggaaagggcgaacatcttcctgcctggccactcctttcagaaacagatctgatgctgtcacttgtttacttaaaaactccctcgcttttctttttcccatgggatgaatgaagcctaaaatgccttatcaggtcatacaaagcccttgacaatcttgcctcaatttactcctttacttttagcctaatcggatcctccaattctccttcccctcatcccgcttgctggctagtattcagagctgcttgactgccccctcacatgttgggatgtttttgttttatgtgatcctctttcttccccacctttacctgccaagctccactttttcttttaaagttcttctcatttgagaagcttcttgcgggcaggagctgtgtcttgcccacctttctatctcccgtggtgggagaatcctccaag

SEQ ID NO: 99728 - DNA, 1056 bp, Homo sapiens
ccttaacctttgaggaactcagagtctaatgtaggacaggtggatataaatacatcacaggtgctataagattgtgataataataatagctattttttatttgccttgtgacaagctatgtaatgttttccatgaattccctcagtcttttcaacagtcataaaagggcttattcctactctacagggttggaaactgaggccaaacagtgggcaaatgagggaatagtcaagatttgaattttggccgtgtatttgcagagcctctgccaggctgtgtagggagcatcccctgcctgggtgatttgggaaagctttcctgggacgggggggccttcggatcatgaaggatgcataggagtttgcgcgtggtggactgcacacataggcaagagggagcagcacaagcaaacttggtggtggaaggaatccactgtccttggggaggagggaagaggttaatcatagctggatcaggtaaggacaatggagagctactagaggatttaaaggaggtcagggacttgggctgaaagaattttggaaagatcatttgggggcaatatagggccaaatgcagatgcccctgcaatataggaggcactggttgggtctgacagaggtagagtcacagcctcttagacccagaggaaggtgtagagagaatcctgctcaattttgggaaaagataattaatgcagatgagagaaaaattcaaaagttctagcaatacaaaagagtatatagagaaaaatgtccctcctaccctggccccaagtctcctgtctccctaacctcctccccagagatggctgaagttttcagtttatatggccttccatagacactgttgctttataaatatgtgcctgcttatccatactcctcccaccatgggacgtaccactcacaccttactgggtttttttacttaacatatttaggaaatcattctattatcaacatatatagagagttatttgttctttctgttgacatgcttttacttatttagttgtatggctgtactgtaacatctttgggttaaatatttgtt

SEQ ID NO: 99729 - DNA, 1093 bp, Homo sapiens
ttatttttctccattttcacatggaaaaaaatgagatgcaggggaagtttgagttatgagagggaaactggccaaatatagaatcttgtcattttacttccagtgcaataataaatgtttccaaatgacaaagctgaagagatgttttttgtttgtttgtttgtttgtttgttttttgagatggagttttgctcttgttgcccaggctggaatgcaatggcgctatcttggctcacgcaacttttgcctcctgggttcaagcgattctcctgcctcagcctcccgagtagctgggattacaggcatgtgtcactgtacctggctaattttgtatttttagtaaagacggggtttctccatgttggtaaggctggtcttgaactcctgacctcaggtgatccgctggtcttggcctcccaaagtcctgggattacaagcatgagccaccgtgcccggtgaagaaatggttttttagtgagtctgagtacaacaaaaatagcaataatataacactaacttaataaaactgaacagcaggcccaaaaatagcccaacattaaaatttattttaatgtattctctatggaaaagagaatccattaaatgtaaaactatttattttactctaaattcacatccatttgtgtcagtgtacaagacataatttttatagtagcagtcagtacatatagaatatgatttttgaattcttcaatagcataaaatattttatatttactcatttaagtatttgttcatttaaaatcacaggctgggtgcggtggctcacgcctgtaatcccagcactttgggaggctgaggcaggtggatcatgaggtcaagagatcaagaccatcctggccaacatggtgaaaccccatctctactaaaaatacaaaaattagctgggtgtggtggcgcgtgcctgtaatcccagctactcgggaggctgaggcatgagaatcacttgaacccaggaggcggaagttgcagtgagccaagatcttgccactgtactccagcctggcgacagagcgagactccgtctcaaaaaaaagaaaaaaaaaatcacagtatagtattccatgcatcg

SEQ ID NO: 99730 - DNA, 1213 bp, Homo sapiens
taaaataggtgtcttcagaaatcttggaattgaatgctcagcattgtttttcatacatacataactgctttaaataaatcaaagagattatgtgttctttcctgaaaagtaaaataaattgttgacatttacaactctatatatggtttctgaggaactaagtgaagaatcttgtgtctttctcccttaaaccgtagtcctttggaggaggtaggaaaggtccagcatgagataaaaacgtagggggtgggtggtgttgagggggattggtctttgcttggtctccatatgtttgagagtttattaaggcttgctgctttgtgtctcacagctttttagcctcacattcttcatgtgctatttccttgttttttggtgtttgtagttgcaccttctgtaggaattacaagattaattaactcatcaacggcagaaccagttaaagaagaggccaaaacttcaaatccaacttcttcactaacttctctttctgtggcaccaacattcagcccaaatataactctgggacccacctatttaaccactgtcaattcttcagactctgacaatgggaccacaagaacagcaagcaccaattctataggcattacaatttcaccaaatggaacgtggcttccagataaccagttcacggatgccagaacagaaccctgggaggggaattccagcaccgcagcaaccactccagaaactttccctccttcaggtactagagatgattctgtttgttcttttgctctttgagtttagtcttccttttattatcttgtttgtgttttctagccttaaaatttcttcaaataagtaaaattgctcaagtgaagtaatgaaacctgtatgtggaatttttgggttagcatgagtgaagaggaaagaagaaagattctggagaatatctttctgctaggtgggatcctggttagattgagaggacttaaatgtgtttaaaggtagagaagaaggcttaaaaagacaagagaaatagaggagctcattgacgatgcaagagactgaagatgaaaagatacagagaatgagtaataagattaggtttggaaagggagggatccgtggagaccatggaaaggagaatgggtattgatgtccatgacagttagatgtgagatacagagaatgagtaataagattaggtttggaaagggagggatccatggagaccatggaaaggaga

SEQ ID NO: 99731 - DNA, 1051 bp, Homo sapiens
tgcttgctgttcccagtgtctagaaagctcttcacccagatctttgcgtggttcacttcacgttatttagagctctgcttgtatattacttcctcagagagaccttcccagaccactgtatcactgctccccaacctgtcactttctctctccccaccctgctttttattcctcatagcacttgtccctgtctaaaattaagtattgacttgtttataaacagtgtcttccttcctccccacagaatggaagctttctatcacttgtctccttgaacacttctctgttcctagtgtctcaaacaatggcatgcaattgctggcccacagatatttgaatgaatgctgctaaaaggttgaatcagatgaggatgggaatgttcctgttggatttggcaatatgccatttgttggtgttctggctgagcagtttaaacagagcactgagggtgggagtcagggcaaatagattaaggagaacctgaaggtaaggaattagacaagacgaattagacaactgtgtttcggaaagtcagctgagaagagagacgcgaggctggtggtagctgggggagggtaaatgaggtcaagaagacaagtctttgagttgacagcagtggatgtaatccagagcacacatgacaggatggaagagacttgtcttcccttttagcaggtaggaaaatggtgaagatagttaccaagccactctgatggtgtagttcatggagtcgggtggagggtgagagtggaggcggatgagtcagtgcctggccagctgcatgagaaaacaaggctaggtattgggtgaaagggagccaggccctgtggaatgaggtgggattgccatgtcttcaaaccagatgttgccatggttggggtcctggcaaaaggtgactaagggagcagggtgtggaaagaggaaaaaagaagcaaccagcagttttgttacatggtggctgaggatctaataatgtctccttgttttattttatttttatttagctggtctcaaattcctggcctcaagcaatccttctacctcagcctcc

SEQ ID NO: 99732 - DNA, 1098 bp, Homo sapiens
gcaccgcctctgcctcctgaagtgctaggattataggcgtgacccaccatgctcggccttgtcttcttatttatgtgcacatgttggaggagggggatgtgtgtatgtgtgtgggtgtgggtatgtgtatatataatacatattttttaatatgattggtatactgtacacatttctctcttttaatagtatatattgtcagttcatctgtcaagaaactttcttttttctcaactacttagtattccacattgtagatgcatcttaatttatttaactagtcccctaatgatacttaaggtattcccaattttttgctgttatactgttggagttatattgttggagtggcatctttatacaagcgtgagtctgtgcacataggcacagatgtctcaactgtcctggttgcgtcaggttctgtgagaaataaattttgattttactgaaatattgttggtttgtttcctagatgaccactctagagtccacctgacaccggttgaaggggttccagattctgattacatcaatgcttcattcatcaacgtaaggatcgggtgctttccctgtcacttccctgcctgaccattgccactatctgttggctcctccccagctgtgtgttaggagaaatatttgtcatttcatgttttccctgacaagtctggtttttttaagtgactgaatttttttttaaggtcagtcaaatagttttaatcattttctatatttaccctgtcgtcattccctatggtttcccatgtagaaatctgtgtctaaatatgtattttgtgataagagtcagtgaatcctttattgagctgattctaattacaaacaaaagcaggccttgccctcaacagtaaaaataagggagaacaggacaagaatacctgacatgacaccagctatattatatatgtgtgtgtatgtatatatgtgtgtgtgtgtgtctgtgtgtgtgtatatatatatatatatgactatctggttagccatatatgaaccaaggcctgagggaagagctgatactaagaggaggtttttaaagatgatttagagaatgtttatagaacagtctgtatgagagatttg

SEQ ID NO: 99733 - DNA, 1068 bp, Homo sapiens
gctccttgggaagctgaggcaggagaatcacttgaacccgggagcagaaggttgccgtgagccaagatcgcaccactgcactccagcctgggtgacagagcaagactccgtctcaaaaaaaaaaagaaagtggctcctcagatttaggccacttcttatatttggccactgccttgcagccttgtagttcacattgccaccctggtgttggtgtgacatggtgtcccatccctgaagctgcctcccttgttactcaccttattgctgtctgagaaaggaaatgggtgattcacaatccttaaatcaagtggctttctcttacctagaacttctgaattgaacatacatttaaacaatgacgttgaaaagatgtataactggagcaataaagactgaaaaagaaagctgcggccagttgttagtttttccgaggctccttatctgttgagtggcaccccaggctcccttgctcttgtcccccactgcctgtgatagagaagcctcttgttaaacactgggagctacttcaccacactcacaggctattcccagaaagattttgcacctgggtaaagcatccttgagaaaataacctgttttctttcccagagtgaacccagcttcatccctggaaccaccacatatgcttttcccctggtgggttcttaacctgttaacactgaaatctacattgttagctgctgataaagcatcagaaacatggtctaatctgggagtcagtatttggatttcttttttctttctttctttttcttttttttttttttttggagatggagtcttgctctgtcaccaaggctggagtgcagtggcgcaatcttggcttggctcagtgcaacctccacctcccaggttcaagcaattctcttgccttagccaccctagtagctggaattacaggagtgcaccaccacgcccggctaatttttgtattttagtagagatggggtttcaccatgttggccccatgctctcacactcttgaccttagatgatccgcccaccttggcctctcaaagttctgggattacaggtgtgagctaccac

SEQ ID NO: 99734 - DNA, 1024 bp, Homo sapiens
ttgctcttggaagctatccaaagctcaggcaacagaaaaagctctaggcctctcatggcaggtttacagtctgcatcagtctaccctggtggccccctcatagcagactgctggttcgaggggttcaaacaggctttctcctagagcatgacctgaaatgttgtgaaagtgcagattttgtaggtaagatggcttcagattcgccctgaaccaagggagtgtgggtgggaaacattgagaagtatggggctagggctgtgtgtaagttaggagactgtgctcaataggatggcggctaaggaacttgagaaaagggcaaatttgaataagtaagtgtgcaactgactgagatagagaagaggtcaaagggccttctgggggactttaatctgggctttgtgggctcttccttccaggccctttgcatctgccatgggcaggaggtctaaggtcagggaatgtatgtctttttctttccagtgcaagtgcgcccagtactggccagaccaaggctgctggacctatgggaatattcgggtgtctgtagaggatgtgactgtcctggtggactacacagtacggaagttctgcatccagcaggtagtgtctcctctgtcctttctcagttcttatgttggatctgctgaccagtaagagggaacaggctggatcatcccgctgtggtcaggagttgctgagtatgcagtatgtgaattctgaaaccagatatccgggctcaggggaacttgtctgtcaaagctaaaggagcagtattttcatgactggtgaaaaattacctgttgagatgaagtctgatcatttagatatgaccaagcactgtggaaagggagcatggggaggcagtgcagtctcctaggtgcttgactcacctttctcctcctttcctactccaaagactcctgacatcaaggatgtgatgggcctgcccctggccctccaggcaaccctggagacctgagcaaaggtcaccttcagccaaggggcagtgtggtactgcgaaaag

SEQ ID NO: 99735 - DNA, 1262 bp, Homo sapiens
gtcaacaaatagtgaattgatactcacccacccactcaccctgtgcattaggtctgtccagctccatagagcagaaggtgggggaaaacagatggcatgcagtagtataatacctggaagaaaaagttcacagagcagaccacagccaagaggaacctggctgccccctgatctttcccattcctgccctcttcatcctagctctaatccctgttccacttccctgtctcttacagaaagcaaccagcttgtcagatagggtttcgtccttggccacaggggagctctgcatgggctgagtttgcctccgagcagtccccattcccttctagtggtctgtcttctccactagtccctctgtgattaaaccatctcacccttgcaattaacctggcctgtgcagggctaccggcagaaggactcctatatcgccagccagggccctcttctccacacaattgaggacttctggcgaatgatctgggagtggaaatcctgctctatcgtgatgctaacagaactggaggagagaggccaggtgagttcaaaaggtcctgggtggtgagagacagagacagcatgaaaagatgtgtgtgtaaatggggacgttgggaaggcaagaaggtgtttggaccttgtctttgacttatacggtccaaagagtacgtttgcatagtataagtacatacttaaaggtatataaatacatatgcatttccaggattgcccagcccgttggtgtctaagcagtcattagcttctcccaagactagaaaagcaatgtgatctgagcctccatgttattcccagacagctcacacccttgcactttctcctgaatacagtccccctagcctagcctttgcacagtgccccaggcggggggggcaccctctccttcccagtgccccaggcagggcagataggtcaaggttctgaggtggacccaatatgagtgtccctaagaagggattgcctcattgctgactacataaaataaagcagtagaatttgagaaattatacaaacaagaaacttacagtctaatattcagtaataaggaaatcttttaaagaaaaaagccctcaggtctattaaaaagcagagctgtccggaaactcatactaaaaagggacactagcagtcccctaggtcaacttcctctcagtataggaaacctcctaatattgttcctgagtcagaatcatacagcctctactaagcacattcaatctcagggatatctccctcaccccccacat

SEQ ID NO: 99736 - DNA, 1051 bp, Homo sapiens
tgcactgtctcccagcccagcacatgcctgtctgacctctgtggggcctgggtcagctctggtcagctctgcttgtagaaggtctgctgcattcagcccggaaggggaatgctgtcagaactctggcaggcagatcagagctcaggtgaaagttcaaaaacattcagttcctcttgattttccatcttcaacaaaaaaatgagtctgttaggaattacaggtactgtgtgttcttcagtaaccctgactttttccctacctttcactctccaggaacagtatgagttctgctacaaggtggtgcaggagtatattgatgcattctcagattatgccaacttcaagtaagcggcaacaagggtccgtggaccaggaggattgcctttaatattttgtaatattctgttttgttaatataccccaaattgtgtatatatcttataactgttttagaaattggtacataggcttctattacctattaggtggaaattttatatgtaaatgtgttagcactgatagtcctttttccaatgttttattggggaattaaatagtgtgatgtttggattgatatcgtgaaatcctcagccgagaaattgggctggattgtgctttggttaatacatctttccctaaagaagataaacacaaaatccattccaggtagctcggcaccaactaagaaaaaaagcacaaagttctcagagctctcgaggaaagtggttgtccccgtaccaccatgcactgtaaatatccctcccctctctccctggtcccctcccccatccccaccactgatatcatggggagtaataggaccagagcggtatctctggcaccacactagggactatcaggtaataaaagctttgactccctgaggaaatgtctctccctttgtctgggggtggggcagccatacaggctggggctctcctcggctgttcatggccctcctgttgctgttctctctgagttatctgagagaggccacagtcccccagctcctcctgtccaccaaacacagcccttccagttcttaggtgat

SEQ ID NO: 99737 - DNA, 2410 bp, Homo sapiens
gttcttcgtgctgatggagcgttaccagcactaccgccagaccgtgcgcgccctcaggtgtgcggccggggggaggtggccgcccgcgcgcgctggtgacggtgggagtgggcggagagggtgctgattcctggcgcgtctgcacccaggatggagttcgtgtccgaggtgcagaggaaggtgcacgaggcccgagccggggttctggcggagcgcaaggccctgaaggacgccgccgagcaccgcgagctgatggcctggaaccaggcggagaaccggcggctgcacgagctgcggtgcgtggggcgggaggcggggcggggcggcgcggcctggccggcctgggagaagcccgggccccgctcagcctcggccctttgaccctcacaggatagcgaggctgcggcaggaggagcgggagcaggagcagcggcaggcgttggagcaggcccgcaaggccgaagaggtgcaggcctgggcgcagcgcaaggagcgggaagtgctgcagctgcaggtgggcaacgtctccggagggtgggactccagccggggacgcggcttgcggggcactgggaattctgggcaccgcgacgcgggcgctggctatgtgcagagacttacagttggcaggtccggatttggagaggagagtgccagtcaggcgcaaagacccggaggtgagcggagtaattggacagtgttcaggtacctagcaggtctgtgggagggaccctgcgttccacaaagaggttgtattttgcataacaggtgatgaagccatgaagggttaagtatttcaggctaggattagcaggtgtgcgacttaaaagcagggagaccacttaggagtaatgcagtgagaatggatgaggcttgatttaaagtatagaagggtggctgggagcggtggttcacgcctgtaatcccagtactatgggaggccgaagcgggcgtatcacttgaggtcgggagttcgagtccagcctggccaagccccgtctctcctaaaaatacaaaaattagccgggcgtggtgtgcgccagtaatcgcagctactcgggaggctgaggcatgagaatcgcttgaacccaggaggcagaggttgcagtgagccgagatggcgccactgcactccatcctgggcgacagtgagactccgtctcaaaataaataaataaataaataaataaagtaatggggggaaggatgagttagagtgattcagaggggaccactgagggacggatttcacctaccaggacgtgagattttcatagctggcactcggggctatggctgaagtgtctgagaaaagaggaacgtggaaaagcaacctgatatcactccactgggaggccagaggggctctcaaataggacctgggttccaggcatgcttccccagggagagcaggagctgctttctcagtggggtgagaggccagcaggctgggtgggctggctggcatgtgcccaaggctcctgttcagctgggcttttctctcccgataggaagaggtgaaaaacttcatcacccgagagaacctggaggcacgggtggaagcagcattggactcccggaagaactacaactgggccatcaccagagaggggctggtggtcaggccacaacgcagggactcctaggggcccagtaaggacagtgcccgccagggaccatgtatgtatcatggcggaagagttggccctgacctggaataaagcagttggtgttgcttatgaggaaggttcagccttatccagcacagccttcacgttttgccctctgctgtcaccacttggtcagaaacttccaaacgcagtgccctgttctgccggtgtgtacagcctcagcgcaccaggagaccctagagtggtttccatctcacagagaatcagacagggccacagccccctcaggcagccaggtcatctgagtatcattaagagtagtgatgggaagattacagtctgagggccaaacgtgcctgcttcctgtttttgtaaataaagttttgttggaacacagccacacccactcattgacttctttttactacagtggcaaaggtgagtagttgcaacagagaccatatgaatcccaaagactaaaatctttaactttttacaggaaaagtgtagtgatctctcatctggagctttaggactctagcctgtgtcacccaggacctgagccacaagctaaccattggccaggcgcctgcctctgctctatactgtgctttgctggccagagtctggtgtatccaagacccagaaggcaaagaggagaccccatttttttctgggttccacaaagaggttgtattttgccttacaggtaatgaagccatgaagaattaaatattctaggctaggattagcaggtgtgtgacttaaaagcagggagg

SEQ ID NO: 99738 - DNA, 1079 bp, Homo sapiens
cagaccaaggctccatctcaaaaaaaaaaaaaaaaaaaaaaaggagcgtgcagttctgcagttgagccacgaggtggctcatgtctgcccagcagtttctccaggaggagaaaagcctgaagccggtgggatgggcaggaactgccggtgttcctagggctttacctcccggtgttctgtcatggtccgccagtagacattaggatggagtttcattacattgatgtgtgagattggaggtgccgtttttacagccctcgaaggacttgaggctgttctcttttgcggagcctgtctctggatgttgtgctgtgcgcatctctcgacaggtccactgtcccacgagcagaagctgtcacaaagcttggaaattgccttggcatccacccttggctctatgccctccttcacggcacggctgaccaggggacagctccagcaccttggcacaagagggagcaacacttcctggaggcctggcaccggctcgggtaacatgggccccgccatctccttggagccttggaatgggtggtctgttttctgtctctggatgctgggccgagtccctgggggctctgtggacctgcctggccagcctccccgtcagttccaacacccaccctgggagagaacctgttctcttgccttttccaggggtagttgaggggctgcctatgaacttaaactccccacaagaaaggctttctttagtcaatccttagtaattctgtggatgtagggcttggccaccctctgatgtgtttccttgtgagatctaatgttaattattttctcctgaggatttttgtttctcttttttttgtttgttatttatttatttatttgagactgcatctcgccctgttgcccaggctggagtgcagtggcacagtctcagctcactgcaacctccgcctcctggattcaagctattctcctgcctcagcctcctgagtagctgggattacaggcgcccgccaccatgcccggctaattttttgtatttttagtagagacggggtttcaccatgttgccaggctggtctcgaactcccgacctcgtgatccgcccgcct

SEQ ID NO: 99739 - DNA, 1021 bp, Homo sapiens
tgcttgcgataaacaactcttctagtactgagaccaaagagaaaattttcttatgggtctccaagagaggataccatatagaacagacaatgatcattttgtccactaaacaaaacagtaactgactttaaagagctgtttcttattgaagttccttgtcacacagtgccaatgagtagcttggtgaagagtatttgcagggggtggtgagggtggtgatggttgtggctgggatgaacatgaggataggccggtgcactggtctgagggtcagctcaatggagtggtatattttagagattaaaattatggttatcacctgatatgtcctgctactctggtgtcctatgaatcgtcacaagtcggccactgaatttttatcaatgtgttacatttatttttgcaactggtgaggatcaaaactgctaagaaatctgtcagatagtggtgtgggataagatctgcagcagccacgaggagtgccagacaagaggcaagagaagctacttggaccagcaccaaggagcatgtaacggggctggactgaacactcttctgtaaatgttccctcaacttatattttgatgagtgctgtggagagcaggtagtctgtgtctggtcagggttaggtccatatgcttttgtagttgactggggtagttgacagcccctgacgcgggtggagaagcctcatgagctgagatgcttgaacagaaggctgactcgcttccacacagaggtgggaagaagtagctaagggtataccaagattttccttaatttcaggtctgatctaacacatattggaaagggcagtcaaggtttccacatttctatatcatagagcataataaccacatttaagtctagaagaactcttattttattttactttattttttgagacagggtctcactgtcactcaggctggagtacaatagcacagtcatagctcactgtaaccttgcactcctggcttcaagtgatcctcttgcctccgcctcccaagtagctgggact

SEQ ID NO: 99740 - DNA, 4019 bp, Homo sapiens
caacagccctgtctggtacatcagttgacaactcaggtctccttgggtcttgcttgtcaggctttggcacttaagtggaaagaaaaagaataagcattaaggaaagcgagagcacagcagaatcaatttcatagtctctcatggtttctgccatgggagaaaaatgggcattatactgctcacaggcagaataaagactcactggaaacattgctaagctgccttctccagaagatgtcagcggggcagttgcgtcaattggcgttccctgaaccctgagcccagctttggggtactctttgcttcccacccgtgaagtgacagtgagcagaccctcaaccttctgctttctcccaccaaaatgagtgagttttttagtatactttctaataacaccattactctgtgactactctctaatagtgactcaaattctgttataagcttcctgaagaggagagtaggcatcttctaaaaagtaaaagaacagcattagaatgacagaattttggaattaacagttttgcgctataagaacagggagggttatcgtaggtataactaattaaatcttttttttttttttttgagatggagtctcactttttcgcctaggctggagtgcagtggcacggtcttggctcaccgcaacctctgcctcctgggttcaagggattctcctgcctcagcctcctgagtagctgggattacaggtgtgtgctgccacacctgggtaattttttgtatttttaatagagacgggatttcgccttgttggccaggctggtcttgaactcctgacctcaagtgatctgcctgcctcggcctcccaaagtgctggcattacaggcatgagccacccacacccagccaactaattatcttttataccagatcccactttttacttagtgctgttagcatagcagtttttataaacattcttcaggtaggacctgtttgccttgatatcaaagagatggaaggagttgctcacttttgttcccagccttctttctagaaatctgccttccttcttcctatcaaatgttagcggagcaccgtctcttctttagccgtcactgcttgccttgtacagtgaaggaagtctggtgagcagcagtccaggaactgcccacgggtaccctgggttgggggttttcctaggcctttacacagaccgcagaatttatccttgatatatgctgtcatgtggtttgggcatttactagcattgaacttatttgagtagacagcagtgtagtttcaacctgttttttataatgtgtaaatttggatgcttttataggtagaagccactcattcttcatctacccttttttcagtatctggcaccaattctgacccagtcatttgtgatccctggctcttgtgatatgctgaagatttccaggcagtttttgtggaacacctccccgtccagctctaatcaagcaccatataaacaagaaattgcctggtcaaatctgtgaggactgtattctgactgccaaagagatcaatactgacaccagaatggcagctactctcaagtcattaaaacttgtaagataccgagcattttgcagtccttctgcctttggtgcagtccgaagtgtgtcatactggaatgtgagcagcacacagcatgggggacaggaccctccagaacacattagcctctgccattctgccaaaaaagttaagaacatatgtagcaccttctcttctcggagaatcctgacaaccagcagtgcccacccaggtttggaattcagcaagacttcttcctctaaggccagtacattgcagctgggctcacccagggccacaggagttgatgaagaggacgtagaagtgtttgattcctttgaaaacatgcgagttttcctacagctaagaccagaataccgtgttcacagctataatgcatctgagacttctcagctcctgtctgtttcagaaggtgaactaattttgcacaaagtcagagttaatcaaaataatctccaggctcaagtcattgttgattatttgtgtaagctgagctctttgcctgcagagcagcatcctgtcttgctgggcagtaccagctttgctctgctctgccagctgagtgtgaagaagatacagctctttgatacccaagatctgatcaatgttttgaaagcttttgtcattttaggaatccctcactcccattcaatgctagatgtgtatgagaccaagtgttgccatcaggtatgggagatgaatatggatcagctccttttggtggctgatctctggaggtacttaggccgcaaagtacctaggtttttaaacattttttctagttatcttaatttgcactggaaggatctatccttgtctcagctagttcacttaatttatgttataggtgaaaatcgtcaggtatcccaggacctaatgcaaaaattggaatcattgatccttaaatatatagatttgatcaatttggaggaggttggtaccatctgtttggggttctttaaatcaagtactaatctctctgaatttgtcatgcggaaaattggagacttggcttgtgctaacattcagcatctgagtagtcgctccttagtgaatattgttaaaatgttccgtttcactcacgtggatcacatcaatttcatgaagcagattggagagatagctcctcagcgaattccttccctgggagttcaaggtgtcatgcacctgactctttactgctcggccttacgcttcctgaatgaaggagtaatgaatgcagtggctgcgtctttgcctcctagagtggcacactgtcgaagtaaagatgttgccaagattctgtggtcatttggaactctgaattataagccacccaatgcagaagaattttactccagcctgataagtgagattcacagaaagatgcctgaattcaaccagtacccagaacacctgcccacctgcctgctgggcctggcatttttggagtactttccagtagagttaattgatttcgctctcagtccagggtttgtcaggttagctcaggagagaactaagtttgacctccttaaggaactatataccctcgatggtacagttggcattgagtgtccagattacagaggcaatcgtcttagtactcaccttcagcaagaggggtctgaattgctgtggtatttagcagagaaggatatgaattcaaagcctgaattcttagaaactgtctttttactggagaccatgctgggggggccccagtacgtcaagcaccatatgattttgcctcatacccgatcttctgacttagaggtccagcttgatgttaacctgaagccattaccatttaatagagaagccacgccggctgaaaatgtagccaaattaaggcttgagcatgtgggagtcagccttacagatgatttgatgaataagttactaaaagggaaagcaagaggacatttccagggcaaaactgagtcagagcctgggcagcagcccatggagttggagaataaggcagctgtacctctggggggcttcctttgcaatgtagcagataaatcaggggccatggagatggctggcctgtgccccgcagcctgcatgcagaccccaagaatgaagctggctgttcagttcacaaacaggaaccagtattgctatggctccagggatctccttggactgcacaatatgaagaggcggcagctggctcggcttggctaccgtgtggtagagttatcctactgggaatggctcccactactgaaacgaactcgcttagaaaagttggcgtttcttcatgagaaagtattcacctctgctctctgaagggcatttaggggcatttctatggcaaagctataggtgtatactgtaccaggtgttgcaaaatgattataaaagccagaatgtaagtttggcgataaaatagtgtgttgaggagacttaattgtatccaaggcaggttagagctagtgtatgttactgtgaattgtaatgtagttggattgtacaaa

SEQ ID NO: 99741 - DNA, 1041 bp, Homo sapiens
aactgtccccacattcttgaatccccccaatcttggccttcagggcccaccttctcctggccttcttcctgctcccagagtgccttccagacttctggggctttgctccctggctcagtgctggcctacacccccagcacccttgaaaactgatgatctcaatctctctccatctagtgctttttttttttttttttttttttttaaggaaagagtctcgctctgtcacccaggctggagtgcagtggtgcaattacagctcactgcaacctctgcctcctgggttcaagggggttctcgtgcctcagcctcccaagtagctgggattacaggaatgcataccgcacccagctaatttttgtatttttagtagagatggggttccaccaatttggccaggatggtcttgaactcttggcctcaagtaatctgcccaccttgacctcccaaagtgctgggattacaggcatgagccaccttgcttggcctccatttagtgcttgagaggtatcttcctctggtgtttcccaaagcaactattttccccaagcagtctccccctatcatgttaacagtgtcacacgcacgctggtgcccagtccagcattatcccttgtccccaccacctgacctcatctgtatgaaattttgccagttctttcccaaaccctgcccaggccttcctactggttccaagcctcaggcctttcaggcttcatcctcccagtccccagctgctccccacattgcacccagaggtggcaagagaagggtccatacttaaggtaggagggggttgcagggctgaggcatagggggctggagtatgctggggagtagaggcagagcagggactagagtgaggccagagagggacccaaggcacaaagggaaggaggctgtcaccctcagggctgtgtacttgctgtttgtgcccttcatttgtgccctacgtggctctctgtcctcatcctagtcctggcccttgcttatggggacagacgggtccaagggaggagggtggcgaagtgctcttctcca

SEQ ID NO: 99742 - DNA, 1043 bp, Homo sapiens
attttctgcctgtcccccacgagctggagaagcgcgaggcggctccaggaaattcctgaagctctctcccttcccgccaaggagagggcccactctccctccccaatccgctccccgatcagaaggccatgtcattggccagggcacagaacagatacacccatcctccctctttccccccatttctggtcagcgggcgggtttgtatatgtgttttcctgctccctgggcccacaagctacctctgagcacctgcgcgctcccaggagcggaagggacacgctgagggaaggcggagatccagcaggtcttcccgggggaggctcggccaccgccgggaagtgtactctctggctggggagccagataaaaccacaggtggtgttaggcgagaaatcagtggattcctgcagggggtactcgatgagagctggggacatcaggataggggcctcctgacaggccagctggaaaggtggagccgggaggggagaggagtattcacacaggcccgagggaagggctgagcccccgcctgggaccaagctgtgggcctggtggaaaaggccttgccagtcagactgagaagtcggggccttgtgctgtgggcagcaggccgctaagcagaggaggtgaggcttccgggctgccgctcctcctgccatgggccgggctgggcttataggcagcattgtcatttctgtcttccctacagccggccaagagccactgcacaatgaggagctggcaggagcaggccgggtggcccagcctgggcccctggagcctgaggagccgagagctggaggcaggcctcggcgccggagggacctgggcagccgcctacaggcccagcgtcgagcccagcgggtggcctgggcagaagcagatgagaacgaggaggaagctgtcatcctaggtgagaggggcccagcctggtggggagagggtttgggttggagggggggataaaagggcccccaaagctaagtgggggagtagggtatgaagcctcagggtaggagggacgtctgggagccaca

SEQ ID NO: 99743 - DNA, 1629 bp, Homo sapiens
caaccttctgtgctcaagcaatcctcctgccccagcctcttgagtagctggaacttcaggcacatgccactatgcccagctaatttttgtattttttgtaaagatggggttttgccatgttgctcaagctagtctcaaacttctgggctcaagcaatctgcccaccttggcctccaaaagtgctaagattacaggcgtgagccacaggacccagccccttaattttaaaatatcaagataaatgatattttgagatatctgcagcaattgtaatgagttataacaacatctgtgattttagtagggttaaaagtcacaggcactgctagtaatattttggtttgttacctatattcataattgaaaaagttactacatttcaattaagggttactaagaataaagttttttttcccaatccatgttcataggccttctgaattctgggtatcttctgttagagaattcctggtctaggaggatggctagggtttctgggagcattgagaagagaagagtgtgttctggatgggggcttagcacaagcagagacctgacgtagaagagatagagaagcaaggagatggaaggggctggcttgctggggtgggaccctgaaagccggggtgaggcccacaggcctgagttggtaagctttaggagatgggcagcagagttatcgatgagaaaggcggatgacagctcacgtgctcacatggagaatcactagatggtgataagtgttctcttttctcttggaacaggtcgttcagattctaggagataagtttccatgcactttggtggcacagaaaattgaccgtatgtctctgttttgttttatttttaaaagatggttggatttctctgtcttcctgtgacctgactttctgtgtgtctgtttccctgataagtgccggagtaccagggggagccggatgagatttccatacagaaatgtcaggaggcagttcgccaggtgcttgccctgcccttgtcccacacttgctcttcttgtccaggtagcttccagggcctgcgcctgctagaaacaatagagtagacacagtttgttgagctttctaggaccggcccagagtcctctagggttcagttaatattggctttggaacactgccttcctttgccagccttgaatacatggtatctcccccagaccaccaccatacactcccacgtacacacagactccccttcccccaaatgctcagacaatggattccagccctacatcctccccacacacatccaccgctgcattcacacatgttcgtggaactgagaaagcacgctgcggagagtcaggctgagtgtgaatcccagctctcccattgctgtgcctggagcaagctttaacaatcggccaaagcttggtgtcctcataagataagagattggccaaagttaagagattggccgagggcagctcccatggtgctgtctgccacagatctcagctagctgagggctggccccagcctgggtgacgcgggtgacctggacgttccaggtggggatggtgatcatgggtctcagggctgtatgtctttgtgctgcaggtacaggggcccgtgctggttgaggacacttgtctgtgcttcaatgccc

SEQ ID NO: 99744 - DNA, 1062 bp, Homo sapiens
gcataaggcaaaagcactgggcgtgccacactacccagcccccaacccagcaaggcttcatggaggccctggcactacctgcgggtggggggcagcatggatccagggtggaggtcagcccgcaatccatgccattgaatgaggcaagaactcgagtggagacgtaacactccagctcacagtggcatccgaatgccttccacacggtgctgcccgtgtccccatccccacccccacccaaaaaacttcctgcacctgccaaaggagactgagacagacacctgcctggggcagggttcaaaacagatatagctggtttattttggaaacaagtctcatccagaaatgttatttactgcatttaaaaaccatggaaggcgatttgcatggttcctccccacgccctcactcccaccaagtacagctttaccacccaaggtcctttcaggaccccaggcctggcggctgtaggagagagcagtgaatcctaagggcaagagaatggcgtccacttgccagagtttctcagagcagagccagctgctcctccagacaggccggtgaggctactcgacaccctcacaaaggggaaaccctgaaggaagtacttcagggggtgcctgcccgatgcgggaggttttgggctagccctccccagatccccggcctgaggggcctcctccagctgcagaagtcaagctgccaaactgccaaagtactcctgcagctccagcagggcccggaagcgatgggagacagcgttcttctccgccttaggcatctctgcgtacctgaggggtgacagtagcagctcagggagcccagattcaggaaggaagtgcaccccctcccaaccctacctcatctcatccctggagaccaaagctcacagaccccaaggaaaggggagtggggcccagcagctcctggcagccagtgaatttttaaaaatcggataaagttttcaattcccctgtaggcagaaacccccatgaatgagcatggaggggtattaaacttgctctagtgtgcccaaaagtcattaagggaagctggggacag

SEQ ID NO: 99745 - DNA, 1057 bp, Homo sapiens
aggctggcgggcaggaggagcccagcctagaggtggagagtgggcgggctggggtgggtggtgggcaggaggggctccagtctaggagtggagagtgggtgggctgggggtaggcgggcggggaggagaggcctagcctggccctgtgggtgggctggggtgggctgggatgggtgtccactgccttctctctgacccaggctcatcctcctgtccctccctccccacagctatatcctgctgccccgaatcattgaagccaagtacttggatgtcatggacgctgagcacaggccttgactggcagaccctgcccacgccccattcgccagccctccacgtcctcccaggctggctctggagctgtgaggggaggtgtaggtgtgtgggtgactgctctgtgctgcgccttctcatggctgactcaggcctggggcatctgggcattgtaggggtgcagtggtatgtgcccacccctctcccattatcctttagctttaggccaagagcgttgctcagggcagcttctgcccagggtgggtgggactgagcaggatggattttcttttgataaaagagtcgatgcctgaaagagaaaccatttccttgattgtgtaaggaacttgctggacgcacattagagaataaagctcctgtttctaggctcctatgtgccacctgtgtccctgctactgccactccacccccactctggggaggggaagccctccctggggaagtggaatgcaagggacagagtttgtggagtgccacctgtggtctgtcacctccaacgtcgcacagtgggtgctggcccaacagtgaaacatggaagatccaggaggccttcgcatggccatttctccagggacctgcagggaaagcgttctgggaacagcatgtgcaagggtccagaggagcgagggcttggggccactgaggcgctgtggctggtgaagagcagtggggcgggagggaccatcagggtgacagcaaagggccctgtgactctcagatgaaagctgcctgccgggaggccgaggcttcgtgtggagca

SEQ ID NO: 99746 - DNA, 1005 bp, Homo sapiens
gtgcatgggcacgtcggcagggtcccctcaccttccccctggagccctttctccctgagatcccctccctccagggcctccccctgccacacgctggagagggctgaggcctgtgggtgtgtgtccacagtcttctggaagtactactatgggcattacttggacgactatcacacaaaaaggacttcatcccttgtcagcctgtcaggcctcggcgccagcctcaacgccagcctccacactgccctcaacgccagcttcctcgccagccccacggagctgccctcggccacacactcaggccaggcgaccgccgtgctcagcctcctcatcatgctgggcacgctctggctgggctacaccctctaccaattcaagaagaggtgaggggctgcatggggaggggaggggccgcatgggtcaaaggctgtgctcatgcacctgctgtccccagcccctacctgcacccctgcgtgcgagagatcctgtccgactgcgccctgcccatcgcggtgctcgccttctccctcatcagctcccatggcttccgggaaatcgagagtgagttggggccgggcggtgggtgacgtggggtagctccccaggcgctgcaggcatagcagtagcctgtcccctactgcagtgagcaagttccgctacaaccccagcgagagcccctttgcgatggcgcagatccagtcgctgtccctgagggccgtcagcggtgccatgggcctcggcttcctgctgtccatgctcttcttcatcgagcagaacttggtggccgccttggtgaatgcaccggagaacaggtgtggagggtgggtgagggtggggtgggcggggcccgggcctctgctgtggggctctgtccacgagtgcccgtctgctgcaggctggtgaagggcactgcctaccactgggacctcctgctcctcgccatcatcaacacagggctgtctctgtttgggctgccttggatccatgccgcctacccccactccc

SEQ ID NO: 99747 - DNA, 1112 bp, Homo sapiens
ctcccagcgccccgagcgccgagcttttgggagcctggcgggccgccgcctcggaaggtctcattttaccttccgcccgggcatcttcccgtccggcgccgcggtgggagccccggaacccctggagttttgggagtcccgggacccctgaccgtgccctgcgcggccgcagcggtttctcccttgctctgacacgggagggccagccctgggtccccgccaggacccaggtttgtacgaccctttacctgcacgtgggccgccgggacggaagcggagtgtgcaccggcccaaccctcccagaccctcgtcgcccacggcctgggacgcgccccagcgcccccgccccccacttcaggatgcagccccggctcccgccccgcgcctgcattcacatcctgcgccccgacccccggggtctccgagtctggaggcgctttcctctcgtgcacgcggcccctcctgtcgcttccttcctccgacagcgaggcacaaacagccgggaccatccggggaccggcccagggagggcgcagcctcccccgacccatgtgtccctcagatactcctcccacccccaattgttctcccttttggaccaacggctctggcttccaggcggccgggacgcggtcccaggactggagaccgttgcctgtcggcccccgtgtgacccggggcgcgtgacgggggtcgggggaactgcgcctgcaatgggcgtttatggcccccaggaccggtctgagagtgagaagagggatgtgcagagagatcccccgccttggcatccgaggagagagggggagaggcccgctcgggcccggtcccttcctctcgctgcagcggggcagggttttctcaggaaaacctggattagcgaacatggtactggtactaactcggtgggaagacatccctggaacgtctctcctcctcgcctctggcccgcctgggcagcccctagcagatgggctaagcaattgaatttctgagattaaggctggcttcccctgctatggggccccctcccgagcactgtcccctgcttccctttctccctagggtggcgtgggttgcatccctcggaagagcgaaggaatgagccaggtcgg

SEQ ID NO: 99748 - DNA, 1325 bp, Homo sapiens
gattacctcaacttgaatatgaaactgtgattgaaaaaagtcaaaacgtgaagaagcatcaaagccaaaaaggcaaaactggctgaggcctctgttgatgctcctcagcctactcgggaacgtgaaggggcagctggcgaaagggcattcctggggccacttgctctgccccactgataaggcacacccgcggtgcactgtgagctctttgaggactgaggccaggggatgcctcctggaacctgccaggcctctctgttctgtgaaggtcagtatccacttgattcctccaggcggcgctccaggtgggaggagcagggtcttctgctgtttccaaaggaatggccatgacactgcttttgaccttagaagtggatccagggacccagcaaagagcgggggtgggttcccagggacaggcagtcctcccggggcttacatgctttttgctaactttcctattagcagcttcagtttatatcacccagagtgcgtgggataatgttgaagtcgctgaagttacgggttattttatgtttttacatgggatttttctgtttttgattggaagaaggagacagaaattggaggaaatgggattattatcctagggaagggccgttggcaaggagttgagccggcccctctgagccctgggggctatctgacctgaagcctggacactgggcccttcaggtcgcaagaaaaagttccctcctaaattctattaggattttggagaatttttgcacagtaagaagctctgggttgctccttgggcttctcaaaagggaaaagttcaattcaaagattgtaaactacgaagtattccagccgtgttgctgatctagttggatagttgtacctcaaaaaagtaggtgagaactggcttcctcattgtcccaggatgtcaaatactaatgacataagagctcacttacgtgccaaaattcacttttatactagtttttcagtgctttaatatttgtaacttaaattttaaaactcgtatttacaaacactactgtaacttcagtgaaactgaattgtgcgattgaagctttttgcttatcatagtatttattacactacttaattcagtaaatatataaaagtagccttcaatttatttttatattattttacatgtttttacctgcagttgtgtatgtgaatttaccttggtaatcgagatgtcatgctaaggaccaataaactatcactgaacaagcaaggcctccagacgatgcctgtgccatacactcagtcccgtgtgctcctggggcgggggtgacgggggccggccctcagcctcccctggacgc

SEQ ID NO: 99749 - DNA, 1012 bp, Homo sapiens
tgctccacctcttgggctccaaactgcgagccttcttagatgtttcaatttagggaatcatcctgtaggcagcaagcaccgctgtgccctgtgttcctccagcccctactgagggcaaagtgcctggcacagaaccaaggagctataactttcccaggtgagactcgcttctgacaataccgtcagtcagtcctctagggttcccatctgctgggttccctgctcatatggcccagggaatgttctctgtaggatgctgcacagcctgtggacctctccagaggagaagaggacaaaggagagagtgtgctgcaaagttactgtaatcatactaataccaacacgctggaacatttactgtgtgtgctagctattgttcaaagactccactctctatatggcagctcctagccacatggctatttaatgaaatgtaaattaataaaaatcaaaatttataattcagtctttcagccacacagccacatttcaagtgcttcatagcttcctgtggctggcagctaccgtgtccaacagtgcagatctagaacatttccattgccccagaaggctctgttgaacagtgctgttgtgagagctttgtttgtgttgtctcatttacaccaatcctgtgaagtggattccgttattttatcattttacagataaggtaccaggggcagcaaagagttaatgacttgacaatttatagcttagtagatgaaagaactggatttcaaacccaggttgaatggctcagagctttttctcttaggcatcgtgctacacttattcctgtatagcatggacaatttgtttctgctctgttgaaggtttaggggaagacattgttaaagcttggccagaattaatctctcatgtttatttggattatctttgttattcttactcacttttcccaagcacctctctacatcctccataccaccccttacaccaccaacttttttcgtaacaaaaaatgatctggccaggcttggtggctcacgcc

SEQ ID NO: 99750 - DNA, 1052 bp, Homo sapiens
tggggctttgaagaaacttggaggaggaggtagggaatgccaagaagcgagggttgcttgatcacacagggtgtatgaagtcagaggatgcctgtccgtaagatgccgcctgagcagagacctgaagggagagagaaccacccatgcagatacctgaggaaaagaacattccaggcaggggggcaaagaatgcagaggtagaagtatgcctggcatgttcagaaaagagccaggagaccaaagtagctggattagggcaagggaagtgatagtagatgaaattctttgctgctccatagggggtcagatcatagagggctgcctgggacattgtaagggctttggctttcacacagagtgagatggaagccaccagcgggttttgagcagagaaatgacatgatctgactctgggtttagcatatctctctggcatctgtgttgaaaacagatcagagagaggcaaggacagaagcagtgacagctgggaggctgttggggtgatctaagcaagagattataacagtttggacccagtgggagcttgggggtgtaagcagtgatctcttctagttatattttgaagacagaaaaaaatggagtcaaaggagaccaaaaaaaatatatttgagcctagcatctgaaagagtagagtccatctgctgaaaaggacaaggagtttggagtttggagagagttccaggcaggagataccaatgtgagctgtatttgacatggatgagtctgctgacctggatgggtccggacgcactctcttgcctgtgtgttctgagaagtgggaaggagagaaaggagctactaaagaaaataagcaagtggcaggagctcctaacttgattagaaaacaggcctaaggacactaggtcccaccctcagagctccaggatcgcctgcaggcttccttttacctccagagcagggtggttcttccctcactcttgcccagttatgaggactaatggaacttgggaatgtagaaacactgtagcttccaggggctgcatgtcatgaagtggagtgacaccaaggga

SEQ ID NO: 99751 - DNA, 1059 bp, Homo sapiens
tcaggcaggcttggctggacccagatctcttgaggtcaaaatcaaggcatcagccaggctaggctcttatctagagcctctggggaagaatcttctcccaatctcagcaaggatgttgtttcctttcgcttgtaggaatgaggtccccattttgttggtggctgtcagacagggatcctctcagctcctcctcccagaagtccttgctcttgtgaccccctccatctcagctataaagaaccttcttgtattgaatctctcacacactttgagtctctctaattcctcttcggctatcagcatgtcaagtttttgcctatcccagcccaccctctgccccccataattcatgtcccttgttacctcctcccaagggtctcatcccattatggctacagttcaaagtcctaaatctcatgggcttaaatatctaaaatctcatgatcaagctcatctaagtcccatgtaaatgaggcttgggagtgtaatctgtctacagctcctgaacatagttctctccatgtctgtggacctacgaaactaaagagacaagtcatctgcctgcagccctcccaacatgcaaggtgggactggcatagacttcaggttcacaaagaggaaaaacagaaggtaaaaaggagtcaccagcccatggcagctttgaaattcagctgggcagacttcagttccttgataaggtttcaaggcctgggaataattctggctctcagctctgcctcggtgctcttggttctaccctgtttgctcttggtttgctctgggctcatggctccaccctctgagcttatagctacaccgctgtcatccttcctttttcagtgaaaggtagtactttgtttgtagctgagcagttttaacagcctgcctcttgccagtagaattttgagggtccaacagtctccttcaattttatatgttatctgtccctttcaatccaaactggcagtgtttctgctcatatgaaatcctcaaaaaccttgttggtcttgcatggattttacagggatttactgcaagttcctctttggcttcctcaaa

SEQ ID NO: 99752 - DNA, 1019 bp, Homo sapiens
gtaagcagccttcttattctcagtgtgaacattatatcaaaaaataatgtaagcaattcataaaggtattaaaatgcttcatctcactactaatctaaaagacttgcactatgttgtcttcacttcctatttgcattcctccccttcccagcagagctttagaaataaccatttatgggggatacaattagagggattctttattccatcagggccttctggtgttcttttaaaaatctccccataatattaaaagcagatcccagattggcctagacatgtagagctgagacatcaaggctttaggccaaggagaagctgcctctgttttcacaaaggaaataaatccactggaacatgaacaagcattgcgggctttgatgcctggactcagagagaatcttaatgttctttttctcagcacaaatcaaggatgccagtaactgccaaagagccagacaatgccaaaggccatggaatacattgggcatatctgagcctgactcagcttttgtagacggacataattgggcaggacttttgattctgtgaatatttatgctataaatcacctattcttttttggatttttgtttttgttgttgtttttaaagggggatgagtctttcctgggcacttatctaacaggaggagaaggagcatatctttattccagcaatctacagtcctggcctgaggaaggtaaggagctatgactttaatgtttttggccatgtctgggtccctcatttgcagatgtcagcatgggtgttgtaattaataatacatcttctatttgaacacaattgtggtacagaaatgttttcctacagcttttctctcgacccacccactttgtagatgaggaaatttatgctaggaagggctgatcacagaactgtacctggtccttttgttgctgcctgaggttagttagctctctcaatgggctagggcagcagcatttccagaaatagaatttgtggacctaaacagaagctggattcatttctcttgct

SEQ ID NO: 99753 - DNA, 1040 bp, Homo sapiens
cattttcggaagctgaggtgggaggatcacttgagaccaggaattcgagaccagcctgggcaacataagcagaccctgtctctacagaaaataaaaaattagccaggcatagtggtgcacacctgtggtcccagctactcaggaggctgaggtgggaggatcacttaagcctgggaggtcgagatttcactgagctatatgattgcaccactgcactcttggcaacagagggagactgtgtaaaaaaaaaagaagaagaagaagacatctggtttatgacatgaacattactgtgttgtttcccaagtttctctcagcttggaattcaggccagagaaccttgccagctttgccatctgctcttctctctagatttcagagacttcttacctgcacacccatgcatttatgatgtaactctccttgatatgttttctatataatgcatttttaaattaagggcttttctaagaataaaccatcctgaaatccattgggagaatcatgtgaaaccccaactggtctgaagagtgtctttctctggatttgacacttaagcctatggaacatagtgagagggtgtgaacactggctgtgcaacctcagaaagggtctacctagtgttgacttctcttctttcacatacagcaggaaaccaaagacagaaaataaactcattagtgctgaaactattaaattccagaaagcattgtccttcagcaatatggacataatggaattttattattacctaattaaatactgcagcttaacttggtggggtctagatcaacacttccctgtgaccagcagtgagaggctacaaaggattatctaaagatctctttaaaatataggttctccaggcccaatcccaggattacaatcagaatttctagggcagggcccacaaagttgtattgggaaaaatataatagaagaaatataatcatactatagaaaatatggaattagagaaacgaaattaagatcagctataattcctcctgtctggcactacccattagtatcttaattta

SEQ ID NO: 99754 - DNA, 1106 bp, Homo sapiens
agccttcttgggcactcactgcagccctcaactctgctgtgctcccctgtggctcagagcaagccctcctgctgatggtatggagctggaattgatctttgttgttacgcattttacctttgaaatggagtctcactctgtcgcccaggctggagtgcagtggcatgatctcggtgcactgcaacctcttcctccagggttcaagcaattctcctgcctcagcctcccaagtagctgggattactggcacacaccaccatgcccagctaatttttgtatttttagtagagatgggttttaccatgttgaccaggctggtctcgaactcctgatctcaatcgcccgcctcagccccccaaagtgctgagattacaggcgtgagccatcgcatccggctacctttacatattttataaactccacaatacaatgctcttatgtttccttaaacaatcaattacctttcttaaagatttaaataatagggaaaaagtcttatatatttgccagtgtatcgcttctcagccttttggctaaggtcaagtgtaatatatttgcccatgttgttgctctctctggtgctcttcattcctttgtgtagacccagacttccccttggcatccttctccttgaaggttggtctttaatatttttttgtggtattaatcttctgatgataaattcttgcagcttttgagtgtctggaaaaaaaatctttatttcgccttcatttttgaaatatatttttgccatgtctagattctagattgacaatttttaccttttgatacttgaaagatcttgcttcagtgtcttcttgcttgcattatttctgatgagaagtccttcatcctaatctttgtacatagcatagtcttttattctaatctctgaatataagcaggcctttttttttccccctctggcagcttttaagattttctctttattactgattttgagtagtttgattatggtatgtcttgctgtagttttcttcatgtttcttgtgcttggattttgttgagcttcctaggtctgtagatttatagtttcctttaagtttggaaagtgtttcgctgttaactcttcaaatgttttttct

SEQ ID NO: 99755 - DNA, 1009 bp, Homo sapiens
ggtcaagccaaccaatttcggggatctgctgtgcacaccgggttctttcttaatccctgctgaggatcttgagaagcagcagcagcaccaaaaccaaggcatgcaccggattcaaggttctttttgttccagttttcagattccaaactagaccccaatggattgcaaggatgaccatgaaagccctgtttaaaacttcaatttttaaaagcaaaagccattacatgaaagtaaaacaattcagaaggatcacgtgtgcttccaagtgtcttcatgtggcctttctccgagtttaaccaccaaggactctgagagctggcaggtctgagtaaccctggtgactattcttttcaccttatcaaaacctgagctaaaaacaacgcatcagccaatgacagcagagggtggcagggctgaggacccaatattcatttcccaggctggtggagagtgaataagtatggttacaaaattaaacaagggaggtcaaagactctttccaaccttacctgatgtcttctggccaaagcaaggaagtctcatggaaggtgttgggtggtgatggtgcaaaaaggatcttgaggagggaataaaaagcagcacccctcgataaaggtgggggagagaagatatggggaaagctctgaattcctcaccaaaggccaatctcagaggtgagtggaagggttacaatctatgctttggccaaaggtgggagtggaggagtgtggggacaggatgatggcttggaaggggcatcatttaagacttaaaccaggggtgcaggcaaagcaccccacacacccagcagtagtcccacaggctgcgacctgaagccttcacatctactctaacaagccccccaggctagacggctgttgttgcagggaaagtgggaggtgggagggtaaggggagaaggcagagaccccaggccgtgtaatcagcagcaaaatgactgtgtgatgtgtcttttcacagttgagttagatgtgccccaccagttatga

SEQ ID NO: 99756 - DNA, 1067 bp, Homo sapiens
cgggcttgaggacgaggccgggcggcgctgtggcaaccctcaccctgcggacacgcgctcccaacatccggtccggcggcctcgcagcttaagaagtggggtccctgtggccgtgcgccgacccccaactccagccgctcccaacgcccccatccgctctcggtgcgcgcgccccctccacgcccccgcccccgcccccgccgggcccgcgcgccgcgccccctcccacccggcacgccctgccgccccgcccggccgcagctagcgtggagccgccctgcgggcaactgagaccctcgcagctgcaccgtcctcctccgccgccagtcgtccgccgccatggacgtgtaccccccgcgccggcaggggctgccccgcgctcggtcccctggcggctccagccgcgggtcaccctccgtcaggtacgcggggcagaggcagccgaggggcggccgggcgggggatgcgggctgtcggggtccggcgacgcctcccgccgcagggcgtggtccgacatggcttcctcgggacggttctttgctgaacggctcagggaggaatttttcccaggaacggcgccctctgtagaggccccacaatggctcccctttggacaaccccgcaacggtttccccacaatggctcccccacagacaaccctgcaacggtttccccacaatggcttccctagggacagcgattccctgtgaagacactgttatgacgtcctcacccccatagaacgtttctcccaggaaggattcttctacacagaaccccacagaggcttccctatgaataactcactcgccttccccagggaatgtttccctcagaaactgctactctacagacctcacacctccacacacacaatagctccctcgtgtagaacccccaaatggattacctagaaagccccctcccgtgggtctctagagcctttgcccttgacaacggcttccttaaagagtgtcccccgccccctacgtacataatgacagcatctcccctgtcgcgcgtttccccagctccccctgcctcagcctgcatcgcgacgccccctc

SEQ ID NO: 99757 - DNA, 1045 bp, Homo sapiens
aggctgatctgttttccccagtgcaatgtaagttccatgagggcaggggcctggagcatagttcacaagtccagtttaggctgatctgctttccccagtgcaatgtaagttccatgagggcaggggcctggagcatagttcacaagtccagtttaggctgatctgttttccccagtgcaatgtaagttccatgagggcaggggcctggagcatagttcacaagtccagtttaggctgatctgctttccccagtgcaatgtaagttccatgagggcaggggcctggagcatagttcacaagtccagtttaggctgatctgctttccccagtacaatgtaagttccatgagggcaggggcctggagcatagttcacaagtccagtttaggctgatctgctttccccagtgcaatgtaagttccatgagggcaggggcctggagcatagtgagcagtaaatatctgttgaatgaaggaataaaattctgtaatttacttcttatgacttttaaaaaagtcgtctttacccacatgactgccatatatgtcttctgtccttatattgctcctgaacttctctgtcatccactgtttggtgggcatcttttattgtcacctcatactgaatcatgtataacaccaaacttctatcctcattgaaaaaaatagtctttttctttgtacttccttatttgttttagctaaatccaaatttagctaaccaaaggtcaaaacttagcagtaatctttggctctttctacctgtttgtttttttctgctctcacactgtataaatttgtttctttccatttcttctgctgccattctaatgtacctaacccttcacctcattgctgacctgcttctgttgcacttttactgttttcttacacctgcagagtctgcttcacactttgtcatatcagtcttctaaaaaacatgtgtctctatgcacacgtatgtttattgcagcactattcacaatagcaaagacttggaaccaaccactgatgggctatccagcccatcagtgatagactggataa

SEQ ID NO: 99758 - DNA, 1051 bp, Homo sapiens
ttattctgtcatctaggctggagggcagtgctcctgggctcaagtgatcctgccacctcagcctcccaagtggctgggatcacaggccagtgtgcccagccaatttttaaattttttgtagagatgaggtctcactatgttgcccaggccaatctggaactcctgtccccaagagatcatctcgtcttgacctcccaaagtgctgggattacaggcatgagccactgcacctgacccctattatcttcttttgaaatgagtcatctgctaattcacttcataaatatctgctgaatattgtgtgttaggtactgtgcccttccttgaggatatgaaggtgtgtaagaatcaggccttgctttcccctaagagaagttataactatgaagggaagacagctacgtacacagcaattagaatttcataataaaaatacaggcaatatgtggtgctggactaagatgtgattgacttaactcttttgggggttctggtggaagacatcacagaagagaggacatttgggcaggtctgagaggtttagtgtgagtagaccatctgggggagaaagacattccagaaggaatgaagagttgatgtgcaaaggcaaagaattatggattatcatacttagtgtattaatttccaagggctgttacagtgaagtgccacaaactcatggcataaaacaacagaaatttattctttcatagttctggggactagaagcctgcaatcaaggtactggcagggccacgatctctctgaagactctcagggaggatctgttccatgcctttctcttcgcttctggagttgccagcagtccttggcattttggcttgtagatgcatcacttcagcctctgcctccgtcccttcaatctcatgtgatactctccctccctttgtgtctctgtcttttctcttaagggtaccagtcatagtggatgaacgagtatgacatcatcgtaactttgttgcatctgccaagaccctgtttccaaataaggtcacattcacagggacccagggttaggactttgacatat

SEQ ID NO: 99759 - DNA, 1051 bp, Homo sapiens
tgaatctctggatcaaaacttgcctgaaggtgtagtttttggtttgtgaagtactgcagtccatgtttttcttaagccggttagagttggatttccttccacttacagtagaacaattcctaacatacagagggagggaggtagagccagctgactagggttagtcagttagggcttctgtaacaaattaccatagactttacctcgatgaaaggttcccaagatgggcagatgctttttatttaccgcagtatagaggacaggtatgtacgcaggagaaaaaggagagtgtgtgtttatgatcagaacagttttgatcatataaatgtgattaagtgatttaatacatttgtaggttatttttatcttaagaaatacagaagtgagtacctagtgttatgattgaacagaaatcttacactggtttttcttgttaatacaatcatatttccaaaactgaaatgaaactatagttgtactttttgaaatacttgtgtctggaaattggccattaacttactatgatacttgtttcccacttaaatagtactctcctattttctgtgaattcccaaatgcattttggcaagtgacttccatctatatactatatactgttctcatctttcatttttactttgttccttccattttcccttttctttctatacttcaaactgctctgttattattaacgtgacttccttcttatgagggctttcttatatttgtcttgcttttttcccacttttcattttctttatgtcatatctctttaactgcttttcttttatcactgagaccatggttcgatatcctttcaattaaaacattgaaaaagttttttttctttttctgctagtggattgatcttcgagtgtttgagacaggggcttaccctgtcacccgtgctgaagtgcggtggtgcaatcactgctcactgcagccttgaccaccttgagcctctgggctcaagtgcctcccacctcagcgtcctgagtagctagaactgcaggtgcgcaccaccatgcctggctaattttttaatttt

SEQ ID NO: 99760 - DNA, 1096 bp, Homo sapiens
gctggactgagccacagttaagagactgttgcagtagactagactaggaggaggagaatttgaattagagcattggccttagcaaggggatcaaagagggaaaaagatgagattggtttgtaggctgaatgaatggaggtgaaggtaaagaaagagtcaataatttttggaagatagggtagatgacaaagttgtttaaagaaagcataaaagaaggggatttaatgacttaaatttttgatatagggaatataagtctgaaacatgggtctagccttgagctggaaatacagcttgggcagttagcaacatagagatggtagatgaagccacggatgcagatgtaattacctgtaggagtatcatggagaccttgatctagccaggacaatttcagggacagcccaggatttgagcaaaggacttgtccattgcttttattgagtctttcaaggttgatgatttattattgtttaaaaatatgagggagccatattatggttgttttaattatccttgtggatgggtatagtagaatgtcctaaatattaaaacatatagaattcatttataatgttatatcatttataatggttgtagctttattattatttttaataattaggacaaatgcttaatattttacattttagatcatagtatgagtcaatattcatgatgaatctttttctttgtatttctttcgaatttaagaaattagatcaaaattttctgatagagacgaaactttggaatgcagaaatatttttagtattggtgccaaaaatttaagtcacttactttaacacttagaaattacaagatcatatatggaaagtttgttattggtttggtgtattagaatcatttgtggagcttttaaggacaccaatgcagtgctggattccactcaagaggggtttgtgttagggccacatcatctgtattttttaaagctttgtggatattttgatgttaatctgagaaccctgtatcaggggtttgggtaggggctttgttagcatattttgtgtcttgcttatttagttaacctttttgtttaaagctgttaaagcaaaggccagaataccagcag

SEQ ID NO: 99761 - DNA, 1028 bp, Homo sapiens
ggaagaaaaatatctggaaacagccatgatgaaggaaatagcgtccttcttaaatattaaacatttttatatagtaacagatacttgctggtggcagtgctcatgcctgtaaacccagcattttgggaggccaagataggaggattgcttgaggccagaagttcaagcgtgggcaacatcgtgagactctgtttctacaaaaaataaatttaagaaatttatcgctgggtgtgagggctcaagcctgtaattctggtgctttgggaagccgagatgggaggatcttttgaggccaggaatttgagaccagcgtgggcaacatagcgagacctgtctttaccaaaaggaaaaaggatgacataaaattaagataagatttaggtatgttttgttcattcctgttggttttaatatttttctgtcttcttttttaatgtatgcaataagtatttgtttcatctaaatttatgcaatctgaatataactagtcattttctactggttatagtgtttgttaatgtacccattatgtttaatttgtattatattaagaattaagaaatattaatatatgaaaatatataaaatatataaaaatatatgaaattaatatagcagacttaagttttctttcttgatttaaattacagactaactggatcttctgggtttgtgacagatggacctggaaattataaatacaaaacgaagtgcacgtggctcattgaaggacagtaagtagaaatggctgacttaatttttgtttttttagcatagaagtcagtgtgacattagttttcccacaagtaaaattaacaatctgtagcataaagttcttaaaacattacttgataacctttcatttgacaagtgaattttatcttagccttcattaatttaaaagtttcatgttgatttaatgctgcaaatgaattgtacacaccacaaatttgtgtatttccaactgtaatagttcagaaacggttacacacacacacacacacacacacacacacacacacacatat

SEQ ID NO: 99762 - DNA, 1050 bp, Homo sapiens
atggtagtttattgttggcagtttgttttattcttttccttcccagacttccaagcatgaattcagcaactctgtaaagctcatcattaggaggctaccaagaagaataggatagtcctcccacccatgaggagctaacagttctgcacaaatctcctacctcctttaatttctttgactttatgagttatttattcttatcctcttattatgagaatccagcagggttgatttgatttcattacttgtacctcgggctctagctatgcagtgttgagcaaacccatttggactgaatccttaagtactgcagttacacttgtgaatgaactgagacagtgagattcttaaacttgtgtgggaggaagttatgctaagttaatggaagcgttgcgttgtgttaatgtaattttccctgctatttttacagttttgatatgtgtccaaataactgctcaggccgaggagagtgtaagatcagtaatagcagcgatactgttgaatgtgaatgttctgaaaactggaaaggtgaagcatgtgacattcctcactgtacagacaactgtggttttcctcatcgaggcatctgcaattcaagtgatgtcagaggatgctcctgcttctcagactggcagggtaggagcttctttcatttttattttttcttccatttatagaacattcccactaaataaattatagattgactttattcttagcacctatataatttatattaatcaaatacgaggtagcatttaagcttgaaacatccctctatctagctgcttatgaatttcggtttcatacatgtgtggtcatggtctttagaattatggagggttggccattttttgcatcctgtgtgtgaaagttggagaacttggactcagtcataaaaggatgtagcagagagccaagctgggagatgggacaagagctgacaataatgatatttcctcagaaacacactctaagttcagagaaaattggtgtcagttatacattagaatcttaaaggagttagctaatagttatctacagaaataa

SEQ ID NO: 99763 - DNA, 1127 bp, Homo sapiens
taaccaccagtctactctctatcttcatgagatccacttttttagttcccacatatgattgataatgtgatatttgtctctgtgcttggcttattttacttaacataatgacctccagttcagtccatgttgctacaaaatgactggatgtcattctttttaacggctgaataatgctccattgtgtatatatacaccacattttctttatctaattatccattgatagacacgttgattccatgttttggctattgtcaattgtgctgcaattaacatgggagtgcagatatctctttgatatgttcatttccattcttttggatatatacccagtatcgaaattgttggatcatagggtagttctatttttagtttcttgactaaccttttttaagctgagaataatattgagcttttgttcttctctgttctcagatttaatcttttcaatgtttttaaaaattttgtttgcatttttttcctaggataaaatttacatgtatggaggaaaaattgattcaactgggaatgtgaccaatgagttgagagtttttcacattcataatgagtcatgggtgttgttgacccctaaggcaaaggagcagtatgcagtggttgggcactctgcacacattgttacactgaagaatggccgagtggtcatgctggtcatctttggtcactgccctctctatggatatataagcaatgtgcaggaatatgatttgggtaggtatattttttccagtagatgccttttgaacatcagatttaaaacctctaagcttattattttgactgtttagaaaagttcaacctaatcttgattcggtactttatcttgaaacatagtaaacactgggcccaggcgtggtggcccactcctgtaatcccagcactttgggaggctgaggcgggcggatcacctaaggtcaggagttcaagaccagcctggcaccaacatggtgaaaccctgtctctactaaaaatacaaaaattagcctgtcctggtggcgggcacctataatcccagcaactcaggaggctgaggcaggagaatcgcttgaacccgggaggtggaggttgcagtgagccaagattgcaccactgcactccagcctggg

SEQ ID NO: 99764 - DNA, 1554 bp, Homo sapiens
acggccatagcagtgtttacgaccataggaccagggccctatacgttcatggtggctacaaggctttcagtgccaataagtaccggcttgcagatgatctctaccgatatgatgtggatacccagatgtggtgggtactttttcttgagctttcactttaaggtgtaaattctgtagaggcaattgtggagaaaatattgtgctatctttttgttttcatgcctggcagataattctgttcggcattatatatagagaaattgggaaataaacagagggtaataaagtagctagtatttattttgttacgttattctgtaattctgtagcaggttggttagaaaatacttagagttttttaacaaatgtaaagcaaatttgagttacgaaataatgtaattataaagcgatggtttctcctctttttcctcacatgtttgataccttgctatgggtactgttttatattctgtcataaaaataatcatttttagtagctgtgcaatactccattttgtgggtatgctgagactatgcaggtgaaagttttggtttctttctagtttttatgtcattaagaaaccattatgcattaagcttctgtcaatatttcacatgatttctgcccagaaactggaattatatagctacggggtatgaagagtttaaggttcttaatatattttgccaaaactcttacaggtctttaaaattatctgtatttattgttgaaaaacttacttttatgtagggaaaactctggaaggatttgtacatttgggtctgaggttaataaagtggttgtgcttgcattagcagatacataaatattctttaaaaactaaccttgtatttattatttctaaataaactcaaaaggaccattcttaaggacagccgatttttccgttacttgcacacagctgtgatagtgagtggaaccatgctggtgtttggaggaaacacacacaatgacacatctatgagccatggcgccaaatgcttctcttcagatttcatggcctatgacattggtaagtttcccaaaaccattttctcttcaggcatctttttgcctatactataagcagcatttaaaaggagactgaaaatattgccagttcaaaatgatcaggccatttgaaagaggtccaaatggtattttttatattcatttgactaatgttacacatctggtaaaaattatttctacattaaattctttttgaaatcactcctgttaattgcttgaatgctaatttttaaggctgagttgaggtgtctagtctctcctttgtcatgttatgcctacctggtagtgttacatagttgcaaccaccagcattgtgttaaaattggttcacgtattagctttatctcattccctagaaaactggtttctcacatggtcttggtgtggcaatataccagaccagaagagggcagtatttgttcatgcaaagcaaatgcataccggatgatctctttcataaaaattgtcagatgttcattttaaacaaattattatttttttgattgtggtaaaatacacat

SEQ ID NO: 99765 - DNA, 1069 bp, Homo sapiens
gtgtatggttttactatgagaacatttgacagctagagactaaaatggaaggatttctggccaccttgctaatttgaagtgttattataaatcataatcttgaacttcctcagtacagaagacccttaaagctttctagcaagtgcctcttgagattttcatctgaaacgcagtgggaccattttgtcattatcatgcctgtgggagcctggcctcaactgtcttcgtttgtgttcctagttctcctagcacaggatttggcacataatagacatttgctaaatggcaggtattagtacagtcataactagcaaacaaatgaattttttataaaacattcttaggttttattcaaactcagagaagttgagactttaccataaaatataatttaatcatgagtcaaaattgggaatgccttgcctgagttgtaatgttttcattttatgtgattccagtggtatgtttgaaccctgatatgtaagtatctgtgtgtgtgagacaggattgggtaggtggcaggagaccctgagggaggccagctactaaaaggccatagttttggtttaattttatgaaataatttactgaaaaagaaacttcgattcacagcatttcttcatgctttaagtggatcaacagcattgggtgagctgtgccttccttggttttcattgaggttttgagggaggcaggaaggaggaggagagatggctgtgacataccaaggcggcaggagatgcagctgtgcctctcagttgcctgctccatgtgtctctgagagactctccctaactttgcagagcccctgtgcaaccagatggattcacaattgctgagaacaccaactgtactgggaagaggaggttgcttatttggtttaagcaacaaattaactagttgaatctagcctgcttaatgtggtactgagtaagcctatagcaaggtaaaaaatgaaacctggccgggcgtagtggctcacgcttgtaatcccagcactttgggaggccgaggcgggtggatcacgaggtcaggagatcaagactatcctggctaacactgtgaaact

SEQ ID NO: 99766 - DNA, 2397 bp, Homo sapiens
cctgtctcttaaaaaaaaaaaaaaaagtatagcatccaattgttatctgagtctctagtaaatttcttctctccctttttcctcttagcaccatgtatgtgttcggtggtttcaatagtctcctcctcagcgacatcctggtattcacctcggaacagtgtgatgcgcatcggagtgaagccgcttgtttagcagcaggacctggtattcggtgtgtgtggaacacagggtcgtctcagtgtatctcgtgggcgctggcaactgatgaacaagaagaaaagttaaaatcagaatgtttttccaaaagaagtatgtttttttttctctacttagattttaatgaatttgagacctcattttatctgaattgtgaaggaacttagcatatgtatactttttatgtttaccttatccaaaattattcagtaataacttgtacaaagtgtttttggatatttgataattggtttgtaaacatctcggatgggaacatgccatgtggctcctagaagctgtctgcgagtgatagagacataaccgttttggcattgcataggctttgcatactgaccccagattctggctgcagttgctctgaggcagtgccatccagtagaactttatttttgatgatggaaatgttgtgtgtctggactgtcccgatatggtagccactagccacatgggctatcagatacttgaaatgtagctagtgtgagtgaagaactgaatttttaatttaatttaattttaatttaaaagacatttgtggttactggctaccatattggatgcagatctaacattaaggatgaagttaggagagtcagcccagaaaagccatgttgaagtaaatttttttggtggagggagggagagctgctgtccttgcaaagtatttttgtctagcgtctctagttggatacaacagtgatatcaagacagacagttactgaggatgggcgatgatccctgcttctagaacctcccccatgtttttcaagctgtttccgtccttctgcctgctttgcttcttgtcctatattgctgtgacatagagcacaatgcggtacagtgaagcgatatattaaaaatttattttttgttttattttattttatttatttatttatttatttattttgagacagagtctctgtcgctcaggctggagtacagcagcgtgatctcagctcactacaacctccacctcccaggttcaagtgattcttatacagtcacctgccaccatgctcggctagtttttgtatttttagtagagatggggttttaccatgttggccaggctggtctggaactcctgacctcaagtgatctgcccgcctcagcctcgcaaagtgttggaattacaggcgtgagctactgtacatggccagaaagttctttaaaagtaagaatgttgtctctacatcaattaatttaaagtatgttggctgaatttcttactagtaggattggtgttgcagttaacttgagagttatgatggatagaagcagctttcattcctgggatgctgctccaagttaaacttttcacgaatataaattctcagtaagaacacccagggccagccacaggggctcatgccggtaatcccagcactttgggaggctgaggtatggggatcacttgagcccaggagtctaagactagcctgggcaacatagtgagaccctgtctctaccaaaaacacaaaaattagccaggcatgggcatggtggtgcacgcctatagtcccagctactagggtggctgaggcaagagggcttgagcccaggacgttgaggctgcagtgaggcatgagtgtgccagtgcactccagcctgggtgacagaatgagattctgtctcaaaaacaaaaaaacaggccacccaggcaacccactcaggttcattggtgggctggtgggtgctggagaaccaagattaccagaacttagcagggttagcttgtctcttgaaagggataaaatcagtgaaatagttaatttttaaaccaaattttaaaagttcaaattaaatatgcatgtttataggaaatagtgttgaattaccttaggtgttcatatcaacccatttgctgtcatctcacctgagacttcagttccctgtttcaccccactttctgggtgggcccagtccttgggataatgaccaggacaggaagagcagcctaaggagccgactgctggggtctttgtgagagcggcacctgccttttcctgtttgtgaattcccccatgtgccatgtccacgagatggttgaacagatgagacaacatggttgtgcagcttctctcttttttttttttcagacagagtctcactctgtagcccaggctggagtgcagtggcgcaatttcagctcactgcaac

SEQ ID NO: 99767 - DNA, 1003 bp, Homo sapiens
attcttgcagtttttaccccagccctccaatatgcatattcatttgtctgctcttcacttaggattttagttttctaattgttcttcagaaggaagtgtaccagtctaatattggcaccaaactggtgttttcatctaagacataggataagtgacctcagaatatgctttttaggatccgggagatatcaccagtaaacattttaaaattcttgtattctgcatttggtccttaataatgtgtcagaggctcccacatcctaatgaagtacctagaatttaaattagaaaggccatttcggtattcagtaatttgaactcataatacagtagttttgtctgatttctaaaattcttttctttctcttttccccttaatgaaagaaaatatctgtggcattggctggcatttggttggaaactcatgtttgaaaattactactgccaaggagaattatgacaatgctaaattgttctgtaggaaccacaatgcccttttggcttctcttacaacccagaagaaggtagaatttgtccttaagcagctgcgaataatgcagtcatctcagagcatggtgagttaaaatcctcaaaacttaagtttctggttatccacctttctaccaagggcatgactgcagcttgcatgtggaaggctgtggatatgtgtgacgtgcttggcaagaaggggagtgctggtgaacgcagcctgagggactgtgggtttgtgctgtcagagtctcttcctcttaaaatttttaatactttgtatatataagatctatgaataattatatgggggatgaattgtaacatgtatatgtgtacataatctggtgacatcagtagattatttcatacctgttttacctctggattctgctaggggagaaagagaggtcactgataattagctaggttggattaagccacctgagttccttggagttaaggtattataatagtgcataagactgtataattaccactaagaagtgtacat

SEQ ID NO: 99768 - DNA, 1100 bp, Homo sapiens
ggtggatcacaaggtcaagatatcaagaccatcctggctaacatagtgaaaccccatctctactaaaaatacaaaaaattagccagacgtgatggcgcacccctgtagtcccagctacttgggaggctgaggcaggagaatcacttgaaccggggaggcggaggttgcagtgagccgaaattgtgccactgcactctagcctggagacagagtgagactccgtctcaaaaaaaaaaaagaaaagaaagaaagaaaagtctttgaccttagcggacatggtgggagctctaagtgtctctcttgggtttcattcccagcaaaccacagtgctaagcagtgccggacaccatgtgccttgaggacagcatgtggagattgcaccagcggcagctctgagtgcatgtggtgcagcaacatgaagcagtgtgtggactccaatgcctacgtggcctccttcccttttggccagtgtatggaatggtatacgatgagcacctgcccccgtaagtgaaaaagggagccctaggcacttatgcatgccctctgtataggcaacaactcagccatgaggctgtgctgtcagcctctgaacattttagaaacaagactggacatgacctctgctcaaacctgaccagagactgccatcgagaccttgctgcctattgagaaccttcatacagaatcaggcacattgacagtaaataaatgtaagatagatcacagagtacagaaataacttgtccaacttcagtgtcatattgctcaatccatgtaatatctccatatctgaatttcctaatttgtaaagtaaatgctttccaatagataatctctaaggtcccttttgccttcaacatcctgggattgagagaggagggaagggtcatctctgttatgtattgggcaaaatactgggctctttacattcattatctcttttaaataatcaagacagaataatatttttgactcaagccagttgaatagtctgttaaaaaaaaagtaaatacagtgaattcagatctacctgtgatagtcaattgcaactttttttttttaatagctgaaaattgttcaggctactgtacctgtagtca

SEQ ID NO: 99769 - DNA, 1030 bp, Homo sapiens
gaggttggttaaagtgatgcctaaaatggatagatcaggaaataacaataaaaacattaatgataaaaaggcaactgccagaagaactgaaaagtaacctagttcaaggtgggggtccctggagagaagccttcagaagagcagaggaagagcagggaacattgcttttcatgactagcctttcagtaccttttgatatttcagctaagtatgtagttctctaatgatttctaaattgttaatgagtgtgatagaataggaattctggagaatggtcaaaaggaattgctaggagaaaattagggaaagaaagcacagagcagtattgaggtgggaggttgggagcagacagatggtgagtgttcgtttgcatggcaggaatgagtggctgaatggcattaactggccatggggctctgaccagagcttgggtatacagtttctgtgccagcacaaaccagcattaggtgcgtggtgtgtgaggccgggtgatggtcatatggatctggtccagagctgtggtcttgacatagagttccatgtatgaactttggtggtggtggtggttttgtttcgttttttaagaaaaaaggaagagttgttttatgtcacagccaaactcaaggaggtgacagcacaagacccaggttagaatgtacttagccagggctcacggaatcttccatcctttgcaaagccaagaagagtagaggcctcaaggagaatagaggagcacatgggctccttctgggctgagctctcacccttggtggggccgctggtcccagggggtcgttgggagcctgcggagattctgcccagtacatacataccttgcgttttctcggagcctgacaggtgctgccttgaagcggaaagacttcacctcacagggtggccagctgtcctttctcttcctctccctgtcttgtgtgctcatgataatggatagatagacatctccatggtagaaataatgcagccctttctgcagtccatggttccacagcatatggtcagtagacttaga

SEQ ID NO: 99770 - DNA, 1101 bp, Homo sapiens
cttgtttatataattctccagtcttatctaaaacttttatgtgaggaccatggctcatattccgcagctttccttctctcaaggagctaggactggttattgtgataaatgaaggaaaagaaaagaaagtgggtttctgtttattgtatgaaattgatgtaactttgtatttctgattataaatggtagccagagggaggacacaaaaacttcaaattccaagccccataatatattatggcctgaatagtgttggaatttatttatttatggaatgtcaaaaagaaaatagggccatcaaaaaagcaaacagtggaagtctattttctggcccctgtgagtctggctctaaaaacagtgcaaggggttggggtttggtgggactaggaaagcagatgctcgtcatttaccttcctgtgtttgtcatgagaattgtctgtactgggattgtcaccttggtcagtaattgtttcgtttatagtaccattgtctctccaaagagggctgagttccctaaaaaaaagcaggcagcgcaccacaacatctggctagtagcacgtatattatcggtgatagtaaggacacaattctcgtatttaatcaatttggaggtatgcattttttcgtgggctaatatccctgaaatcatgatgcatcttatggtcagtgacttaaaaagcattatgtcatagttaaattgacagtgtttttcctaaattatacacagaataatgcctttttcagccaatgttattttagagttgatgaaatatgttgcatttttatattcttggtatgaagactattaactgtataataaaattatttaagttctgatgacgtagtgtcagatgatgttcagtgtagcaaaacgcgaggcacaattttttgtaaaaaggacaatatcttgcagtcagtacacactgagtacataaatgttgaccaaatgaagagcacagaatggggctgcccacctggaggcagagccatgaattggtactgaggcaaacaaggagagctttgtgtgtgggtggaggcgcagggagggagcgccaggcttcatggaggcatgcgagggtctccagggtcaaacagacagaa

SEQ ID NO: 99771 - DNA, 1114 bp, Homo sapiens
cccagcacttaagcacagaccccaaggagcattgctgcatatattagtcgagtaaatggacctacagctttaaaaaatgtaagaatgttggtattttaagaaaatatttataaaaatgcccttctagaacagagccatatctatccaggccaagattctgtcttctacagtagttccaaggaggcagtttgaagtaaggcctacttgtatcccaaggcataacctcaaagcttcagcatcatgcccagaaagatctctaatatccttaatgatatgtgaacggccgttcaccatgtgctaggcgctgtgctgtagtatctcatttgatcccagtgacaaccttatgggctaggaacacatttcagagggaggacacggatgcccagagacttcaaacacctttcttaaggtcacacagctgtagactattggagcaggagttcacatcaagcctccctaaatcccgagcccctgtttgtccctctactctgcaaaatttcacatttgtttgtttttagcttataccacctctctgaaggaagggttctttcagttcctatctgccgtataatgaggcataggtttttgttgtcctgtgaatccttggtgccagtttcagtaggaagaaagcaagcctgactttagtagtagaaatacgaggagatagagccacaccattttatgtatttgacaagtcgacgtcatagcattaaatccacagtacttttatttttatctttattttcttattttactttaagttctgggatacatgtacagaacatgtagatttgttacataggtatacatgtgccgtggtggtttgccgcacctatcagcctgttatctaggttttaagccctgcatgcatttggtatttgtcctaatgctctccctccccttgctccccacccctgacaggccccagtgtgtgatgttcccttccctgtgtccatgtgttctcatggttcaactcccacttaagagtgaggacatggagtatttggttttctgttcctgtgttggtttgctgagactgatggcttccagcttcatccgtgtccctgcaaaggatatgaactcatttattttatggccgcatagtattccatgg

SEQ ID NO: 99772 - DNA, 1055 bp, Homo sapiens
tctaccaagcactcaccactgccattcctgtgacctacagttatgaattagaatttcaaatcgagccaaagtacagcatccagaagaaacccacttggcgtggccccttccctacagttcaagcagccctctggaaggggactgcgagacctcagtggaaggtagcaagcagtaccacccgtgtcactggtgctcagagagtactgttagctctctcctgccctttttcattatcttaaaaactgcaatgtaccttttttatatacctgaaattgatggttcttataagcacaaatgaccgttaagttgtccgtatacattaaagcttgagtatcacttaaggtaattttgttttcttctgccagactgttcccaaacccattgcactggagccgtgttttggcaacaaagccgctgtcctctctgtgtttgtgaggctccctcgaggcctgggtggcatccctcctcctgggcagtcaggtgagtagatgcggtccagcgaaagacaccttctaagcatgtgagggagctaagcatgggatacttccctttcctagagaacaaggttataaaggtgataaccaacagtgcctgcccatgccatggcaaggattcagtgagataacccattttcacctatatgcccaaaactgttttcccgaggtcatcgtcccttcctggggggacgtcccgggacctcctcaccgttctggcctccccagcctctcagtgctcgtggatgcctctgaccacaccttcctttgctgtcggagtttctggtccccctttgcctctgctgctctttccctgtctcttttgccctgtcctgcccctgaatctgggtgtgctcccttcaccctgcatgttcttcctcagttgccttctccactccacaacttccagccatctcccctgggctggtgtttcttcaattggtatttctagccctcctgcatttcttttgctttttcactgttttaaatataaggcacaaacacaacgataacataaaggaaacgtctgaaaatccacgcacagttctgctatcccacaac

SEQ ID NO: 99773 - DNA, 1050 bp, Homo sapiens
gcctcccaaagccaccgcatcttggtccctgccattcccttagcctggggtgccggctcatcttttccctctaggatttctttagactcagcatatcttgcaaatgtccactaggtggtgctcactcatcgccagcagggagctaacaagccgctcctggggttgggagggcggaggtgccccacagcggggctgacagcctcagcggtcctcttcagcctccagggagccaaccacaggcctgcgtgactctccctgtcatctgcaccctctctggggtcctctgcccatccagccacccgcacagatctgtgtcagtccctgccccccaacactgatcccctcctcccagccctaccccagcctggcactcactggttcttctccagctcaagcaggagctcctggccttcagcctccagggccaccagccccatgtctggcttcgagacctgggcaagaaaatgtgtggagctgagatggtggcctccaggcctcctgcctgccagggagtaggtggcctgtggagccggctggggaggaagttcttggggagaacgtgggctggggagtcagcaggaccccccacatactatggagggcgtggaggaggtgagaacatacaaagatgttcccaaactcaggatgtttgcagtcctgacaacagccacttggaagggcgttggcacagcctgccaggcacaccagcatcctccctagagaccagaggtcccagaaaggtgcccctcccctggcccgccctcttctttcatgcccagaaggggcatcaaaagcaggggaagacagaggggtgctgaggacattatgggggcatcgggtagccatggtcagggcctcctcagagcctctgctacctgaggcttgtttccaaatgagctgctgctcattccctatagaattcaaatttgactcctccacttccaattttggcaaactgctccctcttccaaagttttcctgggcctccagcagcccccgtccctccggctccgacacctgcttcactggacccacgaagtaaacatggac

SEQ ID NO: 99774 - DNA, 1798 bp, Homo sapiens
gctcagcaagtcggggatgtggcacctctttgtgagcttgcactgtggcagcatggcaggtcccacactccaggccttgctccctgtcctgaacagaagtccatgagctcatacttccctgtacctgcccatggtgtgatggttacctccgtggggcagtaaccaagatgggagctgctgaggaactggtttgaagcctccagccttccctcctgcctccctaaccctctagaaaaacctgctggagctacacacaccgtgtggataactcctagcacccaccagtcccagaccttgggtttcaggctgctgttcctatcaggctcacttcaggccctgccccatgccccactcccagcctggcagaggctagggtgtcagtttcgtggagctccagcttcagtttcatgtccccgtcaccagcctcttcatgaccttgcccttcaatggattgacacccctcaggcctttacctcttgccatcggatctgctcaaagcctaccctgccctgcccccctcactcctcatcaccgcctctccctgccttccttttgggagaaaacagccagaccttcttttggaagcctgaattggaccctacttcattcactcttggagccacattggggtggcccacaggctggaggcatgtccagctcactgaagaatgggtttttgagacctgtgcacccctgctagggggaatgggtctctgggctccagaagggccatccctgcccctttcttgggggggcttagcatgcagtccccccatggtggtgggtaggggcccgtgagtgccaggggcaggatcggggaggctgggggaggtgctgaccaattgcccctgtccccgggcaggttatagtgtcaagtgtgagtactcggcgcacaaagagggcgtcctcaaagaggagatactgctagcctgcgaaggtggcactggcacctgtgtgcgcgtgacggtgcaggcccgcgtcatgggtgagagcgtgaggctcctggttggaggagggatgcacaagctcgactgcgagggtttctgtcctcctcagggaaccaaggctgaacaagggatccttgcccggctcaggggttctcaacctccttggcaggtccctacctccagctgatccctgagggaaggggaggggtccccttagtgggccgcatgggtggggccgggggccagcatggcactgacttgcaccctgccttgcagaccggcaccacggcacgcccatgctgctggatggtgtcaagtgtgtgggcgccgagctggaatacgactcagagcacagcgactggcacggctttgactgaggcccgaggccccgcctgccccgggcccctcagccttaaaccccgccttgtccccccgacatgctgcgtgatggtgtggcttcctcgcccctctctggggtgggtgtgggggtggagtggccttgcccacgcctctcacctctgccttcatttgtgctgccaccctgcccctccctcgtcctcctctcccacttcctcctctctgtgtgcctcagtctcctgccggaagaaatgggttgagcccgaaaggaggctgtctgaggaagggagagggagggcctggggtgggtcccccactccccaccccaagccacagggactcccaccagggtctgggagaggacggagctggctctgtggcgtcgtggccccattactgctgccttgcttcagccacctctcctgcccctccctagtccccactgctgtccaccatgagtaggagggaggtgcagtccccagcccccacccctc

SEQ ID NO: 99775 - DNA, 1048 bp, Homo sapiens
cactggttcttgttgcctccagcatttgttcctttaggggttgcagaatgacttagcatttggtcatttctttgttatttattagcaagaattctttccgaaagaagagctttccatcaaccaccagggcaatttggttacaagaaaggccaagagacaggctgaattcttcctctttaatcctcagctttcagagtaaagagggcactgctaccgtcagtggtgacaaatgagggcttttgagggcttgggtttgtttgttttgctttctctcttcttttctaataatctctgtgaatgcactgcttttatgtgttccatctgtttccatcagttgcactcattattctttttgatgctcagatggtcccagctcggcccattggaggcttcctggggcgcctctcactgcccctgtgctgaggctgccgttggggagctgaggcggaggcaggcctgagactcagggcagggtctgaatggggttcaggtgggggcacaccccctccacaggcatctgttttgcatatggccctgaccgatcaccaggagggaaagctctaagggcacgcttactttatgtggtcccctgttcttgcccaccatcgagcaccctgttgcctctgaccgcacccagctgcattgcttgtgtgacctgaataaggtagctccaggcccagcctttggggtcagcagcaccagaactggtccctggaaaataccaataaagtcctcctttccaggctgcccctcctgccagtctctgggggtgctggggataggagtcctatgctgttgctttggcacctagaagctgcagctcagcacatgctggcaggaccctgagtcactggggtatcaggaaggggtgagggctcttggtgaatgtgggcagtcggtagagggtgggcagaagcccccgtgctagagagtacaggcaccacttgggctgctgagagcggtaggggtttgagtccttcctaaagggagctcctctggtgtccctgagccatgggtccatgagtggccctgacccctgccctcccca

SEQ ID NO: 99776 - DNA, 1059 bp, Homo sapiens
cttaccatcagctgtgtaatcagctgtagtttgctgctttcctatctagaataatctccctcgttttatttttcttctttcttttttttttttcttgagacagagtctcgctgtgtcacccaggctgaagtgccgtggcgcgatcttggctcactgcaacctccgccttccggattcaagtgattctcctgcctcaacctcccaactagctgggactacagctgcccgccaccacacccggctaatctttgtacttttggtagagactgggtttcactatgttggccaggctggtcttgaactccttaccttgtgatccgtgaaagtgctgggattacaggcgtgagccaccgttcccagcctgctttctttttcttcttgacatttgaaaacaaaaacaaaaacaaaaaacaggtcagtcatcctgtagaatatcctgccttctgggctcgtctcattgctttctcatggagtcattaaatttgttcccctctcctctgtgtttttagcaaatgagaagttgaagttagaggctggtttagattccaggttaaacctttttggcaggaatcccttgtcagtgatgctgtgactttgggctgccttacttcaggaggcatcagtgtgacaggctgtcctgcagagagtagagagatagaccagtgtgtgactgggagaagtcacatacctccattgcaaacttgtgccattcctcttaaacaccaggtcctcggccaggcatggtggctcacacctgtaatcccaacactttgggaggccgaagtgagcggattgcttgaggtcaggagttcgagaccagcctggccaacatggtgaaaccctgtctctactaaaaatacaaaaattagctaggcgtggtggcgggcgcctgtagtcccagctactcgggatgctgaggtgggagagtcgctcgaacccaggaggcagatgttgcagttagccgagatcgtgccattgcatcccagcctgggtgacaagagtgaaactccgtctcagaaaaaaaaaaaaaacaaaaaccataccaggtcctctgtcagt

SEQ ID NO: 99777 - DNA, 1032 bp, Homo sapiens
accgttagctggtgcagctggggtgttttccgcgaagcgattgtccgggggcatgagtgcggtagtgagggcgggggcgtaatggggtcagcgccccctcctccccacgaccctgttcattgccgctgcctcgctgcatgaccttggaccagtagcatctctgagcctccgagcctcagcaccctcaggaaggagggcagtgatgtctgggagtgcgggctccggagactcctgcgtcagccgaggtgagtgaaggtggggagtgcacaggattatctccgagggacagagccgccgcctcgcagctcaggatggattggatgggggggatgtccgattacatttcccccctccccctgagatgacaagaatggggtgtggcgggggtgccacacccacagggatggctgccggagaggataaagggtcctacacctggacccttggggcctcgggggcttgggctgcacctccctcccggtggtatgaaggaggagggactggatttaggttctggacccgtgtttccattagtaagcagggactgagaaagggaagtctccgcttgcctttcttcttgaatcttggcactggaaagtggaggtagggcatttttctgctccggggagttgaagaaagtcggggcagcaccccatccctctcccattctggtcttttgtggagggaaaatgtagctggatatccccccacattctatccatcctgagctacgaggcagcagccctgtccctgggagataatcctgtgtgctcccaccctcaccttggctgaccccctggatccagcctggcctctgcttcttgggacctctggatcacaggcccagggcagggcctaggtggggcatgctatctggaggctaagcacccactagctgagggcaaagtggggagaatgctgggcagaggagggcagcacttgttggggaggcaggaaggtgtgggtggtgagggtcccttctccatattcccccacccccacccccagcacctcactgttagaaggagagag

SEQ ID NO: 99778 - DNA, 1048 bp, Homo sapiens
tgaggcgtgggatcgccaggagtagggaggacatcgacgatgtgcccgtagcagtcgcccctccctcctcgcgcacggggtactgaggcggaaggtttgaaggttacggctcagggctgccccattaaagtcagtgttgtgttctatttcctgtgcctgccttctctttttgcatctgaggggagccagtttcttcttcacttgtcctccatctccccacccccgccttgagtgaaagagctttctggacccagagtggatctcatcttgtgggtggctgggtcctgtgcggccacagcttggtaggttgatgatatcaccaggggtcaggttttgcacaggatgacagcctaacttctaaccctggccttagattgacccccaaacccaccctcacagtgttctccaaccttgtccaaacccaaccccaaaccagacttcaaattgttcccaaatgtggccacacactcaccctcaaccctacgtaaggactgacccctaactcggccctctgtacgactccaaccctgcccacagacaatcccaacttccatggattgaggccaggctttactcccaaccctggccaacacactacagccatggcatgaccctaactttaatggttttctgactaccagtaatgtggaacatttgtaaatcctgagatccagctgggcatggtggctcaggcctgtaatcccaccactttgggaggccaaggcaggtgggtcacttgaggccaggagttcaagaccagcctggccaatggtgaaaacccatctctattaaaaatacgaacaattagccaggcgtggtggcgggcacctgtagtcccagctacttgggaagctgaggcaggagaattgcttgaagctggggggcagaggttgcagtgagccaagatcgcaccactgcactccagcctaggcaacagaaggacactctgtctcaaaacaaaacaaacatcctgagatctaacaattccattcctaggcatatacccagcacatacccaagggaaacctaggctcttgtgttctgtgtt

SEQ ID NO: 99779 - DNA, 1050 bp, Homo sapiens
attcctccacttgccttgtctcaggtgtatcccagaaggcccgaggtgaaggtgtcccggacccccagggagggggtcagctcaggtaaagaagctgggagttccagacttcaccaggctggtgatctctgcacacagctggggttggggggcacggtacgctgagcctgagacgggaggcaggaaaggggctagagggggagaagggaaggcctggtcgagggccctggaagggtgagtgtagggcccgaggtccaagcctccgctaagctgcttcccaccccagctgggaccggccgccggcgcctcggcctccagcgtataaccgggcgttgcagggcgaccccagcttcgtcctccagatcgctgaaaaggagcaggagctgttggcctctcaagagaccgtgcaggtgaggggtctaggaaggctgcgggtgggggctcgcggccagcagaggccgggcaggagggagcagaccgccaggcttgacgcctgcgcggtgcggcttaggtcctgcagatgaaggtaaggcgcctggagcacctgctccagctcaagaatgtgcggatcgaagacctctcccggcggctccagcaggcggagcgtaagcagcggtgagcggcggcccgggccgcgcggggacgcccgggtacccgccagagccccgacgccgcgccggacccacccaccgatggatagaccattgggagggcggagcccgctgctctcacgagcctgctggggcccgagtgccctccttccttgggatgggtgagcgtgggaggagatgggacaggaactctaggagcgcaggcccgggactgagccgcctcctaccactccggagatccgggtcaggagaatggaccgctttccagagcccagaagccacgtgcagagacctagcctgtcccccaaagcagtgtccaacaccttgggcccggccttgcatctcccggcgctgggccttggggggcggtcccttggctctgtccacacccccagaatcaggtccccgcccagctccgaggacggcggcgtctccatcc

SEQ ID NO: 99780 - DNA, 1049 bp, Homo sapiens
aagccattctgggaagggctccagaagaaggtccagcctaggccccctgcaaggctggcagcccccacccccaccccccaggccgccttgagaagcacagtttaactcactgcgggctcctgagcctgcttctgcctgctttccacctccccagtccctttctctggccctgtccatgtgactttggcccttggttttctttccagattggaggtttccaagaggccccccaccgtggaagtaaccaagggcgcttccttgtgggcagctgcaggccccatgcctctcctccctctctggcagggccccatcctgggcagaggggcctggggctgggcccagagtccagccgtccagctgctcctttcccagtttgatttcaataaatctgtccactccccttttgtgggggtgaacgttttaacagccaagggtgcatccttcatggtctgggcttgcgtctgtcttgggggacttattcgtcctggctctctttggtccttgctctggtgggacatggaggcaagtgttgagagggttgccctgaccggaagaggggcaggaggagacctcaagcttggggtcacttggctggggcaggagggagccatcagtctctgggggcaaatcaatatgcacgtggggactaggcctaccgaggctggtttgaaggcctttgcaggagtggggtcaggacagaaagaaaggagtgttggggcagcttctggggtccagattggagtttggaggggcatataggtcaccctttggtttacctttggtgccttaagagggagccctttaggcctttcagtgattggcatatccaagcctggtggccacctctaggcacagtggcaggaggaaggtgaaattgctaggaacaggttgcacccccaagaggcagaggatggttggtaactccctgtgcagtgccttccagggggcccccagtacaaaggtgaggtcaggtccctttgctgatcctaccctttttcctttcagagccagcccctccctccctacccctcctcactgaggccctcagg

SEQ ID NO: 99781 - DNA, 2257 bp, Homo sapiens
cgccgcgcccgcgagccgctttgtctcgggcggggcgcgcgggagaggccgccaggtgccccccgccacgggcccgggccccccgccccggggcggcggcggcggcgccgggccccggggcggggggcgcgccgggatgggccccaagaggcgacagctgacgttccgggagaagtcacggatcatccaggaggtggaggagaatccggacctgcgcaagggcgagatcgcgcggcgcttcaacatcccgccgtccacgctgagcacgatcctgaagaacaagcgcgccatcctggcgtcggagcgcaagtacggggtggcctccacctgccgcaagaccaacaagctgtctccctacgacaagctcgagggcttgctcatcgcctggttccagcagatccgcgccgccggcctgccggtcaagggcatcatcctcaaggagaaggcgctgcgcatagccgaggagctgggcatggacgacttcaccgcctccaacggctggctggaccgcttccgccggcgccacggcgtggtgtcctgcagcggcgtggcccgcgcccgcgcgcgaaacgctgccccccgcaccccggcggcgcctgccagtccggccgcggtgccctcggagggcagtggcgggagcactactggttggcgcgctcgggaggagcagccgccgtcggtggccgagggctacgcctcgcaggacgtgttcagcgccaccgagaccagtctatggtacgacttcctgcccgaccaggccgcggggctgtgcggaggcgacggacggccgcgtcaagccacccagcgcctgagcgtcctgctatgcgccaatgccgacggcagcgagaagctgcccccgctggtggccggcaagtcggccaagccccgcgcaggccaagccggcctgccctgcgactacaccgccaactccaagggtggtgtcaccacccaggccctggccaagtacttgaaggccttggacacccgaatggctgcagagtctcgccgggtcctgctgttggccggccgcttggctgcccagtccttggacacctcgggcctgcggcatgtgcagctggccttcttccctcccggcaccgtgcatccgctggagaggggagtggtccagcaggtgaagggccactaccgccaggccatgctgctcaaggccatggccgcgctagagggccaggatccctcaggcctgcagctgggtctcacggaggccctgcactttgtggctgccgcctggcaggcagtggagccttcggacatagccgcctgctttcgtgaggctggctttgggggtggccctaatgccaccatcaccacttccctcaagagtgagggagaggaagaggaggaggaggaggaagaagaggaggaggaagagggtgaaggagaggaagaggaggaggaaggggaggaggaggaggaggaagggggggaaggagaggaattgggggaggaagaggaggtggaggaggagggtgatgttgatagtgatgaagaagaggaggaagatgaggagagctcctcggagggcttggaggctgaggactgggcccagggagtagtggaggccggtggcagcttcggggcttatggtgcccaggaggaagcccagtgccctactctgcatttcctggaaggtggggaggactctgattcagacagtgaggaagaggacgatgaggaagaggatgatgaagatgaagacgacgatgatgatgaggaggatggtgatgaggtgcctgtacccagctttggggaggccatggcttactttgccatggtcaagaggtacctgacctccttccccattgatgaccgcgtgcagagccacatcctccacttggaacacgatctggttcatgtgaccaggaagaaccacgccaggcaggcgggagttcgaggtcttggacatcaaagctgagtcactggacctagctgtgcccccaacctagattggcagcaccaccccagggcagaggactctctgggcacccgctgtgcatggagccagagtgcagagccccagatcctttagtaatgcttcccctggtcctgcaacaggcccggtcacctcggccgggcccggggctgaggtcagcctcactgcctgcttattgcctctttctcagaatcctctttcctccccatttggccctgggctcaggggaccaggtggggcgggtggggagctgtccggtgctaccacaccgtgccctcagtggactaaccacagcagcagcca

SEQ ID NO: 99782 - DNA, 1048 bp, Homo sapiens
cgtttgtcactgggggtctactgtatcagactggagctgactgggggagccctaaagcaggccccagtcctcagaggaccgggagccaggccagctcctcacaggggagaggaagcctagccttgctgttgtccaggccctggagacacccacattgctgggtgcccctggcctatcataggatggatggatgcctttcctggcagccatatggccccgctgaggtgatttgcatacaggtggaaggcctggtgcaggctggcgagactgttgccttggtgacgcctccctgaccctgacctgccccagctgtctctatcactgccattctctgggctttctttcattcagggcagcctttaaaattccaagctgcctcttatcttccccctccccaatacctgggccccctgatggtgggcgttcttcccaccccaccccttccactgccttgagccttggcccttgtctttgcccttactcccccctggactgggggcctggtgctggggtgggtgatgggtgcggagggagcatgggttgcatgggacccttctctgtcctaggtttgaacaggccatccaggcagccagccggatcattcgaaagtaagtgttcctgggcctcttccatctaccacaagctttcccttaggacagggctccagaagggcatgctgcatgctcttggtccctgccctgcctctcccagctctcacctgtccccatttcctcctgtagcgagcagtttgccatcagacgcttccagtctatgccggtgagtgtcttcgaggcctgactgaggcttaggcatgctagccaggcatggggtagatgagcaggatgcattcagggatcacctcccagctgggtgtccccaggcaggctgtaggagatggggtttcagaggtaggtaggtaagtgggaggagctggaggagaggtggagaaggtagggcctgggctcgtgccggaggaatgcagccttcattcctctgcctgccgccctgcctggctctctaggtgaggctgctgggccacagccccgtg

SEQ ID NO: 99783 - DNA, 1014 bp, Homo sapiens
tgtcccaggcccttgggcgtaagaggcctctcccacgcagcacccaacccatacccagcctgcccgccagccaaccttggcgtccctgccttgcgcctacctacccagcagtcccccgcccgctcccactcccacaggcccagcgtgcacgtctccaggataggcatccttgcccctgtgacttcagcggcacccaacgtttattgggcactaactgtatgccaggccatgggggtgccggagagaacgacacgaagaccctcacccctcaaagttcccagggggaggaggggctgcttcacttgggaagcgtggggatggaattctcagccccccgatgactccgaggccggccacctgcctggtttctggccggacaccggacttcccctggaagttgctcgagactgcgcgcccccagcaaaaaatcaggtcggttctccgagcccagtctagcgcttcccgacccgcaaaccaaggcccagtgaccgtccccgctgcgcagccgcctgcgtcgccagccaaccacgcgcggccgagtagccccgcccctccacatggccaatggccgcgcgctctgcccgccccgcctcctcgctgcgggaagggtcctgggccccgggcggcggtcgccaggtctcagggccgggggtacccgaggtaagatcgcttcccgggcgttgggtcctttcggctcagcacgcacggacgcctttagggaaggtggctgcagcggcaggacggagtccgccgggacgccctgggtctggggtgcgcggggggcccaggaggggacaggacgcgcggggatccggaagagcgggccctgtcgcaagagtttcgggaacactgagggctccaggcgccgcatccagcatccggggaaaagggggtaggtggcgctgggcgtctgctcaggctgggggaaaggtagggccagaaggggacgggcagcggccgctgacctcctcctgccgcccgcgggcccagggtgacgctaaggtggggccgagc

SEQ ID NO: 99784 - DNA, 1070 bp, Homo sapiens
tatgtctcttcatgtgtggagattaatagtgatccctggctgggcacggtggctcacgcctgtaatcccagcactttgggaggccgaggcgggcggatcacaaggtcaggagttcgagaccagcctggccaatatggtgaaaccctgtctgtaccaaaaatacaaaaaaattagctgcgcatggtggtgcaagcctgtaatcccagctacttgggaggctgaggcaggagaattgcttgaaccggggaggtggaggttgcagtgagccgagattgcgccactgcactccagcctggatgacagagtgagactccgtctccaaaaaaaaaaaacccaaaaatagtgatcccctgaatacaatggctgtggtagggcctgatgaggggtgggggcaaaggggaggggctcaggtggcagcatcagggcaggggtcagtgagcaatgatagtcatgtggaggagaaagccactgggtcctaggatgcctggggacagagaagagtgactgctgacacggcgtgggtgactagagacccacgaggcccccccatactccccttcctcccttgctaccttgtcctccatctgctctcaccctcccactcctgcccccttgccaagtgatgcttgtcactccttttttttttgaaatggagtttcgctctgtcgcccaggctggagtgcagtggtgccatctcagctcactgcaagctccgcctcccgggttcacgccattctcctgcctcagcctcccgagtagctgggactacaggcgcctgcaaccatgcccggctaactttttgtattttttagtagagatggggtttcaccgtgttagccaggatggtctcgatctcctgacctcgtgatccacccgcctcggcctcccaaagtgctgggattacaggcgtgagccaccaagcccagccctgcttgtcactcttgaggagtgggcccacatcagaacagcttttggacctatgggtggggcggggggtgtacccaagagcacccaagcctctttaatcatgaggagaacccccaattcctttttttttgagacagagtctt

SEQ ID NO: 99785 - DNA, 1043 bp, Homo sapiens
atggagttgggttttgattcctggtgtcttgacttcagatccagtgttcttggtccacattttggggtgggggaaggtatgtgtgatgtaatccagagctgtggttctcaagtttttaaaactttccctcaacctaccattgcatgatataggtctgcaaaggggtctaaaattatattttaaattttattgaggcataattaaatagagtaaaatgtacaattttggcaaatgtagacactcatgtaacaagagaacatacatttttatcaagggctccaggtgttgagcatatgtgcagcaggtgtgcagaaggtgtggaagccctgtgatcagagtgctccacagtagtgtggacaacaaacttatcctttgaagatgactcgcaaggcatgttgtagcatgccagggagacctttggggcttgttgattttggactcctacaaatctaaccttcataatacagtttttgtttgtagcttgacaacactagcctagaaaatggatcattttttcttggctttccgaggagcgttgctgttggcagtatggaactggagccggggccctgttaggctgcctttattaggctcagcatttcagcttcagggaattaggacggattgacccctgggagctgaggaaaaatgttagattgctatagctttgtggcccattgggagaggcaagatgggagttttttttttgtttgttttttgtttttttttttttttttttagaggagtttcactcttgttgcccaggccagagtgcagtggtgcaatcttggctcactgcaacctctgcttcctgggttcaagcaattctcctgcctcagactcgcaagtagctgggattacaggcatgtaccaccatggccaactaattttttgtgtttagtagagatgggatttcaccatgttggtcaggctggtcttgagctcctgacctcaggtgatccatttgcctcagcctcccaaagtgctgggattacaggtgtgagccaccgtgcctgaccgaaaagatgttgtttgtttgtttg

SEQ ID NO: 99786 - DNA, 1884 bp, Homo sapiens
atatcagattttgaaagataaattgaccattggaggttatatgttacataggtttgggaatttcctgtttctagtttgctgctaaaccagaactctgaagtctcaatgtttttttttaagccgataggaaagagagattttcattctgaatctttgtttttcacagttgaggcttacgagtagtcatcttgttatttttaaaacacttcatagtgcggtttgcgcttgtctgacagaatggttgggttggctcaatactttgatatttttctttttcgtctttgccgtagtattttttttttaagttatgcatctaaatcaagacagaatcacatttctttgccccaaaacccttttgcctagaattatgttctttggaaaccctagcgtttgaaataagttgctactgtggtaagggtaaatttaattttcagaaaaaagctgttctgacttatttttcttccccatttagtttttccatggtttggactggatatcggtggaactctggtcaagctggtatattttgaacccaaagacatcactgctgaagaagaagaggaagaagtggaaagtcttaaaagcattcggaagtacctgacctccaatgtggcttatgggtctacaggcattcgggacgtgcacctcgagctgaaggacctgactctgtgtggacgcaaaggcaatctgcactttatacgctttcccactcatgacatgcctgcttttattcaaatgggcagagataaaaacttctcgagtctccacactgtcttttgtgccactggaggtggagcgtacaaatttgagcaggattttctcacagtatgcattttttagcttatatacaatttatggtaatttgattgttaaaaataatgccagtagcaagtggtgaaataatttccatctctaatggaacttgaattttcttgagtcaaatgaagattaaaggtacgctagtgataggagttggccatctagaggtggttgtctagttcagatgtatggacgacaatcagaaccactaaaagggtagcattttattgctcctttagtatgaaaaattagggcatctgctatacgttgaggaagaaactacctaaaaggaacatcattagatcatgaacaatgagattgaaatataattaaaatcatttcatgtcataaaattgttttcagtcttgtctaccacataatttctcttgtctccctcagttgtttgctggcatgttcactaactgaaaaaaataaggaactctggtcaaaagtggtgttttcaggctcagggctggtctgagatgggtgactgcagagccctcctctcccagaatgctttctgatgtgttctgtgctgcacacttaactggagtctcgccaccatgtctggcccctggggaatgctgccaggcgctctatcttgctttcattgagtgaacactggagaacattgtgagcaagaccttgaggctaggtcctttcagggtggatggtgggggtaggccggagaactgacaaatgaataagccaagatcctgaccgtcagggtgcaatacagattgaaaatgtcttcagtgactgactgtttttctgttgctaaatgagagaatattagtctgaaagagattctgcctttttgttttgttttgttttcttgagatggagttttgttcttgttcccaggctggaatgcaatggctcaacacaacctccacctctcgggttcaagcgattctcctgcttcagcctcccaagtagctgggattacaggcatgtgccaccacgcccggctaattttgtatttttagtagagacagggtttctccatgttggtcaggctggtctcgaactcctgatctcaggtgatctgcctgcttcagcctc

SEQ ID NO: 99787 - DNA, 2344 bp, Homo sapiens
gacggtcacagtgctattactttgaaaaccctgctgattctgaaaagtgtcagaagttaccatttgatttgaaaaatccgtatcctctgcttctggtgaacattggctcaggggttagcatcttagcagtatattccaaagataattacaaacgggtcacaggtactaggtaagttgtatataaaactcactgtttattcttagtatcctaacgggctgagttttcaggtattacatgtaactacaccttcaagaacctgttaggtgaaagtgtttctggattatgcaaacaaatgtttctctttgaaaattctgattttatgacctagttttctttaatctctactgttcaagatttattatcctaggtgtttcttaaaagatcacatcagcagactcattgtagcctttgccctcagatagtttatggtgtgcatacacaaagtagctaaagttattaggcagcatctgtaaggagaaggcacgggaaaggacctagctctgaaacctgtgtaaatttcatgcttccacacacatgtgtgtgtagaataatgatgtattctatgtatgtgatttagaagttgatatgtactgatcagtagaaaaattattgagggaaggtagtatgaaaagagaggattagccgggcgtggtggctcatgcctgtaatcccagcactttgggaggctggggcgggtggatcatgaggtcaggagttcaagaccagcctggccaacatggtgaaaccccatctctactaaaaatacaaaaattagccgggcgcagtggcaggcgcctgtgaatcccagctactcgggaggctgaggtgggagaattgcttgaattcagagggtggaggttgcagtaagccgagattatgccactgcactccagcctgggtgacagagtgagactccgtctcaaaaaaaaaagaaaagagagtattagggccaggcacggcagcttatgcctgtaatcccagcactttgggaggccgaggcgggtggatcaccagaggtcgggagttcgagaccagcctggccaacatggagaaaccccatctctactaaaaatacaaaattagccgggcgtggtggcacatgcctgtaatcccatatacttgggaggctgaggcagaaaaatcacttgaaccaggaggcaaaggttgcggtgagccgagatcgtgccattgtactctagcctgggcaaaaagagctaaactccatctcaaaaaaaaaaaatgaggattagatggaagaagagaatgtttcggcttaagggtcagaggtcacttcaggaaaaacaggcatctagggattgggataaacaatttttttaaaaaaacagttgtgatttaaatagaggagtaatttttttgtgacaaaacacgttgcaggaggagtatgtttgggggtgtactgataagccagggtgacaaggtgcttggatgagaatgactcagggaatgtacttggagaagggaaagggaggaggtgttagcatggccccaggcgtgtcaggctaatttgcacctgaggctcttcatacttggcagacagccagactgcactggggacatgggccctgtgttttgtactttgcatgttggctcacatgcatatgtaccttaaaggtgtatatcaggcaccttatcttttcacagacttgtttcctaccagtggcatttgcatgattgggttggatatgtgaatatggttttggggttcataaatgttaacttcttgttcttatttttaaaaatgttataatactgtgttaattgtttttaatcatagtcttggaggaggaactttttttggtctctgctgtcttcttactggctgtaccacttttgaagaagctcttgaaatggcatctcgtggagatagcaccaaagtggataaactagtacgagatatttatggaggggactatgagaggtttggactgccaggctgggctgtggcttcaaggtaagggggcatgtgtgttctaagaaatacaggcgggccgggcgcggtggctcatgcctttaatcccaaaactttgagaggccgagatgggcagatcatgaggtcaggagtttgagaccagcctggccaacatagtgtaaccctgtctctactaaaaatacaaaaattagctaggcatggtggtgcgcgcctgtagacccaggtacttgggaggctgaggcaggagaatcacttgaaccctggaggtggagggtgcggtgagctccagcctaggtaacggagtgagactctgtctcaaaaaaaaaaaaaaaaaaaaaaaagacataaaataataatattgggcatattttttaaaaaagctctattgagat

SEQ ID NO: 99788 - DNA, 1050 bp, Homo sapiens
agtttaccagatgtgcatgtggccatctgagtggaacagctgtgcagttgagatgaattgctgttagaggtgttgtcctggaactgtctggttgcaggagcaatggtgccttccagtgcatctgatgagattctaactgaatatgtgaatatctggtatccaagctagatttcagtagaaaccgcagggaaagctgtctgctcatttagaatgttggagggctctgtttgaagtttgcatttctctttgaacagatgctccattgcaaaataaaaggtttgaagatttcaacaatgttgccctaaaagctaattttatttcaataaagtaacattcaagttctgttgggctttgttgctgttggtttagcaatgggattttttttcccccatcacagctttggaaacatgatgagcaaggagaagcgagaggctgtcagtaaagaggacctggccagagcgactttgatcaccatcaccaacaacattggctcaatagcaagaatgtgtgcccttaatgaagtaaggggacatggatttctttaattgctctaaggaaaatactgaacttaagtgggccccatcacgtctgttttctcagaacagtgcctaaatgtagtcatttggggtggggtttgttttagcacgaagttaaaactcttcaaatacagattaatcttcttttttttttttttaaactgaagataaacattgctacttgtctagaggtaaaatgacatcttttgaggagaaagtagaggaagagtggaaggtagccagtgttccagatattggggactgttgggggtgatgatggataacgatgctgaatgtagactccacactcactgctgagctctagaggccctagggaggaatccagaggaagtcacggaagctgggagaagactgagcaggccgaggggtgccctccttggctcccccacctcagcagagctgcgtctttgtgctttcagcttctttacagtgctgccttgtagcattcaggtcaagcagcattgtacagggctatgaaagaaccaagaatggg

SEQ ID NO: 99789 - DNA, 1033 bp, Homo sapiens
tattctttggttgaattttattcttgatatggggcttaggagtgagatttctggtctacagaaatgatcatgctcatgaattttgacatttatcgtcatgatgctttgcacaagggctgcaccaatttagatcatctttagcggtgaatgagtggattaattttactacaactactgatggtggtggtggaatttcagttgcttttttttgcgaggttaataggtctaaaattttacttttgtttgatgactagtggtttgaatttttcgctgcctgttatattgcttgtatactttgcctgtttgtgtcactgtccttttggattggagtcatactgtttttttttgtttattttaacttatctgtataaaacattgtattcaaaactagttattgttggtcagatttaatacaaatgtttttcctaatctgttttcttctcctgtgacattatctagcatgctttgcagtgggtccagagttgtctggggatcaagtttaagtagccctggaccaactggactaaatttgatcagcagtcaaattgttgctaagagctatgcacatggtgctgtatttggggtagcttttatgagaaaatagaaattaagatgaaaactaattgcctttttttggtgtgctcagaacattaaccaggtggtatttgttggaaatttcttgagaattaatacgatcgccatgcggcttttggcatatgctttggattattggtccaaggggcagttgaaagcacttttttcggaacacgaggtaagctgacttgttcgttgtggtatattatgtacacagagggcttgtgggtcacactgtcatggaacttgaggtagagggtggaggtgaaatgggctgcagtgtttcttttgttttttgtttttttgagacggagtctcgctctgtcacctaggttggagtgcgtggcacagtcttggggctcactgcagcctccgcctcctgggttcaagcagtcctcccacctcagtctcttaagtagctgggattacaagtgtgcgc

SEQ ID NO: 99790 - DNA, 1090 bp, Homo sapiens
tggtgtattttctttcagggttattttggagctgttggagcactccttgagctgttgaagatcccgtgatcattacctggggaggggttcctgaaaccttccacaatgggatctgtggactttcatttttttaagagacttactcaatttcatgactgtactacctgaaacaaagtgagaaaggacaggtgtatttttctaagtcatcaagataaatccttaagaattcagtctaaattagcaaccaggaaggaaaaatatattaaaaacaacaaaaaagtggcacatgtccaggcagtgtgaggatttgctgtatataagttgcctgctttgtatttttgaaatctctgcatcactcattggaagtgcttctgaagagagctgctctgtgttcagttgactggttttgtgtcctgtttgaacttgctgaatgtaaggcaggctactatgcgttataatctaatcacaatttgtcaatatggtcttggcaatcatctgtgcattactctggtttgcattaagcctgtgtgtgaacttactgtaaaacatgttttatttcaaggttctgcaaaattaattgggcaggttaattgtgtacctgaaacttaacaagcagtttttggaagggcagttccacgttactttacactaaatcctgggaatgaatgtctggagagacagggcttcttttcttggcagaatttccttgggtagtgggcggactgttctgatgcaagtgggtacactggcagaagcagcacaatctggaggactaacatgagtcagcagggccactagaattgacaccccctcaggggatcagggagaatctggtttttctttcaggctaagtagaaaaggaagaactgaagtgtctgtcaaagaactcatggggagtggggggtccttcagggcactgtggcacttgggaggtgagtctcagaagactgcctgaggagagtgccaggctgcaggtgctcttggtaggggctgaagcttttctttctgctttgcagaataatttcaaaagcctttcccaaggagagaatgcaccttttatatctgaggtcttaagtggtgcccatattgc

SEQ ID NO: 99791 - DNA, 1281 bp, Homo sapiens
aaaaaattctctatcacatccactcttctggcatttgtagaatctctggccctgggtgtgtcttttcctgtagctgttacagatttcttaagcagatttcttaagcagatggacatgtccagattcatgcctaaatatccagttgataactggaaaatgctggttcacggttctttagtaaagattaataagggatccccatgtgctggggagtgtgcttccatttgagtggggatatcagaagaaaaagaggggcttgtgtagtaaaccttactttgccaattcagctgtagagcccaaattgttacaagatgcaaagatgtactccactttttgaccaagcatcagcacctttggcttaccatccagtccttacttctgtgactgtaagggccccaccagtgtcagcagacttgtttgtgctttgggggaactctcttctcagctccctttgccagtcccaagcctggtggatctgcatctcacgcccactgcacaccgttcctctccatctgcccttccctcccaggcccccggtcgggggagcaggtgtggcaagtgttaggaactcccttctggtgacagctggtcttcctagagtgttgctggtaactatcgcctcttggtcttctgacatcattgccaggaacggggcactttttcgtcttgtagtttggccctcgggtttcctcactaggtattgtgtaactccctcaaaaaaaggtttatgaaatgctgaacctcaggtttcatagacgtctttgtacactaaaaattctgcagcagaatatttttaaacattcgcagttttttgtaagctatatttttgtatatttaattgctattttaaaattttaatgcattttgctaatcactcctcaaaaataaaacatgcatgtaattgactcaaacgtgtaaataaaagcaaattttgaaaaatagtgttgtgcatatgcctttgaacagagggaacatccatgtgccacttacgcaagcaccttcagcaagacttggaaactcaaggtgagtaattctatcagagctggtaactagtactgagtgattgtgatggaagcccctgcccttcctgtggcatagtgtgcaagcgggggtggggtcagtggtgaagagtgtgtcaggccaccacagccagagaacagagaatcctggaatgcagagtacagtggagtctgaagccccctggcctccctgagctctgcaaacagctggatacagataagcagtcttccacgtgaacgccagcaccagggtgacctgaaa

SEQ ID NO: 99792 - DNA, 1060 bp, Homo sapiens
attttaaaatagcaattaaatatacaaaaatatagcttacaaaaaactgcgaatgtttaaaaatattctgctgcagaatttttagtgtacaaagacgtctatgaaacctgaggttcagcatttcataaacctttttttgagggagttacacaatacctagtgaggaaacccgagggccaaactacaagacgaaaaagtgccccgttcctggcaatgatgtcagaagaccaagaggcgatagttaccagcaacactctaggaagaccagctgtcaccagaagggagttcctaacacttgccacacctgctcccccgaccgggggcctgggagggaagggcagatggagaggaacggtgtgcagtgggcgtgagatgcagatccaccaggcttgggactggcaaagggagctgagaagagagttcccccaaagcacaaacaagtctgctgacactggtggggcccttacagtcacagaagtaaggactggatggtaagccaaaggtgctgatgcttggtcaaaaagtggagtacatctttgcatcttgtaacaatttgggctctacagctgaattggcaaagtaaggtttactacacaagcccctctttttcttctgatatccccactcaaatggaagcacactccccagcacatggggatcccttattaatctttactaaagaaccgtgaaccagcattttccagttatcaactggatatttaggcatgaatctggacatgtccatctgcttaagaaatctgcttaagaaatctgtaacagctacaggaaaagacacacccagggccagagattctacaaatgccagaagagtggatgtgatagagaattttttctcaagttttgggttagggcaccagttgcaattttaatccaggggaggatctgggctgctgctgtagggggcaagtacaccagggaggtgggtgtggacagaggcactgggcagctgctgggaagcgaggcacaagtctgtgcccctactcccagggctgcctggaggaagcagctctaactttcatcagcggggacaaaaatgaac

SEQ ID NO: 99793 - DNA, 1074 bp, Homo sapiens
ctatgggttagtggagcataactcagccccaactggactccacgggtggctgaaccattagtagttgctaggggtacaactgaattcaactgccttcagaaacagggaacaaaaccagcctgacttgattcctggttgggtcagtatcagacactaggaagttgacatctgctgcttttctttgccacgtgtgatttggttaggcctgtccctggcagataaggtccttgaagcctatgcttgcctagccagggaaggcaggacagaaatggccaaataggggcaggtggcccctgggaaggtctgagctgagggatacaggggacctcccaccattgccggataccctgttcttgacaagaagatccttttccccagtgccaagccccttggatccatcagagaaatagcctcgggccttgtcctttttcacaaccccacttcaaaatcatgtcatctccctggcctgatcccgctctaagctactttgaacaactaggaattatttttctcagaggctttttgggcattatgaaatacatcctgatacatccagggcagtatacccagagctccaggcagagagtgatggaatcacctcttgtcactcactagccttaggcccttctgcaggttagcctctcagtctcttccttagcttccttagctaccacccagggattgtagtaacgtccctggcacctcttgtgggggttagctggtgcccagagcctggtaggcagcaggcctggtgtcatgggggctgctgataccacataacatcatctgggttacatgggctcctctgccatcatgattgataggaacagaacctcagccaaaaagcttcctgagctgtaggggctttccctgaggcccaggttcacctggcccctttcttccttggtcatctctgcctttgcccacagtgaactctgacttggttgttcagtgctgaatatttctttcttaatgttttgaataggtaatccattcatgtggttcacaaatcataaagtagttaaaagcctttcttgagttcctgatgcctagcaagctccgctcctcactcca

SEQ ID NO: 99794 - DNA, 1852 bp, Homo sapiens
ccccctgtggtgtctccttctgcaggtgccttattaagtggctggaggttcgtaaagtgtgtcccctgtgcaacatgccagttctacagctggcccagttgcacagtaagcaggaccgtggaccccctcaggggccccttcctggggcagagaacattgtatagcttaccgcaaggatcagactgttgctggacacgacgtctgtgtggagccaggaggaacacatgtggtgtctgtatggctgctctctacctaggacaccagctgccacttcttttgcctcatgaagaactcttgggccagccaaactgggaacctaggtgtctgggtcttgtgacaaccaaagcactttgacactaccccctgccgagagaagaggagtggatgagcctgcgggtttgcctcaagaaacttcatgagggtctcttactaactccattacactctctctcctggagcctcatctccatgtcaagcaggagggtaaagaagggaactaagagcaggtctttcaagccacacccccacctgcggatggatgggtttctctgtaggccatgcaggcctttgtcgcagcaaaccttcccagcagcccttgagccaagtaaaaccagcacaaccagccaccagtggttggtgaggcagtgcccacaaggctcatgttgtatgcctttgataaggccatcttggctttgagtagcagtgttcctcgtcacccatttccccctcaggattacaacacctgctatcaaatcatctaagctgaaaacatgagatgcgcttggaaaggcctagtcagaagccatttcctcttatcatttccctctcctatgcaccagtaaggcccgtccagagccccagcagggagtgggccctgagtccacactgtccctgagtgatccaggaggctgcccacatccccacatgtgcactgtggttccagtgtagctgctgtgagcccactgccactgcctcagaagggagccactgtgaacctctcgagtggctccaaagagcagtggctttttgagaatggcccatacttctggcccggctggatgaagggaatgccgaccctttggcctctccccctccttccatctcttctctctcttgccctatctctctttctacttcagaaaaaaaaaaaaaaaaaaaaaaaagcctgtcattcactttttaacactttatcccaaataagatccctgtgtaattctgaagctggtgatccacttggaattgtagatagtttcaggaagctcctgcagggctgtccaccgttggtgtgtgcctcagtatttggacttccgaaactgaaagtgaaagtgtctttataggagagaaacgcatgctgctctttggctctttctgtccaacttttctagaaatgactcaaagtccattaagatttgtgaatattgtataaattagctatggaaagtagcaggtcagatggaaaattcttttccacagccctgctctccgcctccctccatcttaggagcgcctgcctcaattcctcgtcaactgctttgctccactccatcccacaggtgtgagtgggggaagtttttcattaggaatacagtctgcgtgacatggagaatggatggagggagctttgctactctgctcttggcatgactccaggatttttttctggaatccaacctctgtcctcttaggagaaggaacctgtccttggttcagatggctgggcatgaggaggaaaatttccattagtgtagaacagtgctggacagaatccggtttggaaaattacaaatccagttggtcaaaataggccatttcctatgtgtgacctattcgtggtatgccaactggactgctt

SEQ ID NO: 99795 - DNA, 1046 bp, Homo sapiens
gattacattgtaatgttagatttcctgtattctaattagttgcctaatgtagtgtcataagtatctatagtcttagcaaaagccatatttttctgtccaggtgcagtggcttacatccgtagccccaacactttgggatgccaaagcaggaagatcacttgagcccaggggtttgagagcagcctgggaaacatagggaaaccccatctgtggaaaaaaaaaataattagctgggcgtggtagcacatgtctgtggttcgagctactctggaggctgaagagggaggattgtctgggcatgggagtttgaggcgacagtgagccatgatcacaccattgcactccaacctgggcaacagaacaagaccctgcctcaaaaaaaaaaaaaatcctgtatttttctgacctagaattagaatccatgatctgttattctaaatggtctgtgaatacaaaataatttaaaatagtactgacctacctagaacatcagtatattggaaggtttcagctgtgagtgacagaaaacctgaaacaagtggcttaaaataagattaaaatgtatttcttttttttttttttttttttttgagatggagtcttgctctgtcggttgcccaggctggagtgcagtggcgcgatctcggctcactgcaacctctgccacctgggttcaagcaactctcctgcctcagcctcccgagtagctgggactacaggcacccaccaccacgcctggctaatttttgtatttttttttttagtagagaatggggtttcaccgtgttagccaggatggtctcgatcccctgacctcgtgatccgcctgcctcggcctctcaaagtgctgggattacaggcgtgagccaccacgcccagcctaaaatgtatttcttattcatgtaaaagttggtacagatctggaatggagcttcatggcatcagggacattttaccacttactcctagttctctcttaccactctgccctcctcttgggtgtaaacctcatttttattgaggaaaatggtagcacctattgcagg

SEQ ID NO: 99796 - DNA, 1112 bp, Homo sapiens
tgcttgagagtgagcctttcgaagagatactcgcccagcccagcctctgggcctcccagcctgtggaggttcgtcaggtggtcacccatcttcttgatgagcttcacttcctcatctaggaagtgagtctccaggaagtcacagagatgggggtccatgtgggcagaatccagggcatgaagatccaaaagggcctggttcagctttttctccagggccatggcagctttcatggcatctggggttttaccccactcatcttcagctggcttcttgatgtcctggaagagagcgcggccgccacgctggttttgcatcttcaggagacgctcgtagccctcgcgcttctcctcggtcaattcgcggaagaagtggctcacgccttccagagccgcatcatcgcggtcgaaatagaagcccagagagaggtaggtgtaggaggcctgcaggtacaaattgaccaggctgttgacggctgcctccacgtcggtggaataattttgacgaatctgggagctcatggttggtcgccaagaaggagctaacgacaaaaacggtgctggcaggtcccagaagcaggagatagccgagaagatggtcccggaggttgcaagtggagaggaaattggagggcggtcggaggctggaagaccgtccccggatctgttccgtccaaacactgttgaagcaagagacagacccactggaccgccgaactgcctatcacctcttattcttaaaaataaatcttggtttcctccaacttgcctttttctgtttattttaattattagtttgcttgcttgttttgacttgtttttattgttatttattttctatcttccatgttagcagctttcctcagatatttggtaatctggtaatctacagtagatgttattggtgttctgcccataccttcagctgctataaatctcggtcataaatagaccagagctgccactttatctaaagaattgtcctcaagtaggaactaccttgcctgggaattcatggcttcctccctggcagcccacagccagtgattgatcaatatatggatacaaaagctggccctcttgcttcaaggtgagatcaaccctgtggtgcaa

SEQ ID NO: 99797 - DNA, 1254 bp, Homo sapiens
gaaagctgctaacatggaagatagaaaataaataacaataaaaacaagtcaaaacaagcaagcaaactaataattaaaataaacagaaaaaggcaagttggaggaaaccaagatttatttttaagaataagaggtgataggcagttcggcggtccagtgggtctgtctcttgcttcaacagtgtttggacggaacagatccggggacggtcttccagcctccgaccgccctccaatttcctctccacttgcaacctccgggaccatcttctcggctatctcctgcttctgggacctgccagcaccgtttttgtcgttagctccttcttggcgaccaaccatgagctcccagattcgtcaaaattattccaccgacgtggaggcagccgtcaacagcctggtcaatttgtacctgcaggcctcctacacctacctctctctgggcttctatttcgaccgcgatgatgcggctctggaaggcgtgagccacttcttccgcgaattgaccgaggagaagcgcgagggctacgagcgtctcctgaagatgcaaaaccagcgtggcggccgcgctctcttccaggacatcaagaagccagctgaagatgagtggggtaaaaccccagatgccatgaaagctgccatggccctggagaaaaagctgaaccaggcccttttggatcttcatgccctggattctgcccacatggacccccatctctgtgacttcctggagactcacttcctagatgaggaagtgaagctcatcaagaagatgggtgaccacctgacgaacctccacaggctgggaggcccagaggctgggctgggcgagtatctcttcgaaaggctcactctcaagcacgtctaagagccttatgagcccagcgacttctgaagggccccttgcaaagtaatagggcttctgcctaagcctctccctccagccaataggcagctttcttaactaccctaacaagccttggaccaaatggaaataaggctttctgatgcaaaaaaaaaaaaaaaaaaaaaaaaaaaaagaataagaggtgatattacacccatgaaacaagaataagatgctattttgagacaagaaacaaaaaataagctttaaaataaacacacacacatacacacacatacacacaacagcagaaatgaaaaattcaatggatggcttgagaaaaatgtctagaatatctcacagaaaatagatctgaaagacaaaacaatgaaaaacaggaaagaaaag

SEQ ID NO: 99798 - DNA, 1022 bp, Homo sapiens
ttgtatttttagtagagatggggtttcaccatgttgcccaggctggtctcgaactcctgatctcaggtgatccacccatcttggcctcccaaagtgctgggattacaggcgtgaaccactgcgccaggcccatctactcacttttaaagatgggaaaccaggagcacaactccaccaagagcaagtccttttggttcttttcacaacgttgatctcaagcctgccctctgtgctctgactccactgttaaggccccaggctacctgccccaagccaagccaagccgcgtaaccctctccccaggtctacacttgcccttctctgatctattttagtagagcagcgagaatgttatagaaacttttgataggaccatctcatttctctaaaattcgtgatagctctctatcacacttgattaaaatctcaaagctttccctcagcctaccagacccttcccagtctggccacagctgacctccccagccttatctggaccactgtcccctttgcattctccctgacagacacatctgaatcatttctgccctttggacaacctaagctttctcctgccccacggcctttgcttgtgctatcttttctgccaggagtgttttccagtgccctttactggcctggcttttctccttcttatttttaaggtcttcacttaattataccttcctcaaatgccttcccagtcttgggaagtcccccgtaattaatcgtagcacctgacttattttctatattatatttatcacagttcacaaccatttgttacaattgtttgtatacttgacttatctggcttcttaagggccggaaccttgactgaatggaccagtgctgtatctggagcatctagcacagtgcctggcatgtagctgatgcccaggaaatcttcagccaggtggcaggttggggctggattgggcagagaggtgggtattgcagtgagcacaggagtcctctttaaacttcaagtgaccctgaggatttttattttctttccacaa

SEQ ID NO: 99799 - DNA, 1796 bp, Homo sapiens
ttctatcattctcccctgttgaaagcttatgtattgagaacatctgggtaagagtcacaggcagcttggaaaagagggcagtgattagggatttctagttttattatttttttttagcatttgttgagattggtttaaaatccaggacatggttaatcttggtgaatgctccctaggcacttgaaaagcacatgtattctgctgttatagggttgtttgttctgttagatcctgttggttgaaggtgttgttcaattcttctatatcctcattattttcttttttatttttttagagacagggtctatctctgttgtccaggctggagtgcagtggtgcagtcatagctcactacagcctcaaactcctgggttcaagtaatcctcctgcctcagcctcctgagtagttaggactacaggcttgtgccactatgcctggctaatttttaaaattgttattttttctttttctgtgcctaacgtagccatggctcgtggtcccaagaagcatctaaagcaggtagcagctccaaagcattggatgctggataaattgactggtgtgtttgctcctcatccatccaccagtccccacaagttgagagagtgtctccccctcatcattttcataaggaacagacttaagtatgccctgacaggagaggaagtaaagaagatttgcatgcagcggttcattaagatcgatggcaaggtccgcactgatataacctaccctgctggattcatggatgtcatcagcattgacaagatgggagagaatttctgtctgatctgtgacaccaagggtcactttgctgtacatcgtattacacctgaggaggccaagtacaagttgtgaaaagtgagaaaaaatatttgtgcgcacaaaaggaatccctcatctggtgactcatgatgctcgtaccatctgctaccctgatcccctcatcaaggtgaatgacaccattcagattgatttggagactggcaagattactgacttcatcaggttcgacactggtaacctgtgtatggtgactggaggtgccaacctgggaagaattggtgtgatcaccaacagagagaggcaccctggatctcttgacgtggttcacatgaaagatgccaatggcaacagctttgccacttgactttccaacatttttgttgtttgcaagggcaacataccatggatttctcttccccaaggaaaaggtatctgcctcaccattgctgaagagagagacaagagattggcaaccaatcaaagcagtgggtaaaatggtccctggatggcatgttagatctttgtatgtaattaaaaataatgtggcatgattgatagccaaaaataaaataattattattattttgtaaagacagggtctcattaagtttcccaggctggtctcaaacttcaggcctcaggtaattctcctgccttggcctcccaaagtgctgggattacaggcatgagctatcacgcctggctccttgtggattttctatctagtagttctatcaattactgagaaaagagtgttgaagtctccaactataatagtagatttgtcaatttcttcctttggctttatcagtttttgcttcatgtatttgaaagatctgtttttggtgcatacacacttaggtttgctatctcttgttggtagattgatcttgatcttttatcatcatgtaaaattcctctccgtgtctggtaatttctttgctctgaagtctaccttgatattcatatagccactcttcctttttaaaatttaatacttatgtgatat

SEQ ID NO: 99800 - DNA, 1071 bp, Homo sapiens
gacacattaactgaaatgaacattatgtaaccactaaaaatcatgattttggagcctgtgatatgtggggaaaaactgacaagtaaaaaagtgggttattaactgcacctgcttactctaacgtgaacgcatatgtgaaaaatctgaaaggaaaagcacagaaaatggacgttttcattgaaattgtcggtgatcttaattttcctttggtgaatatattgctctcactaagggcgtttaaaaaatagttcacaggttttaattttttagatgaaatggacccacagttttctgtaagagaaaggagagattgttatatttgctacttagaataaaagatttttagccaacgttgtttcctttttcaaatatttttccatttttttagttgattaatgatttagtaatttgtgtattgggtttttttaagaatcagttcttagattcatttatcaattctagttttttgttgttgtttttaaggactcctgaatatttttcaaaactgaacaatttcagccatgtctgagctttccgtcttcctggaggcacaaatctagtttagctgaaccacaacagattgtacatatcctgcagaacctctgtggtcttaggaaggttgaaagtcaccaaatgtcacagaaaatgagggtcaggaaaggctgtgatcacaagctcttgatccagaggccactcgggtgcatctgtgtgactgacacctcattgcatcatcatttcttgtaaaatcagcttaattttgcagagaaatggccacagatttttagaattatgctgaattatgtaagggagcagccattttaaaaataatgtaatcaaataacaataataacataacagaagtttctgcaccacactgacactgaacatggctgtcaaccaactagccaaaccaaggtgaaagattctctgaacttcagttttaacttacttcgtccattctcccttttcagatcttatttcttcttccaaggcaactatatccactgtgaactgctgcatattaaacattcaaaacatgtctgtatctaacccagtgatggctacagcatt

SEQ ID NO: 99801 - DNA, 1028 bp, Homo sapiens
atcattttactattgtcataggtctctgctcttggagctaagtgcccagggtaaatgagatctttaatttgaaaagagatttttgatttgatgaatgtacattctccaaagggtcataaattgtcattctggatgtttgatctgtttgttgttttggtacaaaaattagaagaaaataattcactcataaaatgttaaataatgaactaaaagtcattcatcaagtccataacttagggtcacatttgtccttggagcaggagaaagagttgtgttcacccttttcttacttttgcttttgtcctaagtgcttcagagaagtacagggtggcaacagtgtttctactgagcagctgataccattgctatgcactcattcattatgcaggaaacatttagtaatttcaacataaatatgggactctgacgttctcctcttcattttgcagagcagtcattatggcgaaccttggctgctggatgctggttctctttgtggccacatggagtgacctgggcctctgcaagaagcgcccgaagcctggaggatggaacactgggggcagccgatacccggggcagggcagccctggaggcaaccgctacccacctcagggcggtggtggctgggggcagcctcatggtggtggctgggggcagcctcatggtggtggctgggggcagccccatggtggtggctggggacagcctcatggtggtggctggggtcaaggaggtggcacccacagtcagtggaacaagccgagtaagccaaaaaccaacatgaagcacatggctggtgctgcagcagctggggcagtggtggggggccttggcggctacatgctgggaagtgccatgagcaggcccatcatacatttcggcagtgactatgaggaccgttactatcgtgaaaacatgcaccgttaccccaaccaagtgtactacaggcccatggatgagtacagcaaccagaacaactttgtgcacgactgcgtcaatatcacaatcaagcagcacacggtcac

SEQ ID NO: 99802 - DNA, 1050 bp, Homo sapiens
catgaactcaaggcccccaggaggcacacgatgaattcgagtgggaagagaagggggtaggccacgggacagaggcctccctctggagtcttcctctaaccgctgcaaatgttagaggcagttctacccccaaagcttctaggggaaaggagtgaaggatttggcaataaagtccttagtttttgcaaatgtctgcaagtcataaaagtgcttttaagttctccacaggtcaggactggtcatgttaggttcttacacctctcccatagtccctccacccctagacattgggagactcccagtcaattcaccacccaggatggctgcccctcaccttcttcccagggccccacatccaattaatccaaatacacccatgtattcaagcacctttctgatgaacctctagaaagtagccagtgctgcagaaatttcttgtagcatgtgctgaaatttctaggatcctaccagtcaaagaacaacagtctccttgcttccaccagggaatttgctaacacttgcttctaagatctgacctctcagagccactgtggtccatcaatcaattcaaaaattatagtggcctggggttgtgtgggtgaggtggctgcttgggaggctgaggtgggaggatggcttaagcccagtagtgcaaggctgttgcaagctgtgaccgcaccactgcactcctgcctgtgcaacagagcaagacaccatctttataaaaacaaaccagcagccagacgcggtggctgacacctgtaatcccaacactttgggaggccgaggtgggcggatcacgaggtgaggagtttgagaccagcctggccaatatggtgaaaccctgtctctcccaaaaacacaaaaactatctgggtgtggtggtgtgtgcctgtagtcccagccactcgggaggctgaggcagaagaatcgcttgaacccaggaggcggaggctgcagtgagccgagatcgcgccactgcactccagcctgggtgacagagtgagactctgtctcaaaacaaaacaaaacaaaacaaaacaaaacacc

SEQ ID NO: 99803 - DNA, 1067 bp, Homo sapiens
agagaaatttctacatgaacaaggcaatttcagtgtcttacagcggccaaaccatgacgtgaagaatgagataggagacaggagatcaccataagcgtccctgatatagcagcacacattttcacgtttccacttaaatcgttttgcacaaagtcttgcttcgctcagatgagatgagatatgatttcctagagatgtaaaaataagaatgaatgtggcgcccccttcttccagatgtaatagaaagctctgccctatcacaaggggggtgttgaagcgccccttgtgttttaactgtatttaactgagcacaagatgcacaagctgtggtgggaaaccctcagtttacctttggagtcttccctgcagatcgcagacctgtttccaggctgatgtttctggtgtgtaattgctagcgtttctgaagggttttcccaattgttttagccttgtgaagtattcttaattataacttgcctttcagcgatggtacatgacttgattcaacgtttggttctgaacttacacactgatgcgtttactcatctaacataatctgacagggcctcagcaagggagccatacatttttgtaacattttgatatgttttaatgcatctgacttagatcttactgaaataaagcacttttcaaagagatgtgccccgtggatgggtctgtgtgtgactgctggctgcgggagctctgtgttgtgagagggtggttgtaaggtgggtgacaggaacaggaaggagcacccaccagataagttaattttcttccccaagtttatggtttgaacatgtttgggcctggctgttacgtcccaaataggaagtaaaatgagaaggttgtcttaggagctgccagttgagggctctggagagccaggagttgtggaggaaagagcttggaacttctattcagtgaggctggatttccactctcactccaccccttcctcttggaccctgggaccaactcaatgatcctttctctaggacttggttttctcacctgtaaaatggctaagcccccctgcaggggttgggcacctgggcttgctt

SEQ ID NO: 99804 - DNA, 1055 bp, Homo sapiens
aataatgataacactccatagtgacaaatggagaccaacagtcatacattagttaaccatggcatgtctatactttggaataccaagtggctacaaaaacataggctgcaggtgtgtagctattaacgtggaagaatatgatatatatgtatttttgagatgtagtttcactcttgttgcccaggctggagtgcaatgccatgatctcaactcactgcaatctccgcctcccgggtgcaagcaattctcctgcctcagcctcccgagtagctgggattacaggcatgcaccaccacgccaggctaattttttgtatttttagtagagacagggtttcaccatgttggccaggctgcttttgaactcctgacctcaggtgatccacccgcctcggcctcccaaagtgctgggattacaggtgtgagccaccagaatatgatatatttttaagaagcagcttaccaaactatgtgctatttttacaaactgtatcacccatctatattagcatctggaaggatgtatggtaaaatgtcaatagtgattatctctgggtggtggaggtttgcgagatttcgatcttcatcttttttcatatgtaataatttatttttatgttttattgtggcaaagtacgcataccataaaatttacccttttaaccgtttctaagtgtacaaattagtggcattaactccattcacaacgttgtacaacccatcaccattatccatgtccagaactttttcgtcgttccaaacagaagctctgtacccattaaacaataaccccctcactcctttctccttccagctcctggtagcttctagtctacttaccgtctttatgaatttgcctgttctagctacctcatatcaatggaatcaaacaatatttgtccttttgtggatactaatcttttcatttatctatatatatttttcgtttttgtttttgagacagggtctcactctgttgccctggctagagtacagaggtgtggtcatggctgactgcagcttccgtctcctgggctcaagtcatcctcccacctc

SEQ ID NO: 99805 - DNA, 1052 bp, Homo sapiens
atcagcgaaggccgagtgaagatcagagtgcagagatccgaaggagcctggagcacccagaccttgaactgcacacgctgcaggcgtcagcagtagatgccagcccagtactcaggaatgggaccagcccgtccagcattctgctttcaagggagggtccagagcaggccatctgcagcggggcccagggaggacccagaggcctccccgtgatcctgagcacgagcctcacttgccaccaccagagtaaggttcaatctctcccaaagatgcgtcttaaaaagagctgggcaggaaggaagaactctgagagagggtttgcgtaagaagaccagagggaccatttagtattgcataagacttcatttaccagactaatattcagatatttttcccctctgctatccaggaggtaagaatttacagaggaagatccaatgagatatagagaaataaggaagcctaagtgaggtctacccctgggctgccgccacctcttcacacgtctggtgcaccagcgtggcaggccagctggacatctgcttgacgggtgaaaaaagaccctcttgggagagaatctgcattctaaagaaagaagaaaacaagtggtaacgcggcttgagttgacagaaggctaatgagattgtcactcaactctgctcccaatctggtcccctggacacacaggagggggctcctgggaagaagaaggggctctaggttacaactgaaggggctgttttgtaaacctccgggtattctcagacccaagcaaccatgttttgggaaccctcctgctgagtaatacttaaggggccaaccctccactgttcagcttctctatttcaagagcttgttatgttgacaacactacctagaatgagacagcttgattgccaaaacggtcacgactactggctcccagcacacttgctgtttgcaatgtgatgctgcagttcctccaataaggaagtggagtctacttctccaccttgaatctgggctgacagtgtggcttgctttggccaatagaaggaggcagaagtcatgtt

SEQ ID NO: 99806 - DNA, 2222 bp, Homo sapiens
aggccggttagtctccagtttccacagagaccacctacccaccaccttcccaggtcacctgcctggtccctgaaagaaagcatttgtgtgggcaatcccaacatgaaatgtagacagcgtgaatacggacaggaggtgatgccatattcacagtgggggatggagggcccccacccctgcttcacagaataatgggaagtgactctagtctttgtaagcaattttcattctcattaggaagttaaatgtagattcacagatacatttactttcagaatcctcaagaggatttcaaatgctaacttttagtttcttgggattgatcaaggcaagagaagtggctttaaccatgccagccagaatgaagcatcatgggtcctgatggtttcccgttttcatggtaacaaattcgcacagaggttttgctttatgctgtagaataccgactttcatgatgacaacttggtttatgcatgaatattgcagtatttccatatagcaaaataacatttctacccaggataatagtcacagttttccagggagggaatgatataattttcatgacaatgtcatgtgatgatagaatttctccattgatgaatctctagtatgtgtgtatactttatttacccatacgtatattttatgaccatgagctaagttgttatttctttcattcatatccctgctgaaatattggtactagcaacttaaagttggcaagtctcatcttcagtaatacggatgccatgggagtggccaggccagattgaaggtgaatatggagcagtagcagaagcctcattccagaacccatctggccagagaagcagcagcatcctgggggatggccgtgcatggggtgtacactcgctataggcataggcccggcatggctgtcgctggacgccagctgtgcacacccagccacacctgctgcacgccgcgttagtgtgcggctccgggcctgagcattcgcaaagctcgcttctccagggagcctcctcttggctttggaaaagagcccagggacttaacgtgctgcctgttgtactctgtcccctcatgactttttagacacagggactaggacatcgaccaccctctgcccctcctgcagtcagaacccgagtagtgcaagaacggccacccggttttgccagcgttcagcgtctgcccatggacccataaggcacattagcgttgggggtctcttttcagcagcctcacagacattcccgtcctttctggttggtgttgactgtgtttcagcatcactctaccctcccatgtccttagcattgctgtgcgtgtttccaggcacttaggacacccttccccacgttgccatcttactgacagttcaaatgactctccttttttgttcgttagtaacaatcttcatttgacaccttaatacatttctgactgttcttaaaacagtggggatgcctatattttccttgagtttttgtgactgactttggctatatatacctttctggggttttgtttgttttttatttttattttgattaccgagggtatttggggtggggttgttttttgagatgtgtaattcttttatggagtttttaaaaagaattttcatattgtttttctaacatggcttcattaaacgtttaagtattttaaaaatatgtaatatttggaccagatgttgtgaataatagtagagataaagctattttattctgtatttttaaaactgttccgtacaaataaaagctctcctggacacagttttgctcttcacgtgcctccttcttgggctactctttaagaaaagagtcatccctcagaatctgtaggggattggttccaagacctcctcggataccaaaatccgagactactcaagtccctgatataaaatggcatagtgggtcaggcacagcggctcacccatgtaatctcagcactttgagaggccaaggcgggagaattgcttgaggccaggagttcgagaccagcctaggcaacatagtgaaacccgccccccccgccccgccccttcactaaaaaaaattaggcacacatggtggtgaacgcctgtggtcccagctacttaggaggctgaggtgggaggattgcttgagcccaggagttcaagactgcggtgagccgtgttcgcaccactggaccccaggcgaggtgacagagtaagactgtctcaaaaacataaaatggtgttgtgg

SEQ ID NO: 99807 - DNA, 3332 bp, Homo sapiens
aggatagggaggtcagaaggtcattaggtgattgcttgaatgaggacatggaggggttagtgcttcttagacttctggtttgggcactggatagctgagcaccttcacctcctcaagtattctttgctgttatctaggcaggtttgatctgtgggaccatgtgtgtgtgtgtgtgtgtgtgtgtgtgtgtgtgtgtgtgtgtgtgtgtgtgtatgtgtttgacgacagtttcattttcagtagagctgctaaacgaagcattcctttgttctatcttgggatgtgtgacaggcactccagaggaaagaggaatccggaaatggaagaagggtgtgggcaaagggaacaaatcactcgacggcatggagtcgtacaatttgccatttggcatgaacattataaaaaaatacagatgcttcagctacttacccatcagcccaacctttgtgggctacacatggaaaggcctcaggaagagcgacaacagccggagttcagatgaagactcccaggccacgggatagcctttgctgtgccctgtggcctggccgcagtgaggcatgtatctgtagttccttgctgagtaacaagaagtaaaatacatgtttgtatatctacatttacattctgcgccccagagctaagacagactgcgaatcacttttctgctgtgagggtgatggtgcctgatgcggtgtctcgcctatctccttatttaagcccttaactccttgccctttgagagtgtccattgctggccatggtcactaaatttgaagttccagtcctccctttggagtggacatttaaaatctgcagccattccttgcttcagttcccttccaccacccagggctggctttcctataagccacctccagggtccaggggctttctctctctctccgaagcccctggacctgtttccttgtcatttgaccctcgtctgtgcccgcggagacctcctctgaccaaggggcactagtatgccttgcgctatcatgactgactggcccagtatgattctgttgtcgctgatctcccggaggaggaggctgttgacctgaaaacagtggcgtggctcccctgtgcccagatctggccatgggtgaggcctgcacagatgttgaatgaacatctgtttggggcattggagggaaaaggaaaggaccctgaagccaatatctgattctcggctgcaccttctcttggccaccctggccctgaccgggccagcacgtgcacactggcctcttttcatttcactagtggccgagacaccctctctggcatttatcactgttggccggtgtgatgagtatagagtgccacccaaggcaccagtcacacaagctgatgggcgtcttggctctgccgtcatgtggatgttattgtcgcgcgcgtctataattacaaggttttattcctatttaatgttattgactatagcagattttggaaatcagtgttttccatgtgaccctctttccttgcatccctattccttgtcccccacccactcttccccccatcaagaaaagaaccagcatttgtaaagctgtggacaccatcagggaagcttgttgtaacggcttttgaaggccagtaaccattgttgtggttgtgttttgtattgcttgataccatgaaagtgtaaatactgtaatgcctaatctatttatcaaaactgactactggaccggagcccagaaaccatgggtcaagttacacgtgaatttgttttgtgaagaagggaagctggggcaggtaacacgcagagccgccacgtggaacggtctgtccgccggtctgtcccgcttgccgggcttctgttgcaagtcttggcttaaggagacttcctgtgggttgccatgtcgcacgtccgttagatcttgattttacaggtgagggtggttgccaaaggtgataagaaaagcagccaacaggctccctctcacttaagagagttctaattaataacactaaattcttcctgagaaatgactcctcttggtttggtttgaagtttttcagtgaaggaaaaggcctgagataggaagcagtgccctcgcttcatgaggtggcacatcttcggtggccgttggcctggtcgagctttggtcagctgcgtgggtgcctgtctcctgtctccagcggcagggcatggttcttggcagcctggtgtccacacggtgcattcctgtccccctcggccccaggctggctcagctctccagtgctgcggcgctgtctttgcagcattgccatgtcaccgtagcccccttcactcttggaagtttggggcttcaaggtttattctggcaagaacacctcggagccactgcattgttttgccaaaaacttactgcagattaagtaaagaacttagatgctaaattacatctaattttgtatgtttttttaaatgtgtctttgatgcatactttagaagcacactggctcgcggtttccatccctcttgccttgggacactcttgaggctggcagccctcctgcaatgagttgctctcagttccttctgtttggattttgctcaacatctccagtttctctgctctgaaaaatggggaaaactgctaaacatcccagagatttgcaatcttctagctctccaggtgagcagaaagaccaaatatccaaataaaagcctgaaagccattggtgatccaggggcaccttctcttcagcttgactgggcgtcttccgctgcataacactcaaggtgtctgctctagtcatccagaaacccactcccttctgaagcccctccttgggccgggttgtatcaggaggattcaaccccgctaacatgtggggtgccctctgtaggccttcacacagggaaggaagccctaccctttcaactcctgttggagtgagagtttcctgttctgattccactgtggccaacccaataattctgtccgaggaggggtaagggaataggaggtggggagcaaagagggcagcctgactagatgcccctgctgaatctggtactttctgcacagccttgagtgattggagtcccctaatgactaataaacttgaacatgtaacacacacacacacacacacacacaccattttaggaagtggttctcctactggaaaatatgctacagaatgaaagtttgtaattgaaagaaaaagaatgtattcatctgcttcttgggtttaagcacacacctgaaggggagatattgggggacacggtggccactcgcggtctgtgtcatgacacttcccattcacatcattggcctgcgttgctggggctttgaaccaccaccccgtactttgttttgcct

SEQ ID NO: 99808 - DNA, 1044 bp, Homo sapiens
ttagtatttctgaccaatttaactcaaataccatccctctgaatgggctacttaaaactgaccattttgacagtgggactctgggtttgatctctgcaccatttagctgtaataaccagagacatgcaccagatatttaggtaggtctccctgtttaatcaaaatgtttgtgtagagagagaaccaatgtccttagttttctatttgacaaacaaaatgccacatggtgtttatgctcccgtaggagcccaaatagcgcgtacgccgagggtcatttggctcagagcgcagggtggctacagtctgaccccacacgtcccccttcctgtccctgcactggtctcattggtttctgttggacagagaaggggtgccagggagcctgccctcacctgccttgagctgtccccgctgtagtggtgctggagcttgtggtctggtttgtttttctccaggaatgatcacagctgttggcctctctaacctgcagttcattgatttaaattcttcccggaacctctttgtgcttggattttcgatcttctttgggctcgtccttccaagttacctcagacagaaccctctggtcacaggtgaggaaatgggctttacatcttggagtgggagctggaaccacagccgccagtccacacgcagctctttgcccattggagaggactttgggcctccaggagctgtggtgcagatgcgtctgtggatctctcttgaatctcacttttcaatacttacctggaagcgctgtgggcttcctgctggcgtgtacacataacagtcatggatgctaaggtctctttttcactgggaccctctcctttgggagaatgcctctctctaaatgcttttgatttcattagtctatcttaatagactaatgctccattaagataatttttttttgaaactcaacttcatagactttgaacacgttattctactatttgatgtctatcctattaactcctcagagcaaaatcacgtggcttgtgcattcaagattaacctttttaactcctccttttgttt

SEQ ID NO: 99809 - DNA, 1034 bp, Homo sapiens
ccaaaggttggtcaaaacattcttcacaccagcagagatgggaagatggcatgtgagaatagtctttcagcgaaatgtaattaatgccaaaatggataaattgtaggtatagtacagtaaaatttgaaaccagtaacaaaaggatgaacaaaacccacaaagcacttacaagcttaaaaaaaaaagtgttaaaaatcactctcagagaggaaattgaaactttgcaattaattactgatagtttaggaaatgatggcaagaacagcaccagtcacacttagtagccagaggtgttctcaagaaaattcacaacctttaaagcagatacagcacatgaagaatttcagtaactaagaaaacaggacaaaaaaatgaacctagtaaaagcagggggaacgaattaataaagatacagaaaatgtgacacaaatagaagtggtaaatctaaaagctgatctcttgagggggaaacaaaacccaatgtagacaaacttctggcaaagctaagcaggataagaggaagcctgtgcacatagatctgccacagatcccgtcagagggagcaaaactgttacctccccccaaattaaaacaaaaagtaagaaaatagtggttttcagaaaacttaagtaaccaaaattgactcctcctcactcttatctctaagtatgggggtgcctccacacttgatcctggcccccttctctccatgcacttcccccaaggaaatcgcatttctttgatggtggatagttccatggaaacctgtagttcagacctgtaaactcgatacttacagatccagcccctattttgcccctccacttactgttacacaagacatctccatctgtaaatgaaaaagccccagacttttgattcctttcctgcccctgaaaccagtttcttctgctttcctcctttcggtgaatggcacaaccgtgcccctagttgcttcagccagaaatgtctatctgttcttcagtcttcctttcgcctcatcccccacacagcccatcctgcccttcctcctc

SEQ ID NO: 99810 - DNA, 1045 bp, Homo sapiens
ttctgtaatacacctgcatcatgaatgcaggccccagttagtgccccctgaagtttcttgtcgggtcctggggaattttctagctatctctcccaagttagatgatgtaataacttattgccttgcagaattatcagttgtggttgtaggtgacattctgagtgtgcagtgtacaagcagctcactctcatgtctgtgccatctcttgttgcagatccagggggccatcatcatgtcctcactgatagaagtagtcatcggcctcctcggcctgcctggggctctactgaagtacatcggtcccttgaccattacacccacggtggccctaattggcctctctggtttccaggcagcgggggagagagccgggaagcactggggcattgccatgctgtaagtggaaacatctcccctcatcccaccactgcggggcagcctttaggaacattcacacagacttcaggagataatgtttttcaataataagaatggtctgacagtttcaactttatttgcttcgtgctggggaatagttgaagggtttttgacccagagtttgggaagtgacatatagttgacgtattacaaagacagacttagcagcaatatgaagagggtggattgtaagtttttaagctttggtagtggggtaaggtagtggcgccatttgtttttgacttttgaggtcttgccaagtctcatgttcatgagttgacatactgagaagccaaatttttatatcatgagactcaaaaatattccagagtggcaggaatctggagtatttccagagaagtcgtgggaaaggtctgttgccattgatgatgtgactcttctccccaggccacactgagctctgcactcctgacgggtgggtggttgggggagggacatagtttctgccagggtcctgctagtcagtgcctgtccttttgtacagaatgtcacatccattaaagatgtcccttgccctttaagtaaagttaacattttgtgttaatgaagtcacaggggagtttgataatattactgatgattagag

SEQ ID NO: 99811 - DNA, 1801 bp, Homo sapiens
aaatggtagtctttttgaatagctaaagtgttcatgaagtcaatatgaagtatctaaaatataatcaaatcatgtcatttgaggatctctgcatttagtttgaggatgtgggcagcaaatttaatggagattctgcaagttttctgggccctttaaaatatattagaatgtctttaagtatttttatgattaagcagaatatttattttatctgctgtcacgttgtaacttacagctctgtagatctagatcactattatgatttatctgtaatcggtgattagggcagtttttgatttacaaaatgaaacaacggagggaaatttgttcctgtgataaccaataagaattttaaagggaggaggagggaggtaaaaaagcagaaatacactgatgtttaaaaaggagtttataagctcagcaggaaagagggaacctcaaatgcccgcagtctcccgcctgcaagaggaaaggtggtgatggcaggggccggtgttggggtgttggcactgaccacggggcccaccctggagctgcctgggtgggaggagagtggcaatggggaggatgaagaagccactggctgtggctgcatggcacaggaaacctttgcaaactggggctttttcttctaggtgtgcctgcatttactcatgtgctgtatgtctatggaaaagactgttaagctgtcaaatagtgaactacctcggtagttcccgatgccgtgatcatggttttggtctcgtttcttttaggttacccctgtttcaggccagtgcttttgcatttttggcccctgctcgagccatcctgtctttagataaatggaaatgtaacaccacaggtaattgcagttatttccacatatgtcattggggtcctttaatgcaggtgtaaagggaggcctggacgtgctgccctcagcagcgctaaatcctttcaagaattagggacaaagcacacaaacccacaaacagcttagaatgctccatctgtggatcgtgtctgtctctctctttctgtccacttgttcatccctaaccctagagcaagaaaggatcagaattgacctcatttctctatgttaatgaaattgacaaatatgggaacggaatagaaaaatatttgtgctatttttctgcctctctctttcagtggattttatgacccaccagtaatcactctctttgctgcgtcagcatcccttctctgaaacatctttgctttttaaggatctggctactgtggtttgctgcaaatgactttcattccccttctttagtgattgcaaagatccttaaggaacccgataaggtcaggaaaagatagggaatttaagaaaattagagtcagacctgtactctcaaaaatacaattacattttgaccttctaggagcaaagttttccagccttcatttccttccttgctcctaggagttactttgtgaccactgatttgatctgggaactggaaaaggccctctgttttatctaagtttttcaaacctcagtccagcaaccttgctgtcgggcatttcaatgagctgtgtgcaaaggttggtttttttgtgtgaggctggtgctagtaacgtgtatcaccacttcagttagcttttgacaatttggggagctcttagtcgatgaattcatttggttaaattagcatttgaggatccacctttcagtgagataagctatactgttggaggttgaattttagggatggggattgaaacagatgtaataaaaacagggagaaaattcttcttaaaaggtaaaatgaatatgtcatgtgagaca

SEQ ID NO: 99812 - DNA, 1062 bp, Homo sapiens
atgacctcaggttatcctcctgccttggcctcccgaagtactgggattacaggcatgagccaccacgcctggccttgcttttctttaaaagtagttggtacacacactcctagtggtagattcaataaagaacctatggctcctcaaagccaaacctgttacatctcttaaggattatttttcaaaaatttttcctgcagtttagactcttgagtgttcatttgacaatgcagggttttgtaccaactttggttgttgtcttggtagatgaaggaagccaggcacagagtatatatgctctgtgttggtgaattttgtttttgttttattcattttcattaacagtttagttctgggcagatacattttgtatcttcatggtgtttcccataggaaccattggcttttaaagtttctctgatggcaccagaggaggactgcaagccgcccggcatctggaggcttatctggttgaatcatgaaaacccatgcacatttcacccccaactctgagtacttttaatctaatcaccactctcttccaaatgtgcagtcaaaaccaacttgccacaaagacttaacctcttatttttagtttaatagaagtcctttctgagaatataaatagctccttcatttcattaagtattcattggtgctgaggatacatggtgggtcaagatggtgggtgaagccagtccacttcctagtatcgggggatgcccgcctcaaggttgagatgggcaggacagcttgtggggagtgcaccagcacagacagcagcagcccgaggaagggagcagatagaggctggacacaggcggagatctgattcaggctggctcgtcatgtgagcggatgccaaagggaattaaaaagcaaagatgacacacagagccatgccacagcctattgggatgtcctctgtggcttggttccttcaagactgagaatagcttcagggttaaggtcacctctcccagttctcctacggtggtcctttcagagcaggtccttcactcatttccctcttgctgcaggaagaatgcggggcatttgtca

SEQ ID NO: 99813 - DNA, 1089 bp, Homo sapiens
gctcatgccaaggaggccaggcctggccagcagctgagcctgatgggcaaagttgctaatgggacacagaagggagggcctgggggaacttggggtaaatacttttggtcacagagggcatcatcttgcccactgttggggcacaagacctaaacagaactacctgggtcagcgtggttcacctccctgctggcctgggaagcagtttgagcggagtaagaacaggagagggatttgacaccctactgggatggctcagggacccaaaatgcagagctgtggcctggaggagggtgcgtgtctgtgcgccccatgcccacaaggctgggtgaaagcagcctttcttgctgtgtttgtgaggagtcagagtgagtcccccatgacctttggctgtgcaaggaatggcagccccacccctgcttccatcctccccacagtgtggccatttgcttagtcataaatcaggtggtgctgactctaatcacgtcagcaactgtgtgctgctgggcaggtgcaggtgtgctggggactttggtggggtgttgggcttgtgataggggttttctatggttgtcggggtgtgggtggtgcccgttctcttaacctgggcaaagagaaagagtactggctcagccctgcagatattcagtgactggtctatgtggcaggtgcggggcctggccattgtggggcgcaatggtgacatcgaagcacatggcttgcagcacgaagggcagcgccatcagggagacacagtgcatcctccaggggacttggtgggagccctggaggaggtggtgtttgagacaggccctgcaggctccaagggctctgcccaggagggctgagggagcagcttccatcccagcaggggcaggagcaaaggcaggaagtcacagcctggcatgatccccctgcccaggcacacagaggccagagcttgggacttatcaacaggcacagggagcattcaatggctttgttagcaggggactcgcccccggggctgtgccttgaaggacgttacttggttacttagtatagggggtgaggaccatcccaggggatcagtgacatccatgagaaagg

SEQ ID NO: 99814 - DNA, 1061 bp, Homo sapiens
gctgggcgtggtggtgcgcccctgtaatcccagctatttgggaggttgaagcaggagaattgcttgagcctgggaggtggaggtcacagtgagccaagatcgcaccattgcactccgtcgagggcaatgggagtgaaactgtcttaacaacaaaggagaaatactgaaaaagaaggaaaaaagtatggcttggtcgaaaaaccaaggagattctttatgtgggctattttttaacgacaataagagagaagaattaggatgaaatcaagaataaatgaggaagggtttactgtttctcctctgacccttttcctgcccacagcactacctgacatgcttcagcggcacgatcgcagtgcccttcctgttggccgatgccatgtgtgtggggtacgaccagtgggccaccagccagctcattgggaccattttcttctgtgtgggaatcactactttgctacagacaacgtttggatgcaggtgagattggggtactaatgggggatgccaaagcccccagaaggcattgagcgcagaaggcattgagctgcgccgtttgcctagggctgttggcaaggacagaatggaggcacgggaatgtcctagtggccgttggtccccacccctcagtgttcctcccagtcatttcctctcttggtgaatggcaccaccgccaccttcccctacccagttgtccaagctggaaactcagcctcactctccttcccctgcccccttggcaagtcatgctcgctccccagcacccctctgtgcccctattccttacgttcagaccagagtgtcccaccaggctccccgttggcttccctgcctccagggcactgctcttggactcactttgtgccccacacccagtgccatctttctacttccacaccctcctcagggtgagccacactgcagctctcctccctttttacacaccaggctgcacccagcatttaggcttgcccttgctctctgccccacttccatctccagccatgcctctgagccctgtctcctgccttccctggcctcactcccaagggcccgctgtc

SEQ ID NO: 99815 - DNA, 1067 bp, Homo sapiens
tttaaagtacaaagatcctttttacttgcagggatgaagtgggctgggaggggcagatcagtgtgctgtctctttgaaagtggttaaaattttctaagatttttttcatctggggtctcacgcaaggactgctcgtgccaaggtatcattttgtggtctcaacctgggaacatctctgtccatgcaggaggatccccaggcctggggagaagctctgagcaagtttggtgttctcagggatgagatgttgcccaaggacgctgaccccccaaattctgaggattgaccatcccggtgggcgactgtacttgagccaaagagaatacttggcttcaaagatagccaaggctcaaaactgcaggaagatggcaaccacttgataaagttgtttttctgtaatagtggcctgtacatggccgagctaacactggtcttcacgtttaatgagcaccttcttttctccttctggctcgcagagctctctcgctgagaccctggatagcactggcagtctggacccccagcgatcagacatgatttataccatagaagatgttcctccctggtacctgtgtatatttctggggctacaggtaagatggttcctgtaggatgtgtaactaccagcaggtgtttgcattgtctaccatctggaattgtttaaaaattccactttggtttttgtttattgaagacttttataaattcctcttttaagagtgatgagtaggggctgagcacagtggctgatgcctgtaatcctagcagttttggaggctgaggtgggcagatcactggagcctaggagctcaagaccagcctgggtaacatggcaaaagtccatctctacaaaaaatacaaaaattagccatgtgtggtggtgtgtgcccacagtcccagctactcaagaggctgaggcaggaggatcgcttgaggttgaggttgcagtgagctgtgatcacaccactccacttcagcctggttgacatagtgagaccctgtctcaaaaaacaaatgatgaatgggaattgttgacatcacagcaggaggaagaaaagaacaggtag

SEQ ID NO: 99816 - DNA, 1013 bp, Homo sapiens
agtctggactgagctcctgcagggaggcaggactgcattctcattgcctgggatacaaccacaatttgttgaatgaatgaatatgtgagctttttttctaggcttaggagtgtctgcattttataatacagatgttccttgacttatgacagagttacacccctaaaatgcatttaatacacctaacctactggcaattcatagcttaaccccgcctacctcacatgtgctcagaacccttacattagcctgtagttaggcaaaagcatctaacacaaagcctattttatggtgaagtgttgaatatctcttgcagtttcttgaatactgaagtgaagagcagaggggttgtatgggtacttgacagtttctacggaatacatatcacttttgtaccactgtaaagtcaaaaaatcctaagtttaaccatttaagttggggatcattatacttatttgtgtatgtataagtagtgagtggaatgtgtcaggggagcagtaggaattgctaactcatttcaaaatctatcttcttagtgccatgtatacagatgattttttttaatgtatcgaggtgaagtttgcataacatgaaattaaagtgaacaattcagtgatattttaatacactcacagtgttatacagcctcgtccatttggttccaaaacattttcatctcctgcaaaggaaaccccttactggtaaagttgctgttccctgcagcaacccgagataaatgcaggtgaaggttagtttggctagagtcagactttcaatcatatctaggtttctctaatgatttagtaactgatccgtgttttaggagagttcatcctgagagcgtgttgctcttggcttctcagtgggttgagcactgctgcgatatgacttggagcacagttctctctgtaagttaagagtttcatctcgtggacctgaacttggccaggaatgtgtatcctcccagcagccagtttttataggtaaaccagctccacaaactcagttggctt

SEQ ID NO: 99817 - DNA, 1065 bp, Homo sapiens
aattttgatcaccacgtatgtggtgttaacctggggaagaattagtgtcccagccccagataattgcagtgcagtttaggcaaacccactcttcagcccttaggtaatctattagagcaggtgaatccctcagagctcccttttccttatcttgggagagtctgcagggaagaggaactcttggtatactggactagtggggagcagggggtatggtgtggtggggagaaacagtactgcacaagagatttgcaaatggaatgtcttccagatgagaccgggaaagtggttggtgttgagaggactgaataaatgggccaaagtccagcaaaaccaagcaggcgtaattgggtagttaggaaatagaggcaaagtggagctggatctttctctgcaggtgaaagaaggaaatttggctttggtccttggagaatgacatggtctgaagagcagatcacagagagggctggtgagtccgttgagttacttgagatgcttctcccagcacctgagcctgccttctcccagcaggggcagctctggcaacagtagctggaggtgaccaagtgccctactgaggcttcctcttcagggactgtgctggaaagaggatggagcaggcatcccagacacagtgggactgaatcagcagggcacagccatctcctggaagttatccaggctcccaagatttttgtattgggtgagccagggggagcatcaaatgacaaaaggcatctggagacctggaagagaagaaagcattctttctattccctgaaagtaactcacaaattttcctcagcttccttcagaatgacttttagatatgaccttctcaggcctattctggtcttttggccttttcttcagagtctcgttctcttagcttggaaggtaacacgaacaacgtttgtcttccagaatgattgttggacccacaacattggccctgagcttttttgcagagataaatcaacctctctgtgctccagtttctcatctgtgaaatggagagaataacaacccctcccagaatttttataagggctaagtgaaaccatg

SEQ ID NO: 99818 - DNA, 1074 bp, Homo sapiens
agaagaagtttttaaaaatcttacatttaggtttcttctaccaagtgccattagatttcgtaacactagagggtgctgttaatgcatttgcttttagcatttctagcatctgcccccttgtcttattacagagtcaaagtaggttttgtctagctgataatcttgaatctcttttgttgttttactcagttttacaacagcaggggcacagaaatgtcaatatctaacatttatctggaaagacagaaatgatgattccaaatgtggaattaaaagaaaaacacattttagattttattcataaaaggaaaacaaatcagagattatgttaatcagattagatattttcaaatgcaaaattatttctgaagaattaaaagtttttttcttgtatttgtccatatttagcattttagttgttttgccctattttctgccctgagttttctaaccatacatacatactaagaattgagctattgataatttttcctcctaatataaggagagggatataactaaaattttaagaatgcagataaacacaaaaagaaacacccgtaacccctatattatagagattaccaccataagctgcttggtgcatagccatttttttttttaaagctcaatcgcacatgtatatatacagtacttttttaaaaaaaaaaattatttttcagacagaatctcacattgttacccaggctggagtacagcggccccatctctgttcactacagcctcgacctccacgctcaagcgatcctcccacctcaacccttcaagtagctaggactaaaggcactgcccccatacccggctaatttttttgtattttttgtagagacagggcttcactatgtttcccaggctggtctcgagcccctgaggtcaagtgttactcctaccttggcctcccaaagtgctaggattacaggcatgagccatcgcacccaacctatacggtactttaaagagaggggaatcacgagttagtgctcatgtatgggaattttttgtatattcattttataacttactatctttctgaagtatcttattctagggtgt

SEQ ID NO: 99819 - DNA, 1074 bp, Homo sapiens
gttccagtgtccttgagctctcctgcccagctctatggttgtatgtgttttctctgatttgctaggtgtccggactgtacaatcagatgggaaagagcctcagcataatgtatctccatctccttgctccagcccaccaagggcagtcagggatctagttggatggttggtgtcattccatttgccttgagatgatcagtacagatcctaaaatatcacggtcttactaaactgagaaaagaggaggcttgctcgtacctttcgtttttgtcattaataacatacaggtgattgttgagtgcctggctttcatagctgagaacacccattctgcttggtgcctgaagcctgcagactgggtgcatggttctggttgaagggtattttagcatttgctagaaccaccacagatgctgcggaactcagttataaactggatcaaacacttggagcagtgaagagaattttctattttattggtgcctgatttccaagaggcctatgtatcgggaaatcctggtgtttttggtttatagactttgtgctgttgacgtcaatgtctcattttctcattaccaaacatgtcgtataaaaatgttgtgttgcttatggtttgatcagtagcaaagagaattaaatatttactggagaaattgggtggtttcacaaacctatgtaaacactgatggtgattacagagcttacataagaaggtaaggaaggaagatggaacagttgtgtaacagttactatgaaagagattccaagcaaattagaacaagtctggccttttcaactggttattttgaaaaatcaacatgttagtgttggattaagaccagctgtttataaattgtctaagttgtttgctgatttttctgtatggtgttaaaaaaaaaactcatcaataaatttgtcccatgacttctaatgataatcctttttaaatacacatattattttgttttaggtttgccataaactggaacttgcagatcaatagcaataaagcctttctggatttgagtaatgtttacctttggatgggccctgtgtttatttagatttcttgta

SEQ ID NO: 99820 - DNA, 1272 bp, Homo sapiens
aatggaaagcatatggacaggtctacgccacatcacttaggtgcgtgtaaaacacaatctccagttgtgtttccttttccttttcttactttttctgaaacaggttcttgctctatcacccagggtggagtgcagtggcacgatcacagctcgtggcagccttggcctactgggcttatgtgatccttctacctcagcttcccaagtagctgggactacagacgtgagccatggtgcctggctaatttttaaatttttttttcttagagatggggtctcactatattatctaggctggtttccaactcctgggctcaagcgatcctcctgcctctacctcccaaagtgctgggattataggcttcagccaccatgcctggctagttatgcttcatggtagaattgggctggcagctctgtagcattagaacccttttgtacttgaccttacctttgtacgttttttacgtgttgagaacggtctaaatgcacaacctttggaataatgaattgttaggttaatgctaatgataaggtaatagacttctttaggccaaattccacgcaagtagattaaactagaaaataaacaggcacagtcttgccacttatattaattacaaagtaggaggtaaatattttcagttttctttcatgcttttgactttattatcagcaaaaatttgttgagtacctcctgctcttggccctccgtgaggtttatacgtgaggaacctggagtggaaagagatttaagaattgtttcctcaccccttttcaagcattctctgcagtttaattaatgagactaaccacatgtacattactcaggagcattctttttttcctccttctgttgtttcccttatccccaaagcttgatgaacattttgattatttttaattttttgctattataagcaatactgcaatcaaatttcttcttggggaaaacatcttagcagtagtagtgatgggcacagtgcatgaccttttaaaatttgatacatgtataggtaaattatccttcagaaaagccgcaagtgtttcacatctgccgatacattctctcagatactctgcttctggatgtggtggtgcacgcctatagtcccagctactctggagactgaaacaggaggatcacttgagcccaggagttcaaggatttagtgagctctgattgtgccagcgcactctagcctgggtggcagagtgagaccctgcctcaagaaaaaaaaaaaaaaaaaaaggatgctgtcagatacattg

SEQ ID NO: 99821 - DNA, 1048 bp, Homo sapiens
aaaaatacaaaaaattagccaggcatggtggcgggcacctgtaatcccagctgctcgggaggctgaggcaagagaatcgcttgaacccgggagtggaggttgtagtgagccaagattgcgccacggcactccagcctggctgatagagcgagactctgtctcatttaaaacaacaacaacaacaaaaaaaccccaaaaaaccccccaaaaacccccacatagcttaagatagatttatgtgtagagattttattttgagaaataaattactactttttttttccttgcatgcaaaatgttttagaaagggaaagacatcaatttcttcattcacgttctaataatttaaagtgagtattttttcccaaatagcacaagaccagtgtttagtttccaaaattaaaaaaaaaaaaaagactcattaatggttccttgaaggctggactggtaccagtctgatggcatttgtgtgctatttaacttggggccgttggcgattgttgatgctaacttgcccaagaacaaatggtaaaagttgatgtctcaacataaggattttccagtgaaaatctggctaaactgttggttgccttgcacgtttttcttcacaagggagggccaggctcatggctggggctgggatggctgttcccaagacagccactgagtcaggctctgggttccctttattgtggaacatatgcataggtacaagagtggataaaacatagccgtttaataaatagtaaaagaaacatctgtgtacctgctcatatcccagtttgagaaacagaatgtgaccggctttttgagaagcaccctccccgtgtgctagtacatttttaagaggctttaacagaaagtgacttatttatttattttttttaaatcaaagaccctgtgctagggaatatggagtttaaaagttatcaatggagaaatcccaactgagtgcaaatcactttttttgcttttgttttgagatggcgtgttgctctgttgcccaagtaggactgcagtggcacagtcatggctcactgcagccttg

SEQ ID NO: 99822 - DNA, 1045 bp, Homo sapiens
tcaggaggctgaggcaggagaatcgcttgaacctggggggtggaggttgtggtgagccgagatcttgccactgcattccagcctgggcaacagagtgagattccatctgaaagataaagaaaggaaggaaggaagaaagaaagaaagggagggagggagggagggaattgccaaccccaaccactgatttgagtactcactcccatggaacattcattatctgttgtttgaaaaatatgcttcatgtcagtggtcctcaacctcgacagcaaattgcgatcacctgggaaactttaaaaaactacggatgctggccacatccatgagaccaggatgcagttgatgagaaattcagcccgagcacttccaggtgattccagggtacagccagagctgagcaccattgctataaataaactaaaattcagatatttatactgcttttaaagccttttcatagttgactgaatgggatggaaatgtgcgtattgctaacttacaggtccttatgtgtcactttgatgacaaatgtattaggtctgttcgtgcactttcttttaacgtaatatgacctgtgatgcagttctcctgagaaattgaatgattatgctattgacttgcccttgggtatgtagggttgtccctggtctatgcagagagcaaagatagagcagggtgtttggagatcatctgtcatttctcagaaatttttgtgtctgcctttttgcagtaggaaatggattgagaagaatatgtaggaaattcacagctattttaggaactgtcatatagagaccactaaatctaaatatactgttgatgtatatgaagctattggttagaactaaggtcagaattagtggaaaaatatcgggactggtgtcctgtcttagagagattaaggaatattaggattgtggtggaacgcgtatacataaagtagcttattttactcattgaatattcttttatctggttatatttgaaagtaaactgtggctgggcgcggtggctcacaccggtaatcacccagccctttgggagg

SEQ ID NO: 99823 - DNA, 1054 bp, Homo sapiens
ttttttgtcctactttgcaaatatttttttctatgccttgacttaaattcaagtctgttggccaagcgcggtggctcatgcctgtaatctcagcactttgggaggccgaggtgggcagatcacctgaggtcaggagttccagaccagcctgaccaacatggagaaaccccgtctctactaaaaatacaaaattagcccggcatggtagtacatgcctgtaatcccagctactcgggaggctgagggaggagaatcactcgaacccgggaggtggaggttgcagtgagccaagatcgcctcattacactctaacctgggcaacaagagcgaaaaactccgtctccaaaaaaaaaaaaaaaaaaaaactgtcaatctttttttatttcccatggctttgttatccctaaattttataggtattcactcatgttttctcttagttctttaaaaaaaaattggctataattagtctgatatttgttttggagtatggtatgaagtaaggattatttgtcccctctagtttatattttttgggtactattaattcatccttattaacttaaaaaataacaccttaatcatatgctgaatccttggatctgttgttttagtcagtttatctgttcttttgccatgaccttactattttagacattaaaatcactttatagtaggctttattatctggtagtgcctatgctcagtttttactccagtgtttttcaatttagggtttcaaaatactccctccatcttgagatggagtctcactctgtcccccaggcttgagtgtaatggcgcgatctcggctcactgcaacctctgcctcccaggttcaagtgattctcctgcctcagcctcccgagtagctgggattacaggcatgtgccaccacgcctggctaatttttgtattcttagtagagacagagtttcaccatgttggccaggctgtcaaaatactgttaatgggaaatttcattaaatgcataagttaatttggggagacttgtcatctttataatattgacttgttctgtgtatgaacagaa

SEQ ID NO: 99824 - DNA, 1319 bp, Homo sapiens
gttgttgttttttttttttttttttttttttgagatggaatcttgctctgtcacctaggctggagtgcagtggtgtgacctcggctcattgcaacttctgcctcccgggttcaagggattctcctgcctcagcctcccaagtagctgggattatgggtgcataccactgtacccggctaatttttgtatttttagtagagatggtgtttcaccatgttggccagcctggtctcaaactcctgacctcgtgatccgcccaccttggcctcccaaagtgctgggattacaggcatgagccaccgtgcctggcccactcatgagttttgcccactcatgagttttgctcaaagcagctgatggctcgggcttccttcccaaaggcatcatctcattgagcacctggtggaggtcatccatctatgtgtgtaactcttacagagatgaatccctctatcttctaagttgaatggaagtgcagtttgataaggtgcgcttctctgttggaccctctccaagcaatagaagggaccctagaaagacaagagagccccatgtgatagggccaaggaaacagtgatggtgcccataggtattgattatgcattgggcactttaggttattattgctagtcctagcaactggcaggcaaggtggcttctggtccttcatttattgatgaagtcttgggtaacttctgtaagttaattcctgagtcttgaattctgttccattaaaccactgtagaacactattcccagctctcatctgaaactcagggtttctaagttctcgttagtatagaagagggcagagaagccagtgtcagttgagtgccagggagctctgcccagcactcctgtgttctttcacgttgatcagtctctgcagccctgtgggctgggtattaacgcttttcatcctacagctgaggatgctgaggtgtggcaggagggcagcttcttgcctagggtcttagcgctgacaagtagagtcaggatttgaccctaggccggtcagttgccaagctcgaagttagactctaatcatgctgtgttccaggatgacttttggggacttgggatagaaagtagggttaggctacagaagttgggaatgacattccagatcgagggatcagtgtgagcaaagggtggagcaggagaggcatgtgactgggagagggtaactgagttaggacagttggaaggatgctgaggatgtgatgggggtcaggtggagaggtcctttgatactgtattatggggcttgaatctttgtctggaaaggcacggggagattcccagaaggggagtgactt

SEQ ID NO: 99825 - DNA, 1092 bp, Homo sapiens
cccccggtggtgcgcacgggcatcgtctcgccccctggaattcaggggcatcaggaggggcggcaagagggtgccttttacattcttgctttcttcccttctacaaagactgcgcgaagtaattttagaagcagctcctccgaccccggggcctttctggcctgttccctggggggtcgcgagtccccctccttgccacctttcggggggaaaaaatgacatttcgagtgtgactactttaaggcgcaggattttctccttcgtttggtcctagatgcccccccttggatgggtggctgataggatgtcggcctgcaggctgggggtttaagcgtgactgatgggaaattatcgattgtcagggcaaagggtaaatgagggcaactgcaggtggaagaaagtcacccataagggctttctgggtctgcagcgtttgtagtaggtgctacttctattcttgcagtgctgggagacgggcgggggaagatgcagtccctgctgacaattgggtcatctgcgcgcagagaaggccccgggatgtgcgaggacatgggactgggagtccggaggcagtctggtttgagctgtcactaattggccatgtgacctccctcagccggcttcgtcctctctgaagcaaaaggctggaattggggtggctggagcatttttattttatgcttttgtatttgaatgctgttgggtttgggcctcaccgtttctggttgtctacacctgcctttttcaccgttgcaggtgacgttgcctgcctcccctgaaggtgtttgaacctggtgagatgtataaagggcccttttcagctcaaaaaatcagaattctgtgctgggttatggttggctctatcagggtcacttatgaacgtattactactgttctcttttcattcatccccaatttaatggcttttgggcaccagtgggtgtgcccagtgtaagctctcatggcacacctgctagttaaagggaggcagcaggtgtgtccagcctgttccatgtgacatcctgagcatgaggtatctgctttctaggctatttcctttgccaaaatggcaaccagcttctttcttttaat

SEQ ID NO: 99826 - DNA, 1025 bp, Homo sapiens
catcagcattacctgggagtctgtgagaaatgcagaatctcagacccaccccaaactccctgagtcacatcctgcattctcaggtgattcaccacaaggaaggctgggaagtgctagcctaggctgcccttatcaatcaatcaaagccattctatgggatgaatgtgtgtgtcctccctatttcagaggcacactacatggctctgtccttgctcctgtccttttccaagcgcttatctatgcattgtatgagaacataggtcataggctgatctgatttgctgacagtaagaatctcaggggaaagctgaaacactggattggggaatcatgatacaaacccactgagaggatggagcaaaggaccaatttcaacaattggctaaataaagttcaaccaaaaaaaagacttcacaggagtatacttgaaaatagggcattagggggttcacagcatctgttccggaacaggtacctggtgttcttaagagggttctattacagattagtttgggaagcaccactgtgctttttcctcctcttagaaagtccatttataggccaggcgtggtggctcatgcctgtaatcccagcactttgagaggccgaggcgggcagatcacctgaggtcaggagttcaagaacagcctggccaacatggtgaaaccccatctctataaaaatacaaaaaaattagccaggcatgatggcgggtgcctgtaatcccagctactcaggaggctgtggtgagagaatcgcttgagcctaggaggcagaggttacagtgagccgagatcgcaccattgcaccccagcctaggcaacaaaagtgaaactccgtctcaaaaaaaagaaaaaaaaaaagccatttatgtggctgggtgtggaggctcacacctgtaatcccagcacactgggaggcagaggtgggagaattacttgagcccaggagttcaagaccagcctggacaacacagtgagactctgtctcaattaaaaaaaaaaaaaaaagtcaatttatgcact

SEQ ID NO: 99827 - DNA, 2100 bp, Homo sapiens
taactccagctacttggaggctgaggtgggaggatcacttgagcctgggaagtcgaggttgcagtgagctgtaatcacaccactgtactccagcccgagcaacagagcaagactcttacctcaaaaaaaaagaaaaaagagaaagaaaagaaaacctgaaaggctgagaaaaacacagagtttattgtagtggtatctgtacaattacaaaaggtgaaaaacaaccaaagtgtccagcagctgtatgtggggcagttaggtaaaactgtagtatgtccatttcggtggaatgttacacatccttacagtttaaatgtatgaaaaggttttaataatattggccacaggacacagagtatggtgtgttcacaactaagagctttaaaaaaaggaaaagaagccaaaatatctggatgagaatgggtcatttttttctttataattgttaatattttgtagtttgtcttcaatttataatcaggaggaaaccttttcccttggtggtatacaactcaaagaaaaagtactgaagagtataaaatactgatctaaggattaggtctgtgacgttttattttaaaatgtgtaactcttacggtactaatgtgtttgcctccttctgccaccagggggcagaccgggccgttccagtgctgatcattggcattctggtgttcctacccggattttaccacctgcgcatcgcttactatgcatccaaaggctaccgtggttactcctatgatgacattccagactttgatgactagcacccaccccatagctgaggaggagtcacagtggaactgtcccagctttaagatatctagcagaaactatagctgaggactaaggaattctgcagcttgcagatgtttaagaaaataatggccagattttttgggtccttcccaaagatgttaagtgaacctacagttagctaattaggacaagctctatttttcatccctgggccctgacaagtttttccacaggaatatgtatcatggaagaatagaggttattctgtaatggaaaagtgttgcctgccaccaccctctgtagagctgagcatttcttttaaatagtcttcattgccaatttgttcttgtagcaaatggaacaatgtggtatggctaatttcttattattaagtaatttattttaaaaatatctgagtatattatcctgtacacttatccctaccttcatgttccagtggaagaccttagtaaaatcaaagatcagtgagttcatctgtaatattttttttacttgctttcttactgacagcaaccaggaatttttttatcctgcagagcaagttttcaaaatgtaaatacttcctctgtttaacagtccttggaccattctgatccagttcaccagtaggttggacagcatataatttgcatcattttgtcccttgtaaatcaagatgttctgcagattattcctttaacggccggacttttggctgtttcctaatgaaacatgtagtggttattatttagagtttatagccgtattgctagcaccttgtagtatgtcatcattctgctcatgattccaaggatcagcctggatgcctagaggactagatcaccttagtttgattctattttttagcttgcaaaaagtgacttatattccaaagaaattaaaatgttgaaatccaaatcctagaaataaaatgagttaacttcaaacatttcagaaaacattttaatgattttatgatatctttaatcccagtacctagatctaccttagtttctaggtagctggcattgtgggtcacactcaactttccctaactctgaggttatggacttgggcaactggaagcctggacatgccatcagctgagttgcaaggctgtgggaagagcaagttttagatgtctactcaatatccaagtggagctgttgaggaggcagttgcgatgcatgtgtgtgtctagagtttaagagtgggtcttggatggaaatagaaatttgggagtcagcatttggacagtatcttaaaagctagagggctgtttgagatcaccagtagagtgagtatagttggaggaaaaaaaaaaaactcaggaagtga

SEQ ID NO: 99828 - DNA, 1040 bp, Homo sapiens
ggttcttatttctctccctggcaaggtctgaagacgggtaggagaataacgtatgtagaggcgcgtaatgccaggcactgtgtgccaaacgttttatgatgcttttagaactctcgtaacattcaggtgctgagggagtttgggggtagcggtgagctggtaaaaagcctgttggcaacgaagactgatactttgaaaatgctcgtttttatttttcccgtcttttagaatcctctttgccaagagtaaacattcgtctcccctctccctcacgcccctgcgatgtattgttttgatgcggatgtatgaacagttaatgtcaggggacgtactttaaaaaaaagtctaattgcaagttagatgtggttaaatgccctcaaaaaccacacatactggtagtttgaactttgttttatagaattaaatgcagccgggatcacaacactaaaaacctactatttgacacagtttgatccaatcttttttgaaaagtatagagattaacattatgctaatttttaaatacttgatttctagaccaggatgtaatcaataaaaacggatattaatatttagcaccaattatttaattatgctagttattttacattgactgcaagccacgtaaaacagttaggccgggcgcgctggctcacgcctgtaatcccagcactttgggaggccgaggcggacggatcaaaaggtcaggagtttgagaccagcctggccaatatggtgaagcccgtctctactaaaaatagaaaaattagccgggcgtggtagcaggctcctgtagtcccagccacttgggaggcagatgcaggagaatcgtttgaaccctggaggcggaggttgcagtgagctgagatcgggtccctaaactctagcctgggtgacagagcgagactccgtctcaaaaaaaagaaaacaccaaaaaaaaagaaaaacaatttgttattttttggaattaggtatgtacaaagtacttagaacagctggcatctaacaaagactaggtaagtactaaccaccattattgt

SEQ ID NO: 99829 - DNA, 1173 bp, Homo sapiens
aactccagggcttaagtgatcctcctgcctcagtttcccaagtagccgggactacaggtgtgtgccaacacacctagcctggtttcccctaatttcattttcccccttccattacaatctatttgttgaagaaattagatcatttattaagttttccagagtttggattttgctgattgcattcctgtgtatacataaattcctctaccctgtgtgtcctacagactggtagctatagccctggagccttgatattcagggtgttttgtttcgggggtgagagagcaagaatataggtggtggtgtgtgcctctagtaggaggcacagggtgtctggatgtgtttgcaatgttagcagctataatagtcattgtctagatccattaagtcattaattagagtttgcagagctgaaattaatacgttttattcacttattggctgcttattagaaaaacttccataaagaaaagctttcccatattatataatttggttatctaaattatagctataggaaagacaagctagataatcgagtcttttgctttatgtatcagtcttcaaaattttcatagctccctccaaagtgaccaatacaagtgtttgtgggtttttataaatatataatgagctaatagattgcaactttcttgatgtttttcaatgatgaatcttttgttttgtaggttaccatagagatgaatgaaccagttcaactaacttttgcactgaggtacctgaacttctttacaaaagccactccactctcttcaacggtgacactcagtatgtctgcagatgtaccccttggtaagataataaatttgaaccttgttttgtaggtagtcatatgtgatacatactcctcagtaattaaccatcttcctgtctttcagttgtagagtataaaattgcggatatgggacacttaaaatactacttggctcccaagatcgaggatgaagaaggatcttaggcattcttaaaattcaagaaaataaaactaagctctttgagaactgcttctaagatgccagcatatactgaagtcttttctgtcaccaaatttgtacctctaagtacatatgtagatattgttttctgtaaataacctatttttttctctattctctgcaatttgtttaaagaataaagtccaaagtcagatct

SEQ ID NO: 99830 - DNA, 2097 bp, Homo sapiens
ggctcagtcgcggttgactttaaatgctttataatgcccttgcgagaaatgtggcagcctgtcatcctacttagtggcaggagattgtttctatccagaagggacactgctggtggtattttagtataaatactgccagatgcgtcccaaaacgtctgcattaataatggcatcctccagcagtccgcttaccctccaccagttctgagacggcctgatgggtgagagtggtaaccccttctaaccgcgttcgaaatacagcccttcagcagacggcgttgattttaaagcatgtgtctcctgtcttctagtatgtccaaaatactaaaatgcgccggcaatgaagatatcattacactaagggccgaagataacgcggataccttggcgctagtatttgaagcaccaagtaagtcgtacctttttaccgagtcacgaagctacagaaaatcaaaactctgtgtcagtatttctcaaaagcatctgctttcttttggtagaccaggagaaagtttcagactatgaaatgaagttgatggatttagatgttgaacaacttggaattccagtgagtatcagtttctcattgtagagagtgctgtacacaggcacgatagttatgtcatagaatgtttgtttatttttacagacagggtcttggctctgttgcccaggctggagtgcagtagtgccatatagctctctctaacctgggattcctgggctcaagcagtcctcttgccttagtctcctaagtggctaggaaggactacgggcctgtcccaccacacctggctaattttttcatttttgtgtgtgggcgtgggggcagtcttgcccaggctggtctggaactcctggcctcaagtgatcctcctccgtcaagatatgttaatataatttaagcctacttcataacaactttttctagaaatatatctactggtgcatgtttcaaagagagattttagtatttggatagttgttcaccacaagtctaaaactcacaggttaaatttattgtttactgccagttgtctatttgcattaacttccatgaacctcttttaaaatttgtttccttctagaatgcttgctttttattaagtggattttaaagctgacttggaagaaatttatccaggttaggtttataaacaccaaaggagagaagaaatgtttgaatgttgaaaatgcctaatatattctcttgctttcttttagaaagtagttaggcctgcttgcgccatcatgatttctgtgccatactctaatgttctcttactttatccctggaggatgaggaggaggaggctcttgttccctggatggtgcatttaatagccatttatttttttgagtggagtttgttaagaaattacgcaagtcatattttaaagtaatcagaaaatattgattctgagttgtttaggtgttgccttttaagaaagtgagggtgccaaatcattaaatttctaacaattaacttttggaaaatttttgttcttaataggaacaggagtacagctgtgtagtaaagatgccttctggtgaatttgcacgtatatgccgagatctcagccatattggagatgctgttgtaatttcctgtgcaaaagacggagtgaaattttctgcaagtggagaacttggaaatggaaacattaaattgtcacagacaagtaatgtcgataaagaggaggaagctgtaagtagtttttaagtaaaaagaaaatagtttgaagagaattataatactgcttattaggttaattgctaaaattaaaagtagacagaattggatcccaagtaatttctgaaaattgagatactgttgaaatctgcgaatgatttataagtgtcatccaatttagaattatatttgcaagaagggaatacaaattcagcacgtgtacataccacagaacagtggtttatggatcaagtccacaccggctcttaagggtaggattgggaagttaggcgtataacctttagctttctggagatacttactctcttaccaaataattgagcataggacagcagctcaatagaaggatatggttaggagtaaaagtctacctgtttggagca

SEQ ID NO: 99831 - DNA, 1117 bp, Homo sapiens
gaacaattcacctctttatcttgtgacacctacgagcgcatcaattctgtaattgaaaaataaagtgcatatttgcagcagctgtactctcttcaggctgcaaggaggcttttcctcccggtaggcttgatttgcatttcactttcactttcgtggctggaaactttctacccacgtagtgggaggctgaggagccaccataaagctggggcttgacgagccgggaccgggacccgatctccacatatgcccggacttgttctgcggccgggttcaggagtcaaagaggcggggagacctgcgcgacgctgccccgccctgcgcccgcttcctccaatgtatgctctagggggcgggcctcgcggggagcatggacacgattggccctaaagtcttccccgcaaggccgtgggctggacagcgtggtgacgtcgcaacgcggcgcagggtgagagcgcgcgcttgcggacgcggcggcattaaacggttgcaggcgtagcagagtggtcgttgtctttctaggtctcagccggtcgtcgcgacgttcgcccgctcgctctgaggctcctgaagccgaaaccagctagactttcctccttcccgcctgcctgtagcggcgttgttgccactccgccaccatgttcgaggcgcgcctggtccagggctccatcctcaagaaggtgttggaggcactcaaggacctcatcaacgaggcctgctgggatattagctccagcggtgtaaacctgcagagcatggactcgtcccacgtctctttggtgcagctcaccctgcggtctgagggcttcgacacctaccgctgcgaccgcaacctggccatgggcgtgaacctcaccaggtgagcctcgcggccccgggaagccggccccggcccgcctgcacctccggtgcttggcgggagcgctttcgagcctagccctcattggctggcgtgggccatccgcgccttctcattggcctgccacgcagtggggtggggcccagctgagcgcgcggttcggaaaagcccgcgctggctgctgcgcgaacctgctttttcgcgccaaagtcacaaagcgggtggtggcgggaaaatcaagggtttttccgcagtgcc

SEQ ID NO: 99832 - DNA, 1757 bp, Homo sapiens
cagctccggccatccgcggttaagcgggagctcccattggctaatcgcacactgaaacgcacgccttttcccgcccctgacgctgccgtccaatgcgcgcctctcgactctgctccgccccgccccgcccccgtcgccctgcctccctggcgtatttgcgccattggtggatattccggaccgtgatggtggcgctgcgcgtgcgcactcgctccgagccctgctcccgggagagggagctctcgggtcggggctagggaaggctgaccccgctcggcccgggtgaaagggcggtgacggcactgggtggggccgagctccagggctggctgctgggctgctaagggaactgtgagccgctcagagccgcgcgcctcccgggcggggcggggccggccgtgggagtccgcgcgtgcccgcgccgagctgcctgctccggcggcttcgctgctagctcgcggcgacgtcgggccgattttcccaggatgacagagctgaggcagagggtggcccatgagccggttgcgccacccgaggacaaggtagcggcagcgtcggggtgggcgcggccgggacagcggcgcatccgggaggcctgcgggggacgcgcgcagaggggtcgtcttgttctctgaccctttgtcgcagccgacggcggccccgggcccgggtagcgcgaagggccctcgggtgcccggccttcgcggcgcgcgcgtcaggggtcggcgggtcggggtcccggctcagggtctgactgaagtggctcccccggggcgcaggaaggagcttctcgggagtggcgcacggcctcctgcctcgctgggctggctgcggggactcccctctcccccaactccgtgaggccttcctggaggtgaagatatgcagagccttcttagggaggcggctcctctgagcgcaacttaggctctccgttcccttttacaatgttattattttggggggtgggggaatcaggacaaggccatagcatttgcctcctgggagatgtaaatcccttcttgggcatgaaatcatcggctttgagcaaaggggtgttacccagtgagccagtccgtcatcagcaggtgttggagggcgtcctcccggttgatgggttgtttcctgcaccgtgtgggctctggtgggtaggggaggagagtaggaaggaggccatcttggcggggacagtggcgggggtgacgggtgggggagtggactcctttgggtgaagtgaaagatctgtgtaggggagttaaggaaggtagggattggttttattactgtggaggttgaatggcagtataggactttgtagcagtagttgtgctttccgagatagcagtgatcaggagccctgtgtttgggaaactgatcagacagtgatgtgtagaagggactgagggagcctggaccagactgagggagcctggttcactcgggattgcccatgagtgacctgtagatgttttctttggcccacatattgccttaaaaatcagaaagtttctcctaacaatctaaatttcttgcctgtcttagataattggagggtccaccatcactttgtcacctgctcaatggttggctggagctgaggatcatcggttcccaccaatccctgttgccttacaccaggctcacggcttcccctaatgcagcctgtaactttttgatgactggacgcaacggacattagggagacacccagaaggaagaaagcacaagatttggtgacaggatgtcaacagagcagt

SEQ ID NO: 99833 - DNA, 1025 bp, Homo sapiens
ccagcctgggcgacagagcaagactctgtcttaaaaaaaaaaaaaaaaaaagctctggagtaaacttgaaagattcctcaaaatgttacagttgcttaactgctgtggcaaaactgtcttgtaaatagaaaatcattagtatcaaaataatctggagcatgtttatttataaaagtcagaaggtattttgttatatttagcatctgagaatggaattttcaaagccaattgctaataaaggaaatgttctcctctgggaactgtgcttataattttaaagtcccaaagcacagtatagttgccaaactaagaaacttggagtttaggctttgggaatgatcctcttcctacccaaccatatttttctgatggagcttaggaaagcaaaggatgagatatggtctgaaagattggcatcttaaaatttatgattgagttggcatttcaggagattttgtttcggaagttagcgtataggttctggggttttctgctttacttaattgctgaagtgctatttaaattagagctttacttatttcaaggcttcctttctagatagatgaaacccatatggagaggaaatagtgacatcatttagaaaggggagtttaaatcttaactgaagatagcgtgtaagagcaggggcttgggtcagttacatctaccttgagcctgggctccgccacataaaggctgtgtaactttgagtagatcatggaagttgtggcagcctcagtttgtccatcattaaaatgggggtcataaaattgtatgtgctttacaggatattcatgtggattaaacgtatgtatgggctgacagcagagcttgtcacataatatgttagctatgttgctactgattaaaatagatttttatagaaaaaactttaatattcatcttacacacttgaaaggtgattaaatcttcaagttatatatatttgtagaacctattcatattcattaccttttaaggaaagttttatagaaaggacttagccttctatgacctatcttcgg

SEQ ID NO: 99834 - DNA, 1052 bp, Homo sapiens
cctgggtctctgatgtggagaggatgtctgccattgacaccgaacccctgagtgggcaactctcagagccatatctccacagtccatgcctggctagtcctgtggtttcagtggtctacaagacattcctaggtgcatgcccttcagtccacacaaactgactttgtctcaaatctgaattctctcattctactcttaccaccctccttcagtttctttcttctgcgataaaatcccagatgactcggttactcaggcttgaaatctcctattcctttgttcccgtgcccagggcaggatgcagattctaaccaggtgtgacttggaatccttatctgtttgttgtttgttgtctgtttgttgctcttggagacttcaacatttcaggactgcagtattgtaaatgcctgcagtatcctaaatccgaattccttacctctcctggaatccttatctgtcttttactctttgagatttcccaaatttcaggatttattgcttgccttattgtaaaccctgtgaattgagctccctcctgttaggatttgctctaggtccctcctaatccatcttgttctttgtatctttcaggagttctgaaactgccctaataattattgggggggtggggtggagtgatagaattctggctctttttcataatgcttaaactttaagatcctttgtagtcttctgtctctcatttccttccaattcttgttttaggttcaggggatacatgtgcaggtttggtacacgggcaaattgcacattgctgaggtttggtgtacaaatgattttgtcacctaggtagtgagcatagtactagatgggtagtttttcaatcctcaccagcctcccactctccaccctcaagccctggtgtctcttgttcccctctttgtgtccatgtgtagctcccagttcactctgcaagtgagaacatgtagtgtttggttttctcttcttgcattaatttgcttaggataatgacccctagctgcatccatgttgccacaaaggatatgattttattcttttttatgtagcct

SEQ ID NO: 99835 - DNA, 1066 bp, Homo sapiens
cctgcctcagccttctgagtagctgggattacaggtatgtgccaccatgccccgctaattttgtatttttaatagagacagggtttctccatgttggtcaggccagtcttgaactcccgacctcagaagatccgcctgcctcagcctcccaaagtgctgggattataggcgtgagccactgcgcctggtctgactccatggctttttaaaaaaaaaaaaaacaaaaaaacaaaaacaggcaatgatcttttaaaatacgcatcgttggtgacattgatacaagtatatttttgttcaagtttttttttctttttttcctggtgctgataaactaactaggagtaggggagtgatgagagcactgaactgcaactcattcctcttaagctttcatctctaaagaatcccacccttttgtttgataactttaaggatttctttttttggccaagattgcagccttttaattgctagtgtcctatggtttttgtttcaaagacagcatttcctgtttatcttggtgtactttcgtttcatctttagtttggatactctttgaactggcataagaattagtctccaggcaggccaggtacggtggctcacgcctgtaattccagcactttgtggggccaaggcgagtggatcacttgagatcaggagttcgagaccagcctggccaacatggtgaaaccctgtctctactaaaaatacaaaaaattagccaggcatggtggcacacacctgtaatcccagctactcgggaggctgaggcaggagaattgcatgaactcgggaggcggaggttgcagtgagccaagattgcgccattgcactccagcccgggtgacaaagtgagactctgtctctcacacacacgcacacacacatgaattagtctctaggcagaaactttgctttattgattggttttcttcctcctcttgaggattatggaggaaaagaggaagccttttaaatgaggacagcttggtgtgggtaagtctcaaaatataagtggagtaactggaaaagcatgccatttagtatgcatttgtaccacacg

SEQ ID NO: 99836 - DNA, 1080 bp, Homo sapiens
tgtcccaataccaccttgcatgcacagatcacttggaaacaaaagtttcaggaagcagtacttactgtttgtgatatattcggaagttttcttttctgtttgagtctatcttatactttttatgtacactttttattaaagtataacatatgtatagagtgcgtacatatcatatttttacaatgacttttcataaagtaagcacatctctgcaatcaagataaagcaaaatggcaccagtcccagggaagcgtctctcctgatgtctcctaatcactgctcccctcaggggagccactagcctgacttctggctccatatcttattttatattttgctagttgtgacccactgaattgatttcaagacccggtaggtctcaacctatagtttaaacaacacaaccttgttttattttcccaataactcttaggaattcctttttatggatgaaaaagctaaggcccagtggtcagatttctcccaagatcgtatagcttgtactgtttgctttttcccatgcatttgagctactcttcttcctgagatgaggaatgacttgctttggaaagacagttgcagccctttttgttttatgtcttgtttatcactctcccttaatgtgtttacaagattgatattcattattaatgtagctttagtgagttcctgatcttaccattcttaagtactgagaatgtttttggtttgtgtttttgtgactgagtcagagacatttgcttttgctttggaggtttgtggcttggaaactttcatgatatttgtctttggcctccccctaataggatgaagctcttcaggtggcatgcaggtatgacaaatgatgactgtgcacagcttcccaccttcattcactgtgctgacctgcagttccttccttgcctgtaggcttttcctatagagagatttctttccaccccgttcccacctcatgtctcccttaggctccagaatacctatgtggagggcctgagtgctaagctgtcctgtcatctgcaagcttgtctgattgtgagattgttgttcccagccagcacctctgggagtagaagtcccata

SEQ ID NO: 99837 - DNA, 2247 bp, Homo sapiens
ccactgcactccaacctgggctacagaggaaactctgtctcaaaaaaaaaaaaaaaattatgcatatttatggtagctgttattatcattgcataatgttactattattcccataattattcagggcagtgcagtgtaggatcctgctgctggaaaaaaatatttttttcttcagatagtcagctgtagaaaccatccaagtggatacagaagcagagggcactacatttcccttggtttttttgtttgtttgtgttttgcctgataccttctttaagatataagctaggtttattttttgccaagtttggttgtgacttaggcattggtactagtggtcctgctcctgccagcatgtggctggtgcctccgtcacggtgaatctggaaaggactgagctcagggccctcatctcaggaagatccatatcccttgagtttgtgcattggtttttttctgggctcctaactggtgttttctccttcccctgctctctgacctagatggaagaactggtgggtgagaggcatcctgactttggccatgattgcatttttcttcatcatcatttacctgggaccaatggttttgatgataatcgtaagtgccatttcacactattttagttttcccttcagtttttgctgcaggcccggttgtcttaagtgcgaggtgttgggttggttgtgggaattgacgggggtccaggcttctcagaaaacctctgccatagaacatctgtgacttcccacttctcagtagccacctggagggtcattggtgtaggctggttgtttatggttgaagatgtctcagtgtcttttcttttaaaaaactgactttattgcctgtgatcccagcactttgtgaggctgaggtgggcggatcacgaggtcaggagtttgagaccagcctgaccaacatggtgaaaccctgtctctactaaaaatacaaaaattagccacgcgtggtggcacgcgcctgtaatcccagctactcagggggctgaggcaggagaatcccttgaacctgggaggcagaggttgcagtgagccgagatcatgccactgcactccagcctgggtgacagagtgagactccatctcaaaacaaacaaacaaacaaacaaaactgactttattattccaactctgtaaacttttaccctgggcatgtctctatatgactcctggtttcgtttcctgttttcctggggcctcccttctgggcttagagcttttgttaaggaaatcccagtccacagagctgctctgtctgtcttcccactgtcctggacagggtcaggtgaccatcagctgcatgtgagcaaagcatttgactttgaatacttgagacttttcaagtattcagagtcaaaaggagaatggattggttgaatcctgggaggttctagaataaaaagttaaaaaggaggttttagaataaagttaattgagggtcaggcatggcggctcacgcctataatcccagcactttgagaggccaaggcgggaggatcacttgagcccaggagttcgagaccagcctgggaaagaaggtgaaacctcgtctctacttaaaaaaaaaatccttttggctgggtgcggtggctcacgcctgtaatcctagcacttttggaggctgaggcaggtggattgcttgagcccaggagttcaagaccagcctgggcaacacggtgaaaccctgtcttaaaaaaaaaaaagttaattgaaacatcagggtgtgtattttattgtgagtggaaaattggatctactccctgtgacatagagggctgcattgctctgtgggatggtatgagagaggaagaaggagggaagcagaaccactggaggcccgatatttttcttaagtataatgggttttctggaaggctcatgacctgttggtttccatttccaaaaatcataagaattggggtgtcagtgaatgttttgtgtcccgcaggtgatgtgcgttcagattaagtgtttccatgagataatcactattggctacaacgtctaccactcatatgatctgccctggttcaggacgctcagctggtaagctctccggccccacagaggcttttagaatttggatgatgtgctttgtggcaggtacttacagtgacggtgggtatttctatcacttgctatagagataaatgctggagaggcagttatcatgttaggtcatacaaagtttcatgaagaaaatggtatttgagcaataagtgaagaa

SEQ ID NO: 99838 - DNA, 1050 bp, Homo sapiens
caaagagaatgtcaggagcaggaaaaaggcaggagaacagcagacaggtgtggcaaagccggaagaaaccattttgataggagtgaaggagttcctgttgggaagagtggaaacgagactggggaagcaggatgaggcgtgtttttgaaggtcatatggttcaaggatccctcagttaggtatgggaatgctacaaaaggggcaaaaacggagtctcaagtttgggagaaatggagagtgaatgaaagctgctgtctgtttctagataaatttctcacctacggtgtcaccagagagcaggaaaccatggtctgcctgttgctctgtgagctgtcccgggggactcaagggtggggggtattctgctgccctctgtcccttcctctgggatgtctgactgccttgctgtgaaggcaagggtgctccccacggcaatgacctgtcttcatttacaggtactttctcctgtgtgtaaactatttcttctatggtgagacagtgacggattacttcttcaccctggtccagagagaagagcctttgcggattctcagtaaataccaccggttcatttcctttactctctatctaataggtatgcattaagcagttcaccatttcttgtgtctgtattgtttttgtatgtctgtcaggtaggaattggggaatttcttggttagtatacagttttgtgacattaactgtgaccatgcaggggagcagagctgatgctctatgttaagctgtagcagctgttaccttttttttttttttttttgagccagggtctcactctgtcacccaggccagagtgcagtggcaccatctcggctgactgcaacctccacctcccaagttgaagcgatcctcccacctcaggtcccgaagtagctgggactacaggtgcctgctaccatgcccagctaatttttgtatttttagtagagaccgagtttcgccatgttggccaggctggttccgaactcccgagtttaacttatccgcctgccttggcctcccaaagtgctgggattacaggtgtgagccacc

SEQ ID NO: 99839 - DNA, 1777 bp, Homo sapiens
ataaatactgtaggcaattataacacaatggtaagtatttgtgtatctaaacatagaaaaggtactatatggtaattagtaaatcttatggtattataatctatgggtattataaccttagggaactgttgttgtgtatgtggtgtgttgttgacgagaacctcgttgttcagagcatgactgtactcagttctgctgagttgtagcttgaaagcagccatagacaatatgtaaacaaatggacataactgtgtttgaataaaactttatttataaaaacaagcagctggcctgaccactgtttgctggcccatgttctaggaataaaacattcctatctgatgaaccatgttctaagtttagtgtggtctgcatgattataaaatattgccttccttttactgtttgggaggagttattttttccttgtgactgtttatctgggtaatgtttttctcccctgggctttgacattgtgcactggttagctgctgggaataaattagccaaagaaccacttaacatagctaaaggagggcaaagataaatgcagaacataattcatttttcttttctcctcccacctcaaactaggattctgcatgtttgtactgagtctggtcaagaagcattatcgactgcagttctacatggtaaaggaaatgcatgcgtgtgtgtcagaattcttgatttaaatgaagtttttcaggaactcaacaagcctttcatgctttctgtgacaaatcaaaactcaggaacatggtctgatatgtatgcatctagagcatgaaggaagaatgcccatttaggtttaatggctctacgttgacttagacccagtcactgttacttacaccttaagcagcctctccactaggaccctgaggtgggctccagagaaggcacaagctgaagcttcagacactgcccacagatgtcctgtctggtacatcacttgctaccacttattccctgactcactagagaacagctcctctctgagtgctccaggtgctcaataactactaagaaaatgaaaaatacccaggctttcagagcatgggagagctcactcactagtgggctgtgggggacaaagtattactctcagaagcctgatcttacctgttcactttcaataagtcagatacaaaagcagatatttttcctacctgcttctcagcagttttctatttggtattgattgttctttgaagttactttcaaggtaaactggtaagtagtgtttatttttcttttttttgcagtttggctggacccatgtgacattgctgattgttgtaacacagtcacatcttgttatccacaacctatttgaaggaatgatctggtgagaattgggagttggattttcccttttattttgtgagtgtttctcgtgtacagatacccccctctaagccagtggccctcaccttgagccacatcagaatcctctgcagggttcattatagcacagattgctggaccccacccctgactttttgattcattagatctggggtaggcttgagaatttgaatttctagtacattcctgggtggtgcttatattgctggacaggacctatgctctgagaaccactgttctagactaataggtacaggaatatttaaagactcaaagacaatgcaacatgtatggcaacagatttgaaaacctagaggaaatattcatgatttcctgacaaaatatatactaaaagtcatgaagaagaaaacgtgaatagatcagtaactgtaaatgagctttgaaa

SEQ ID NO: 99840 - DNA, 1747 bp, Homo sapiens
aacagcaagaaaagtcagtaaataatgaaagagtcattaaagcatactatttagaattggggaggtaaccactagaaaaataaaaattagaaacgattagaagtggttatttttgggaatggagatagggatgggagaaagaaggaaaactttttgttccttttacaattaaatttctctcattgtttacgtatatttctttatcatgaaaaaaggacagatgaccttttagtttgcaacctccacttattcagtagtcattcagtaaacacttgaatatgtactctgtgctaggtactaggtatgacttttttggtattttttatgtttttaacttactccttaatgggttaccagaattttatgggtgattttggtgctggaatttaagaatggcactattttgtgtacttttgaggtactgtcaccttgcttgagttgatccttactttggttcatttctaggttcattgtccccatatcttgtgtgatctgtaatgacatcatggcctatatgtttggctttttctttggtcggaccccactcatcaaggtaaatggattaccctaatgtgaaataccactgtgaggggagggtggtgctctcaatgtgagtagatcagcctggcagacagaagaaatctagctgtgttgtattgtggccatgtcttcatgtcttcctggagaaaggccaaaggaaaacactgacaactgattaaaaaaaaaaaaagataataaagaaaataggctgggcgtggtgggtcatgcctgtaatcctagcactatgggatgctgaggcaggaggattgcttgaggccaggtgttcaaaagcagcctggggaacttagtgaggccttgcctttactaaaacatttaaaaattagccaggcatggtggtagcatgcacctgtagtcccagctccttgggaggctgagatgggaggatctcttgagcccaggaggttgaggcttcaaggagctgtgatagtgccactatactccagcctgggtgatggggcaagatcgtgtcttgaaaaaagaaaggaaaatatttttacagatttatataatcttttttggggacacattttttgggactttgatctggatttgagtgtagtcacttaattagtatatcgttttctaatataaaactattcgaatgactgattgaaacagaaagggaaccaaagggaggaggatataagatagggaacaaggaaaccatatttgggggagctttaaaaggtgacatggttaagagaatggggttttatgaaagaaaggttcttaacaagtaatcattgttcgcaaagctatagttatcaaaacaccctttgctgagaacttgctctctgtccacagctgtccccgaagaagacctgggaaggcttcattgggggcttctttgctactgtggtgtttggccttctggtaggtggtggctttcagctgtgtaagggattgggtggacagaggcctcataccaccttccaaggcctgtccagagctggagagtgtctttggaggccaggactgtcctgctgaatggcaaccttgccctgaagagggccactggccatgccagccatccaccagctttcaggcagggtgctagcagttggagagcaccttctatgccctctcgcgcccaggcatggtgacatcagcaggtagccttcttgtcaggcatttgatgttccaaggtcagggtgagtgcacccaagggaagatgagatacacagct

SEQ ID NO: 99841 - DNA, 1108 bp, Homo sapiens
gcaccattctctgcttctgacccttgggccagtcctccttcttcagcactgtctggctgcccttcagtgctcaccgcccagctttgttgctttccagccttgttcctcctgagatctgcctctcactgtgccccttccccatggcctctctccagttatcactgacttcagagatcttgaggaaagtggtcctagctccccaaatggggagagtcttcttgtagttctttgccccagtcccttcaggttttcccggattctttcggggcctgggtgtttgggttcctgtatgtaaccttggtgggtcatgagcctctttttttttttttaattgaggtaaaatatgtatggtaaaacatgaacctctgagcacatagctcgcagttagcagggtactaggcaccctcaggaacatggccaaaccaggtgcctgtgtctgggctggatggttggaacttacttccttgccggtctctctgttattcctcctcagctgtcctatgtgatgtccgggtacagatgctttgtctgccctgtggagtacaacaatgacaccaacagcttcactgtggactgtgagccctcggacctgtttcgcctgcaggagtacaacattcctggggtgatccagtcagtcattggctgggtatgtgccactcacagggggtgagcggcctccatggacagtggctacaaagagagatccccctccatcacctgccctctgaaaaaagctagcttcctccttcccaaagctgtaagccccaggatgaaggagaattgctcacgccaggtcagggtatgggcaggacagctttcccccaacatcagattgtttagaccagtggttttcaaagtgtgttctgtggatccctggagggccctgggatccttttagttgcgggggtagggtgggggggtctgtgaggtcacaactgtttcataattagactatgacattattttcctttttcaatgtgttgacatttgctgtgatacggcgcaaaagcagcagtggttaaaactgcgttaaggcagtgggttcctcatgccacacactcacagtacaaacaggccagttctaatgaatgtctatgaaatagtaaag

SEQ ID NO: 99842 - DNA, 6597 bp, Homo sapiens
actttaaagaaaacaactgaggctaggcacagtggctcacacctgaaatcccagcactttggaaggccgaggcaggcagatctcttgaggtcaggagttccagaccagcctgggtaacatggcgaaaccccgtctttactaaaaatacaaaaaaatatagctggggatggtggcgtgtgcctgtaatcccagctaccagctactcaggaggttgagttgcttgaacccaggaggcggaggatgcagtgagccaagatcgcaccactgcactccagcctgggtgacagagtgagactgtctcaaaaaaaaaaaaaaaaagaaaagaaaaatgactgacagtaattgttaccaaggataaaatttggctttcaaatgaaaattagaattttggaaagcttaacctgccactgtgaacttgacagcttcctaatacttaaaagccttttctgatgaggtctgtgatgattcttaacgtacgtgtgtgtgtgtgtgtgtgtgtgtgttgatcacatgagaaaaaacacaaacatatttgacacggtataatgaaatgtgtctacatttggaagatttacataactcagtgaaccattattttctaaatggctgatgcatggtgttatatagtcatgcatgggtaaaagatccgttcaagtataagatagaccaatggattttaatgtaagagagaacaaagtccattgatagaattctagattccatatcacacctaatattcaagaaatgactacttgtcaagctctggtgtagtgtcagagaatacccaaaaccatctgaggctacgactaaaatactcttttcaactatgtatctgcgtacggctggattttctttatatacttccaccaaaacagcatgttgcaacagattgaatgcagaatattttaatgttttccattaacttagatattagaaatttacaaaatgggaaaaattcactcctcttattgatttaaaacctacatgtatataattagtttcataaagagttacgaggttggatgtcttggtctgtctagtgttgatagaacacttggggctgggtaatttacaaagaaaagaggtttacttagcttctttctgcaggctgagaagtgtgagaagtgtggcattggctgctgcctggcttctggtgagggctttttatgctgcattgtaacatggcggagaaggtcaaaggtggaagcagacacatgcaaagaggcaaaaccaggggcttcatcacttcataacaacccattccctcgggatgccagtgctaatctagtctcttgacagaactcactactaggagaaaggcaccaagccattcatgagggatttgcccctgtgacccaaacacctcccactaggcatcacctcccagtgaggccacaatgaggatcaaatttcaacatgagttgacaactcaaaccgtaacactgggcatgtatgcacctaaacttttacttcatttactcttctcagaaaacggtccggatgtaccccttccagattcacagcatcgctctctccacctttgcctcgctcattggcccctttggaggattcttcgcaagtggattcaaacgagcctttaaaatcaaagtaggaaaaccgtcttacgttcctctcatctcactccctcacccatcttctgcctttctcccccttccctgccccctccaaaatactaggctgtacaccctggcatttaatgtgtgatcttgacccatgcactgaatttaggtgagttaattaataacaatattttcaggaaaatgcaatcgttgtttttcagtttatttgttaatatatctttcttcaaaagaacattttgggccaggcagtggctcatgtctgtaaccccagcactttaagaggccaaggcgggaggatcacttgaggctaggagttagaaagtagcctgagcaacatagcaagactcctgtctttattaagtaaatgaaataagaacattttgtaatgcaataaaattgtgtcctaatatagcctcaccattagatttcatacttctcaccttctattgccctcagctactcagcacagaagcctgacattggggtgggaccattaggctgggattggttagtggctgagcccaagttcacccatccttcccctgcctctaacaggactttgccaataccattcctggccatggaggcatcatggatcgctttgactgccagtatctgatggccacctttgtcaatgtatacatcgccagttttatcaggtatagtacctttccatctgaaccaagttggtggatttttaagtacggtgcaattctagaattttagcggcatctaagttccagtgaaaagcatcccaaataatgcagttttcagttgtttctgcttacagattttctgaggcctcctgtcatctgttaatagataactctctgatccagagatcagagcagccactcagataatcaggccctggaagcttccgggccctagctcagtgctgtttcttcacattctgttccagaggccctaacccaagcaaactgattcagcagttcctgactttacggccagatcagcagctccacatcttcaacacgctgcggtctcatctgatcgacaaagggatgctgacatccaccacagaggacgagtaggggccacccagggccaggagaacaggaacagaactgagcaggggcaggtctccaaggcaagcccagctggtgtgacttagacaatgacgaggcttcaactcactgtcttttttttttttttttggagggtattttttatttgtgggttcaaaaaatctgtatatacagtctatgtgtttagaatttgtgttgtaagtaaactacagctttgagttggaaagaagtcacgggttgtaaaaccatttggatttttttaaaacaaaagtattaataatctggaagacagtgttgcccaggtcaggagtgttttcttggtggttccagcccccatcaattgaactgtttctgggctcagtcagacacagacattcatctgtgtctgaccaaatcaggggacttccccacctgtggtgggaggcacagcttagatgttttgtacacctggtcttttctagaaatccctgcttggagctgcagaagggttgccttctgtaggtcggaggaatggaggcttactaaccaggtaagccttctatgcatccacaccaaaatcctgcagaatgtaagtaagctctgctttataagatgggttcaccttcatcgcagactgaaagtttcagtttttatttttttcagaaagcacgaaaaattatttataatagtctggagaaaaaacacactgtaatatttcaagtgtatgcagtagaatgtactgtaactgagccctttcccacatgtctaggctccaatgtctcctgtaggtccacctaactgtgtgttttcagggacaatgccatccatgtttgtgctgtagacttgctgctgctgaatcctttctggggactttctcatcgggcagggagcagagggcttctcgttcatgcaccctttgcctgaacacccatgtagctgctgtgttgtgtatatattactcttaagaggagtgtgtgtgtctgtgtttgttttaaaagtcacttatttcttacagtgatttcaattgcaccatgacttcttcactaaaaccacaaagtcctgcttaaaactatggaaaacctaacctgattagagccttgactattttgaagattaaatgcacactttttatataatgtgaccagtttaaatgtagtttgtattgtactgggggacctttcgttgttgttgtttgcttaaactgtgattttttttcccctccctaatttcaggggtgagattgactttgggaagacagattagttctttgtcaggccaacaagtgatggagtgcgggagagagaacttggcacccaaatatatcaaactattccgtgccgtggatgttttcattgccaacgagggtgtaatgatttgcttctgcaccttggtctagtgctggtttgtggtgtttttgtttgtaaattagcctcactgcctccctgaaagtgcacagtcagcccaggtctctagagtgtccagcagaggatggagccctcgggatgtttcagctcacacatccttgagtgacttcccatatgtgtgtggggctgaagcggcttctttccgctgaacttttatttccatttcagcctcgtggcttctcttattcaggtccaaggccccttaaaaacaaaacatattatcgcaagggctttcatttcagtattggctgtgtcactggcaggatgcatcactctccagggcctctttttcggagctactcccaattccactcttctgtgattctggctgagcaagttcatgccggtagaggctcattaagtgaggtcctgggcaccccccaaacaggaagtgttttcaggcccttacatgcttatccttaaggtgagtaggtatctcagcagcacacccgaacagtaaaggtgatcaataacgaaactgtagttttcagattgaagaatgaacctggatcaccaaactagataccgaaagggctcctcatttgtctcttttgtcccattgtgggcatatggtgggctccttgagaggagggagtctcagctggggcctggctgcagagacctgctcttgaatagggctgcctttgggatcagggagccgagcatactgggcaaggctcatcatgttcctttgtggaagtggttacttggtgggggtggggtggggaaggggggtctaggaagccgaagctgagtgcgcactagagctgctagcaggcaggccagagggtcagcttgtgttttattttctgatttctcctgcatgctttctggagatgaggattttttgtcaggtagctaggagagcactgccaccttgtgtccatatagcacaatgtttctctttcctattcacagacaagattcaagaaaccatttttacgtgtgtacattcaaatcttcatgaatggcatcacttgctttagacccattttttttttattggtcagaaataaaatgtgactgcaactgtgtgccctcccttgtcgtgaattccctgtttatcacttccatgcatggttttatgcttctcatttgtttatgtattcatgaatactgcatagtcctgattcagagacttttgctttgctttccaacttgtatccctacattctcacaacagccttcttacctcgggtgagagtcatgagcaccttaccaggcagggagcttccccaggatagtgtggtggagtcaggactcactccatcctgcactttacccacaggacacctggagggtcccccagccctgcttgcttttgtgaacgtcgtgtgagtacaccgaggtgttgcagctttccttccctctagctcaggaggcctggcctgagccaggttggagcttaaattgctgttggctcctgcctggtggaacaagggggtcatagaaaccagggctgatgggcaccccccagcccctgggagctctgctcatgaccgctcacagggtaccgagtctttgccttttgtgtgtgcgcatgctgccctcttaactgcttttagtattcagaaaggttccatttatgttttactcctgaaagtgaaaccctcttaggcaacttgtttcatattctgggcattttagtagctacagtattttgcatttaaaatgtaattactcttagtattgtacagccctataatgtatgagaactagtttcacatcctttgaaactaatctctttcattggggaggatacaacttttgactttacacaggtggactttgaatccatttttatagaatttttttccactgtaacttgacctatattatgcaagaaaatcccaaaaatatgttttaagggagactacacagaccttgtgatttggtctgagctagttgctgagttgactggagccttatttgaatggatctttgagttgagatcttcacactgtcagtgagcccttggctcagcccttgtcacctgtttgtatggggaccatgtttcccaaagctcaggttcatctccactattgacagagtcgggtagtgggagagtataagtgacttgagacagagtgtccttgctcagaaaactgtgaagcaggggtcttgttagttacaaagccagtcctagttgcatgtccaagggggtagattttcatcaccctactaaatgtggtatgtcactgctgaagccttttcctgttttagtaatatcttaggcactattgtcttttgtcttccagagtaacatatctgggcccacctttcttgcacactgtgattatgtgctaagaaaagggtggagttgggaggacaatttcacttgaacaggtttctgttcttctgaggtcagggtggggaggatgtccaggtgacttttatggacacattgcaagacagtaagccgcggatggactctcacttgtgctttggaacactggactccaaagagcaggtggaacaaactctggcctgaagatgatggctaatactcaggcagagccccgtattcttccctgacttggtcaa

SEQ ID NO: 99843 - DNA, 1620 bp, Homo sapiens
gtggccttacctggcctctcaggtggatggaggctgttctcatctggggctgtctcttgattaaggctgtcacctgtttgtatagggaccatgtttcccaacgcactttgagtgcagtttaggaggtatcctttggatgctgaagtgttgggattttgaggacatgcggatgatttatgagaatagaggggcagagtttgtgaagtctagggttttttgtccagtgggtttcaaatttgttggctgtttaaagaccctgtctcctcccccaccctccccttccttttcccatcaaatgcctacctactgaggcgccttctctttttattcttgagccaatgagatatcagtgtgtttattaataaggattgcaatagtatagtgcttaatatgtgccaggcatagtgctaagggtttacatacgttatcccttttaatccagaaaacagcctttgattaggtattgttgtctccattttatagatgaggaaactgaggcagtatgactgaggccgagagcagtggttaagacagactttgggatcaaatcaccctaggtgcgggcaggtttctaggctgctctaagcttctaccttgaaggcagttgggtctgataatagtaccttcttcctggggtggttgtgaggatataacgaggtaatgcatgtaagcatttagtaccatgcctggcacatagtaagcactcaataaatggtagttacttttgttgagctcagctggtagtttgacctccgttggtgcaatgccagagatgggattgtcagccaccacactgccaccaccctgcacacagtctgggtccctccgagagaagcacgccaaccttaacatcccctacagcatcttggtgcttcacacaccatttaggaggccaccctaacgaggcaagaggacatgggggtgtgcagaagttctgttcttagtgagaatggctggcctgagaatccagctcacctcctctgcccacagtctggactgcttgtgggaaggccatctcctcctgtctggtggtacctccactctgggcagggagggcctgtctgtgactcgctctggaccccacttcccgctctggccaagggctgtcttctgtgcacatagctcaggagcctgcagcagttccctgtatgggtggatgtcctcaggggccaagaagagaagaatggggacaacagaaacctgctttgtaggggattatgtagactaaaagcctagaagttctgcccacatccttatgacgcagccaatctggagcttcatgtttccttctaaaagtagtaaccgggtagaagtgggtgacccattgaggacacatgatgtgaggtatttctgccggattctaggttagcaaagactcaaatgggtgactcatgaatgaagggagaacaggcacaggacttaatgaaaagagtttcttgaacttagttttctgaatgggggtggggagttggggcacgtgtgtgtaaggggaggctgcctcactttgaaggaatggtgttggctaacaggatccatgaaattcctaggtcagttgaataataactgaactactggtttgactgtggattatttcctgggtattagtgggacccaacagca

SEQ ID NO: 99844 - DNA, 1091 bp, Homo sapiens
ccttctgaaacaggagggtaagatcagatgggaagcccctctgttgaaggatcttgggaaccttggtggttttttttttttttttggttttttttttttgatcgagctgtggacatccttcttaattcgattctgaggatttgtttaactaaaaagttcccaaacacagaaagggcctccccacctgctttggggagctgtctgtgctgggagtgccaggcatcccatgggacccatcactgccagtgtctgtgcctcccagaggtcagccgtgtctgccctggctctgtctcctctgtgacagggcagagcatttctggtcagtttctccatggtgcctcccacccctttgtaaagtggatggacatgatggaattcagttgtctcaccctgatagcctgggtgttgatattcactttacccgcactcagacacaggcgaccttgaagcagttctcggtgtgtagagtccacgtgacagtccccacagcctccccagatagctgtgtgcctgtgcgctactgctgtgccattttcccaacttggcgtttcactaaatgcagctgatctctctctctgtgcactcgtgatccatgttgaacaatacatgtaggttctttttccacgcaatgtaagaacatgatatactgtacgttggaaagcatttaccttatttatatacctgaatgttcctactacacaaataaacatatattaaattctagatcatgtgtggttttcgatggtgggggtggcggaaggccaggggtgtggacgtttggttgcttatgtggagccagcattatttcccaggatgctgctgaccaccgcttgcttctagagactccctctgtccttggccttggcaacctgcccccccggctttcctcctgcccttggttgctcctcctcggtcttctttctgggtgtctcttttctgggccatcccttgggtggtggcattctgcctgaggctctctttcgcccactgaattctcccctctaggtgttcccaccccctcccaggatcctgatcaccacactcatttcaacacttcccaagtccatgtctctagcccaagtgggcctgca

SEQ ID NO: 99845 - DNA, 2029 bp, Homo sapiens
ctgggtcccaaaagtccgtctatgaactctagggctgccagtatcatgtgcagcactttaaagctacgctatctaaatagcttattaattctgcataaatcaggtcaagcaatgtgtcaacctgtaacagactgtgcgctttaactgaacatggcaaaatattcactcttttgaactttacatcatcatttgatgtcaaacaatgaagcaaatcccaacagtatatacaaaaaacagctttgcatttataaaagatcatttcccatactgactaatccaggcagctaactcattggtttatttaactttattgaagaaaaataaatcaattactagcagagctgttagttgatcactcatccattgacaacttgcatcatttattcagtgctatatcaaacagtgtattggaagatagattaactaatagctccgagcctcctaacaatttaaatgaaaattacaaaatgtttgagaccctattttggaatacaaagggtgtttgacttccaatttccattctctgtagaacaagaacaggtcattcctttattgacatgcataaaatacatcacattttctgttctgctgatgctataaattcaataccagttctctagccacatcagttatgagcataaagtatatcatgtaacctcaaatctgtaacagtggaaggcttaaacaagaatggatgctgctggaataatgctgtatcctttgatgtgacaactgagcatccttctccctccccctcagatgatttcttcagcatgttagagcaatgaggaatggttttagtctcataaccaagttagagtgaagacattggctacataatacacatgctccatttttttttttttaaattctgagtcttgggcagcaactgttctcttgtaactactttacagtttctaaaagcagttattgtccaaagctggaagaacttaagtcttctcagataagcatgtgaatgaatggagggaggtaaaaaaaaataaaattaaaaaaggtgaggtctgataggggagcagccggataagaaaatcaaaaaagaaacagtaatttaaagtttattccagctataatgcaggttattctgactttaaggtaacatcacatggcatacttctgagtccattcccgagatattctgttgtacttatctctgtctgttttatagatccgtgcaatctctggcactaggggatcatctgggtttggatcacatagcagtgaacaaatggataaaagaactttagaaagtgttaaagcaggcgaccactgtgatcttagaatgtcaagaaaaatgctgccattactgttaatatttgggtgataaattcttgttgtaaatgcaaccttagatggtttgaaggggtagtctgtaggaaaacgaattgtccaaaagaatacaccgccttgatatggtctgtcatgaggtcccataattgtggcttgccagtgaaacatatcatccccaactggacctgcagaacattgtgctggagggtcacgggccaaatcactaagttccttattaatccgtttcagcgccatagtgtgtgcttgtcgtctggctcctcactctctcagtgtatgctcaaaggtccggccaaaactcttgattatcctggcggcggggcaggattgtctcgtctcacaccagctctgcccacggggctctcttgagggaagatatccaaagtttaacagaactctagaaaagatagagccttgacattcatgaaagactcatcctggaacttagaattcccctggaaacccctagttatataaccaccaccatggcacacaatttcttccagaagatgtatttttttcctctataggctggagcatgaatgtatgaatcacttcttatttatgttaaattacatttttataatttataaattgtattatattaaattcactcatgccatggactggaactagagattcttaatattcattatattctttaaagttatccaaactttagatgggctaaaatctatccttt

SEQ ID NO: 99846 - DNA, 1064 bp, Homo sapiens
agagagccccgtgggcagagctggtgtgagacgagacaatcctgccccgccgccaggataatcaagagttttggccggacctttgagcatacactgagagagtgaggagccagacgacaagcacacactatggcgctgaaacggattaataaggaacttagtgatttggcccgtgaccctccagcacaatgttctgcaggtccagttggggatgatatgtttcactggcaagccacaattatgggacctcatgacagaccatatcaaggcggtgtattcttttggacaattcgttttcctacagactaccccttcaaaccatctaaggttgcatttacaacaagaatttatcacccaaatattaacagtaatggcagcatttttcttgacattctaagatcacagtggtcgcctgctttaacactttctaaagttcttttatccatttgttcactgctatgtgatccaaacccagatgatcccctagtgccagagattgcacggatctataaaacagacagagataagtacaacagaatatctcgggaatggactcagaagtatgccatgtgatgttaccttaaagtcagaataacctgcattatagctggaataaactttaaattactgtttcttttttgattttcttatccggctgctcccctatcagacctcaccttttttaattttatttttttttacctccctccattcattcacatgcttatctgagaagacttaagttcttccagctttggacaataactgcttttagaaactgtaaagtagttacaagagaacagttgctgcccaagactcagaatttaaaaaaaaaaaaatggagcatgtgtattatgtagccaatgtcttcactctaacttggttatgagactaaaaccattcctcattgctctaacatgctgaagaaatcatctgagggggagggagaaggatgctcagttgtcacatcaaaggatacagcattattccagcagcatccattcttgtttaagccttccactgttacagatttgaggttacatgatatactttatgctcataac

SEQ ID NO: 99847 - DNA, 2518 bp, Homo sapiens
tgtcaggtcaccagaggctctttcagagttctccactctggacgtgtctgacgttattgagcagctttagagtagttcccacgctggtaagcagtcttcttatctcgatctttagtgactttgaagtcagagcagtcagttttttatagatttccatttgttaaaaaaaggcaagttggagggcaaatactttaagctagatcacaagtaaactagacatttcattttctgattcagctgctttatgttgagctccattgcatcgggggtacaaaagggcaatgctgctattctggattattggaaagactgggaagaagagaaattttaaaaaagagaatggatactttcatctttaaaacaaaacaaaaactctgatgtggatgttccaggcattctgtaaatgaattcttatgaaaaggttgagtcaggcaggtcttaggtaaaccataaaattacagtattttatgtgttttgtatttgtttcatcataggatatatgattggatgcctgaacaaccaaatatattccaagtggagcaattggaacgcctgaagcaggaattgccagagcttaagagctgtttgtgtcccactgttagccgctttgttccctcatctttgtgtggggagtctgatatccatgtggatgccaacggcattgataacgtggagaatgcttagtttttattgcacagaggtcattttgggggcgtgcaccgctgttctgggtattcatttttcatcactgagcattgttgatctatgccttttgggcttctcagttcaatgaagcaataatgaagtatttaactctttcactacagttcttgcaagtatgctatttaaattacttggccaggtataattgccagtcagtctctttatagtgagaaaatttattggttagtaatataaatattttaaactaaatatataaatctataatgttaaacatatgttcattaaaagcatagcactttgaaattaactatataaatagctcatatttacacttacagcttttcatttgatcaggtctgaaatctttagcacttaaggaaaatgactatgcataattatacctgaccatgaaaaaaataagtacctcaaatgcatgcatttgcactggtgattccaactgcacaaatctttgtgccatcttgtatataggtattttttacatgggttgacatgcacacaacaccattttcattcagtatgaaccttgaggctgctgccatttttccacttaaccaaaccagcctgaaggtgaacctcgaaacttgtttcataaatctttcaaaagttgttttacatcaatgttaaaatttcaaaatgctgcagggtaatttaatgtataaaatattagtaagaaaaagtatgtattgcatacttagtagaatagatcacaacatacaaattcaattcagtgcatgctttaggtgttaagcatgagattgtacatgtttactgttaggtccttgcatctgtggtgctaggtgagtatgagaagatgtcaaggactggacgtattttgttgcctaaaaaaaaaaggctgtttgtaggcgttttaaatatgcttattttgtgtgtctctcactacctattacacactgttgctttgtgggtttgttttgtatgtgcgtgtgttatacagtagttaaatttccatgcagaaaaataaatgtcctgaattttcatattagtattctttattgtatatcatgcatgtaatttatttagaaatgtaggtcttactaaatgtatatgcatgtatttcagattatactaggatttcttggattagaagcagattgtgttaactgtaacttaaagaatgaatgttaaataaaatgatacagatttattttcttcattacaaaatgaaatttcaagaaggtgttacttttgtagaatggttttataatatgacaagaaattttaatatagtgtctaccctaaagggatggcttatttgcatctaccttttactgcatgtttttcacaaggcagtttattcatatattgacatattttggtagtagctgagaacctaagacttgaaattatacattgtgtagtattttttaagctaagcaatgcaattttggtcagatcttatttgtgtgaagataggctctgaaatcctatggtattgcgtttgtaacgttgatattaatgcaaaatagtttaggaaatggagtcttctgcaagggttctgtatacttttcccacattgtatgagattttccaaaattttggtgtgaattgggcacttttggaaaactcctgaaaaagaattagtttccttcatctgcagacctttgtccaatacggttaccatttctttatagtaactcgattagccatatatgtttgtttctagtcctgctcctttgctcctctcctatgccttcccagtgctggctccattttgaagactcaaggacagaggggaagcagatcataaagagaaaaaggagacagaagaaaggatgaaggaaggaggtcatgg

SEQ ID NO: 99848 - DNA, 1098 bp, Homo sapiens
gatgataccaatgatcctgaaaacagaaggaaattgaaggaacttggagttaatggtctaatttatgataggtatttgtttttcatgaaaaattttcatggaatttagaagtatagatttcatcttacgaaattataaataaaattaaacttagttaagttaaaattctgcagttcagcctgaggttatcttgacatttgcctgtgggtgttttcaaagtttgaaggatagcagaatcacttgggaagcttgttaaggattcaaatgactgggccttaactcagatatatatactaaatcaccctgggggtgagggtgactgccagcccttagacctcttctctgtctataccaactttttcattcctcttgtccaattctgtggcttttcataactttctgtgttctcacacttacgtatctccaactcagacccttccctagacctctgtagacttttatttccaggtactgacacctgttcctcttacagtcttcctgatttcagtataagtgacaattcagaccatattcttagtcttccatgactctgttctttatctcataccccaaatccagtcagatagaaaatctttttgttctgtcttcaaaatatatcctgaatcagactactcaccaagttaactgttgtcactcaagtaaagcagctcatctttggtgtggattgttgaggtagcctgccccctggtgactgcctctacccttaacggtcaggctgtttattcttagtacagtagtgagagggaagcttttaagacctatgtctgatcatgttgctacttaaaactctcccacagttttctgtgtcacctaaaggaaaagctgaagcctgagggccctatatgagccaatctgccaccccaccaccttcaaccctctttccctctctgaccttccacaaaattcccccatctgctgtttcccattctttggagaaagacttccgtaacaatttaaatgtcacctcagtgaggactttcttgaataactgatttcaaataacaacttctattcacagtgcactccctgacttgtctccatatcatttatcatcatctgacacaccacatattctgt

SEQ ID NO: 99849 - DNA, 2163 bp, Homo sapiens
ctgctccttctgtgtggatctgctttttagaaatttggctttaactataattcatgtcttcctcatttgtttggctttcattaggaaaccggacatgagcatcatctttttcctgtttctgttgtctctgtctgttcatcagcagttatggcttcctctttcattccgtactgacattttgctgagaaaggctgtacagtggactgctcaggtgccctaaggagccgagctaaggcactttgcagcttattccttccctcactgaatctttcatgttagctgtgcagctaaggtttgcaggggcagtgggcagcaatgtgtgggatccctgagcttggggcttttgttgggttccttttctgccaatagcagttgcagaagtaacagccccgaaggctgtctcactgccactgcggtgcctctgagtgttttgaagtgaatctgtgtccgtttttttttttttttttttttgccaggaaaaagtagctgtgcttttgcaaaagagaaaacccattgttttaagagaatacattactttttagaaaaagtttgtacaggtctgtaattttatagtgaacaaaaatttcttacgttcttgcagtttgagaggtactgtgtaccaggcaatgtttttcaaatacttgcttccttctgtcagggtgcagcctttgtagaatttgacgtacacctttcaaaggactttgtgcccgtggtatatcatgatcttacctgttgtttgactatgaaaaaggtacgttgaaatttcttcatttcaaactcttaatgttaagtaaaaggtttaaaaactaggaagtttttttatatttttaattacttattaaatagaattggttaattcattttcttggtgaattactgccagtccttccctctcatgctcttgcaacattgagacagtgatgagttgggaatactgccttcctagagtagggtctctattgctgaaaatactttattatgttacaaaaaagggacattccaggtggtttctgtagcggtctgtctatgctactatattgaggcaagagaggaagatatcatagtgtttgttttctaggattccagctgtttctgcttcaagcttcttcaattaataaggctagtgagccacagtgaaaaattcaaaaagaggtttggagttagatggtggagggcctcagtgaagaggtttagactcaagaactaggggggtaggaaatactttttagctgaaaagggaaatgttcaagactaatgttttggtagctgatgaaataggaatttcagaggacagagactgcaggcagggcgagcagcaatgtgggctacaggaaaggtaagcctgaattggagtaggggaccagaagaatggagaagagggcataatggcggggggggatccagaatgagatttaaaaacttacatagctgtaaaaaaactgtaattgtttttgtacaaacataatcatgataatgatatagtccctaaacgtcagtatactatgtaaccaagtgatttctcggggacttagactctaaaactgtgttgggtattaatttccaactgagttgatttaaagttagtctagttggctagcatcactgtaccagatactgtctgttgtattaaagagtgtgacaaagaccctggcaccacctgctggtgaattttaatcagagttcctaggggttggattattatgatgtatatattatgtataggaaaggacccttttgtttctgcgaaatggtattaggagaaagaaggaagaaaggaaggaaggggaggggaggggaggaagggaggaaaggaaggaggtgcatctattcagattacatgagtagagtgaccaaacacatggaacaggttgttttagtcatggaagaacattaatgaaaagataaatgagaaagagtgaagtgataaatgatcttattagccaagattgagattaattgatctagctgcaatttatttatttatttatttgagaccgagtctcgctctgttgcctaggctggagtgcagtgatgtgatcttggctcaacctccacctcctgggttcaagcgattctcctgcctcagcctcctaagtagctaggactgcagactcctaagtagctggaccaagcccaactaatttttgtattttttagtagaga

SEQ ID NO: 99850 - DNA, 1021 bp, Homo sapiens
attacgtagggtgaagctgacactagaaggcctggaggaagatgacgatgatagggtatctcccactgtactccacaaaatgtccaatagcttggagatatccttaataagcgacaatgagttcaagtgcaggcattcacagccggagtgtggttatggcttgcagcctgatcgttggacagagtacagcatacagacgatggaaccagataacctggaactaatctttgattttttcgaagtgagtagttactgcagtgaggggattgagaaagaatgcagggacaagcttattttaacgttggttttgattttcattttaatctaatttgtgtaaagctaactttttagaggtatgctcttctgtacagttaagcttaaaaaacttagagttgtcatcttcaagtactattaagaatataattaagagaacagcagtattgatgtttccaatcaagaccagatgtctttgatgcctgtatgctaaataatctaaatgtaaatgaattgtatccaaaggaaacatcagtggtaaatagagaccagggcaggctttgtacctcttggcgggcatcccgatgtaacaagcgtgattgagttctcactatgatggaagcctgtcatttattgaggtactttattaggatttgttgatgggactgacttgcaacttgatattgtaaatatgtaatgaaattataaagcttgtgccaggttattgacaatctgtgctgctaactttctggagctacatgtgatacttacactagtgcttgtagaccactggctgttcatatttccccaacacataatacttggtacatcccctaaggtccttactgctgtgggcctggctcggtagtggtatgtagtggtttccttaccctctagctccacctccacacccatttatactagattagagtttaaatcttggagggtagggaatatgtcttgaccaccagtagcccccagccagtttcttgagaacaacagaattcagaatggatttaaaaaaatc

SEQ ID NO: 99851 - DNA, 1004 bp, Homo sapiens
tcttttaaacacattaacttttcttatgcttaaatatggcatttctcttcatacaagtatttttgaatttcttagtccatattgaaaatcgaatttgaagttcacttcacatacattaaattacccacatgtattcatctgtaaattgactcagtgctgagaaatgtatcttttagtttctaggtaaagttaaaattgaaagataactggatgccagttttctggtttaaattagaaagcagtgggagtttctgctttatcctggagtaaggacacatctcatttaaacagtatctcattccatcctctttattggattttctttttgtatgttttaatacatttttgatagtgtatttaggatttttatgagagtatacttaaaattataatattcccatactgaggttggaacttactaggtattgaatgttttaaaaaattgtattttaaagcatcttgcagttaaatatattttattatgagaagtgggatgattttgtttctatcttttagaaaggaatgtatacttttgagaaatataacttttgaacttaaaagctgtgtgaaacttaccagagaatctttactaggaactgtcacatccattttgcaagtatttcagactaacgtttaaagtaaactgggaagggaagtaggccaggaagataaattgtattttactcaaagggtggggttttacagcttttctcattgagttgaaatttctgttaggagaaggggttgtgctagcgtttattcttttggtagttcctcacagctctgtacatacaggtaagttcacgctgttcgtaaagcttttaactggcagtagtgaatagttgggatatgaggagaattacatttgagacaagttcagaatatgcactacataagaataagcattttaattgtgccaagacctttggtttgaaaatcaagaaggagttatcgttgtccagcaacctgtgagtcttgtacattggttagtgtagaagttaatc

SEQ ID NO: 99852 - DNA, 1109 bp, Homo sapiens
tatgtgaaaatcttgatggtgattatccctaaatggtatgatatgggtgagttttgtattttctttttgcttctctgtatttaattacatttatgtaacaaataaaataccttgtaagattatagtttgaaaatgtgcttccaaaatgtgtatttaagggttttatttcagcataataactagtgagtttctttttaaaaattaaaggaaaattagaacacttaaattttagtcttttaggtatactcagggaatctttcatggttactcactaccgcatatgttatcaacacatagctttatgttcttttttagtaggggagcttgataatggaaaacagtatgaggaattgtcacactgtatgagattttaaactaaggcataagaatgaaaccggatgttagttcctcttttatcacacttgctcttcaagtttacctggccacatgtcccttctagaatttcccgtgttctttagaaacactggttcctatgatatgagaaatcttcctgtttttcacttagtattcttaaatatatgtaataaataactttattatggttctttagttccttgagtagcttgcgataattgttcttgagtacttgttcctactatttttactattgtaggcttgtttaggctttttctaaatgcatagagcaggaggtacatactttatctagcaatacctcattgatggctgacataccaaagaaagtatatatgatatttatcttaagaattaatatcagttaaaaatgaaaatttctttgaaacaattgagtattgtaggcagatttaggaatgggtttgagacagttctgtgtgccagttcatctcatttttctttgtttactgcctcactctaattttcttccagcatttcatcttgttttgtgatctggtacattccaggcttttggcatataatattgataataagatgaatcttttggtctcatatttagtataagatttaggccacaaacatctaatggagtcatgggtagaaaataagatataagaaattattgcagacgtttaacttttaaattgcagactatcggtggtccatgtcaagtgatagttcacaagtgggagact

SEQ ID NO: 99853 - DNA, 1038 bp, Homo sapiens
ggtagagatggggtttcaccatgttggccaggttggtctcgaactcctgacctcaagtgatctgcctgccttggcctccctaagtgctgggattacaggcatgagccactgtgcccaggctgtttctatttttatgtatgtatttgcgacttttttttgagaaggagtctcactctgtcgcccacgctgaagtgcagtggtgtgatcttggctcactgcaacctctgcctcccacggtcaagcaattctcgtgcctcagcctcacatgtagctgggactacagttgtgtgccaccacacctagctaatttttgtatttttagtagagatggggtttcactatgttggccaggcttgtctcaaactgctgacctcaagtgatccacctgccttggcctcccaaagcgctgggattataggcatgagccaccatgcctgtcctatatttgcaacttttgaggtttagaaagtttgatatttaaaaaacacatttaaaaaatatttcaggaaaaatgttatagtaaacatcatctagaattaatttgattttctttttagtataatggatacgaaagtcaccatatttttaaaagagcaatttcacattacatttttaaaaaatctacccagtctaccaattaaggtgaactattatagcagggaagtgtttagctagagaaaaagagaattttatttagtatcccaggagtaatgatttgaagaaatatatcgtgctattttagtttttaaacttcagaagtttgaggatttcagaaaagaatttagcctggttattttaagtgacaggattatttattgcatttaataattaataatgtgcctaatttgttacatatttgttattgtttggcttatcgtcaaatttaatcaatattaaaatcctatagaaagtgtaggagaatattttaatccattattaatgccttctaaagataatagagaagcttttatgcctaggctttttaagagtatgtataggctgggcacagtggctcacacctgtaatcccagcacattg

SEQ ID NO: 99854 - DNA, 1060 bp, Homo sapiens
agattttttcaaagatgttattgataagacccctatcttttctggaggcctttggcatatctattctaaatttgcctgttcacaattcattattttgggattgttttcatattcagaaaagaaaaaaagttaatcattttccttttattctaaagatacttatttgctgaaaggattcttttccttcagacttttacatttgacacccttgggctgcatatgaacaagggtttaggcaggggtctaggatacaaatcatggattagctcttgttaaaaaatgtatttcctttgggagtcattaagtgtttttgttacgtgtgaaaaatgcaagcagccactgttacctcgtgctcttagccaccattatacaaagaaaagagacaaaatgacaaaaaatgacaaacccactttagctgtcttttgcacctattacgtttcttgttccaagaatattttgtgaatacacagtaattgaacttaaattacattgtggttgatcattgtgttggcttttcttgacaatagtttcactttaacttaagaaaagggcatctcatttatttggcatggggttatgcatcatggtaaagttctttagtataacttaagcaattgtgtgtagatacataggtcatagatatggaaagtttacctgaggatcctggtatatgaaatttagctttgtaatatgtgaaaccaactaaattttacttaggggagtttggatgagaaagatgataatgagttctttgggcatagttttctaaagtaagactattgtcaacacaggtcaaattaagccaacctaagtatttatcctcttcattgaaaatgttaccaaaagcagcagatcagtccaaaataccttttgaaaaaattggcaagaagtctgcttaacagtaaaaacaagtttttctccttgtaatacttgcaaaagtttacagtatgtgttggtgagtgtgtttctttaagtaggtgctctgtatcgtgtacacatgtaccgtgtgatgcaggggctgccatggtaagtatgtttttcatggaatcgagtaaatagc

SEQ ID NO: 99855 - DNA, 1170 bp, Homo sapiens
cttggagcatagtaaacacaccaaaaacctcctcaaactctgtcttgttctcatgttttcccaagaaagctatgaatttatacctaattttgcacagggcagagatggttgggctgtggtttctaggcagtatgaaaatgaaggaaactttgctagtgcaagaagttggtaggccgggcgcagtggcttatgcctgtaatcccagcactttgggaggctgaggcgggtagatcacttgaggtcaggagttcaagaccagcctggccaacatggtgaaaccccatctctactaaaaatacaaaaattagccggatatggtggcatgtgcctgtaatcccagctacttgggaggctgaggcaggagaattgcttgaacccaggaggcagaggttgcagtgacctgagatcgtgccattgcactccaccctgggtgacagagccagaatccgtctcaaaaaaaaaaaaaaaaaagaataagttggtgaaacaattggctgggataaccttgttcctatgtgtgaatatgtttttagcctcattgtattttttgctgtcccttaaagtgctgtgagataattttagtgtgagatagcatgtcaaagccgtatcacacctgggctctcataaaactgaggtacctctcggttttatgtactctggctatactggcctttcagttccttaaatgtgctccattccttcctcctttcttcctcttttaggacgttctcaaatgctgtttcctctgcctagatctttgcccactctcatactccccctgttccttctcttctctcccctgtccccactgccagcctccagattccactaggttctggccctattttatagcacctcttggagattttatagaattatttgagtgacagattgtaaactctgttgaaaacattactttttttttgagatggagtgttgctctgtcgcccaggctagagtgcagtgatgcgatcccagctcactgcaacctccgcctcccgggtttaagcaattctcctgcctcagcctcccaagtagctgggattacaggtgtccatcaccgtgcctggctaatttttgtatttttagtagagacagggtttcactatcttgtccagtctggtctcaaacttctgacctcgtgatccacctgcctctcggcctcccaaa

SEQ ID NO: 99856 - DNA, 1014 bp, Homo sapiens
atctatctaccttgactgggaagtgtggttaattgtgtgtagcagtgttcattaaatgattcagggggaggggaagggagcaaagcagaactagaaaaatgactatgtaaggtagctatgaaaggtactttagaattgtttcataaggtaatatataaatgcaaatgaaatttaagctggtagagtaatgtacatgatgcagaataaagatgtgattggaattcttgtaacattggtggggggggcaaaggtttttttgaggggtgttggagaagttatgatgtagaatatggtgtgtctttggatggagtatgttctttctccatttaaattatgtaagtatctcgaagtatattatatgtacatgtgtgtattaagctattttttatattcctttaggtacttaagttagtggatgggaaacagattcctttgactgacagggaagaaatgaaaaaattagctagacaaaatgtggataagtggaaaagaacttcaaaggcttggagtttagacttctttcttattctttttttaatctccttaaattccttttactatggagttcagatttctataaataatcaaagtgattccaagccagggatgtgaggaagaatcctaattgacaaaatggatataaggtcaattagatagaatcatcaggatttgataataggttgtaggtagagttgagactgtaaatttgagcctgtagaacctgagtaatgatggtcctagggttaataaagagaaaatctgaaaagttatttgtgtagaaagttttttctttttttttggagggggaggcaggtgggggggctcacctcaacctccacctcccaggttcaagcaattctcctgcctcagcctcctgagtagctgagattacagacatgtgccaccacgcccggctaattttgtatttttagtagagacggggtttctccatgttggtcaggctggtcttgaactcctgacctcaagtgatctgccctcctcggcctcccaaag

SEQ ID NO: 99857 - DNA, 1030 bp, Homo sapiens
tgagccaactgttaatgtcttagctgcattgttcccctctctggaatgtgccccctcctccctggtcaactccagtccactccagagatggctgaattgaatccattaattagtcccaggtacagacttgctgctggacttgaacaccctgtctgttagatacttgttttctttctcgtttgctgcttggctcaagggaagcacagagtatacagaatggaagagcggagttaagaaacagatgatcttggttaaacctctcaaaagcaagatcacaaaggtcacccgaaggcccagtcccacatgtactgctagagcttgataaactctgggtagctcatgtggcgtatctcacctgcaccctctggaacctttgtcctggagagcatccaaggtactttctaatataggacaaggagttttctctgaagtcgttgttagacattaacaatacagatgtaggaaatatcagccctttcctcaaacttgaacttctgcctaagagcagtgtcggggaaattggttgcatgtagacagcaaattgaatgttaaacacaataagtctttgatgattaaaggccatagctggcaggcagttataagtttaaagtaaatagtgatttaatgcacctttagtcttattctgggaatctgtcaacatcccactcttcaaagcccattttgtaacttgtgtatttaggcatttcatccaaggaatttagtatttaagagtaaaaaaaagtttgttgtcttcctctctataattcatatttctttggaattctataaaattttatttccaaaaggaatgaattataagctcttagataaaaaaactcaaaataaaatttatatactagttgtcaaattcttgatgtgttgttgtagttttaaaataggagtcagggtatattttagatatatacataaaatgctaaagacattttatagttgcattaagtgatatccaacctagtggctaatacccagtcactagaccaaacctgagatacagagagtatggagagga

SEQ ID NO: 99858 - DNA, 1028 bp, Homo sapiens
attgaggggcaaatttaaataaattgtaaaaaacaaaaaaacagaggtgtacccccatttcttcctagtatattcagtagttgttgttttgtccagaattttcttttacaaattggaaaatattagggattgtaaaatgcagtataaataagatgaggaagtgaccctcagactaacaccattttagaagttgagtttgaggaaaaatggttaaaataatattgcatgttttcagccaataatacccagagagctgctgctctgagcctaggcctggaggtggtgcctggcgagttcttgctatcagacagtgtttgagtctactgccctctggtggctacttgttacactttcctgagccttactgagaaaaagaatttaaacgtaccagatgtgtgttaaacctttctcatttgttctttgcagagttctgtgcctactcgaggtagaattaaaagttctcagagattattttactcaactgaaatccaaggaggtaatttctcttaaggtcaccactgttagttatattcactgcacatgaattatataatttgaaatcttttttcatttatccagctgggttgatttcaggctagaatacacacatgaatagtgatgtctaattttttttgctgggctcagtggctcatgcctgtaatcccagcactttgggaggctgaggcaggtggatcacttgagatcaggagatcgagaccagattggccaccatggtaaaaaccctgtctctactaaaaatacaaaaaattatctgggcatagtggcacgcacctgtaatcccagctacttgggaggctgaggcatgagattcacttgaacccagaaggttgcagtgagctgagatcgagccactgcactccagcctgggagacagagagagtgagactgtctcaaaaacaaaaaaacaaaaaagaagaaaagaaaaagtgatgtctgatttttctttatacgtttgccaataaaagttgtgcttttttttttttttttggcaaagataagaccaaagg

SEQ ID NO: 99859 - DNA, 1259 bp, Homo sapiens
tgggaggagcacttgagcccaggaggtcgaggctgcagtgagccatgaccatgccactgcactccagcctgggcaacaatgtgaaactgtgtctctgaaaaaaaaaaaaatgaatttgaacacctgcactaaaccccatctccaccactgccggctgtataacccaaggcgagttactttctcttaagccttaattttctcatctgtaaaatggggattactaatacttagttcataggattgctatgaagggtaagtgggataatatgtatctgtaagtcctagtctaggaacttctttttctttttcttttttttttctttttttttctttttttttttgaggacccgaccttttattttgccaagcaaaaatcttaaaaacaacctataccaatatctccacaaatctattagcatttcataaaagaaaggatattttaacattcaaaatgaaagaaggacctaatcccaaaataaagatcagttttctgtagtccctagtgtttttttctcacgtatccatggactagtaagggtttcatcatggcctagcatgagtccataggccactgcttggaaaacttctatgtatccagtatacaatgcactgattactgtgctcagtgcttaacaggcaactggaagatggtaagaactattattaataacagacacttagaggttttgatatatgtaactttagagtccttctttccatttctaaaaattccgacaatttttgaacaagtgaacgagtggcctcttgtaagacaacagagccagaagtcctcaggagctcagtacaattgtgtctttgctttataaaataaatcatcatgaatgagaagtagctttgccatgtgtattactttcaccaggtattatgcctcactaaatgcagagttcttttctgtttctccgtattatgttagattgtttacctgaaccctgatggctagcttctttacagggttgtgaatgttgtcccttcagtcattagcgaaatgcttattgtgtatctactatgctgcagaccctgttcctagggtcggggatacacagtgaacaaaatagacaaaggctctccctctctttaaggggctttttatttttatttttatttttttattgagacggggtctcactctgtcacccaggctggagtgcagtgatataatcgtggcttaccacagcctcaacctcccaggctcaggtgacactcctacctcagcctcctaagtacctgggaccacaggt

SEQ ID NO: 99860 - DNA, 1081 bp, Homo sapiens
tggggtctcctttatgagttccattcatgaggactcctccttcatgacctaatcatctcccaatggccctatgtcttaatactatcaccttggaggttaggatttcaacatatgaataggggaacacattcagatgatagcaggctacccttctcaaacttattagaaaatggagtccttttttttcatggaagccccacaaccatccctgagaacataggtggtattctgcagacacagtttgggaaataagagaagtctacctctacactgctggctaggggttgagctgggaacagacacatttgcctcccctttgtactatctagctttccagattcttcccgctagttgtgttgatggtgatttgggattgttctttcacattcaaagctagggctatacactaattcattcattctcattcactaaaaaatatctaccatcacactgtgccaggagaccatagctagaacagggtccctgcctctgggaagtccccgtgccataagaaaacaaacacagatattcaatgggaggtaagacctgccaagtaccatctactgagcactgcagaagctgtggtgggggctggccagctctacctggggaactggggaaggcttcctaggggaggggatgggcacagcgtccccagggagcaccaggtgaagaaaactgggaagcagagagttgagaatgtgtttggcagcatgtgagtgccagggctttcagcagtgggggctggtggaggagcacagatggcctttaaagtcaactctgagtcactctctgaaattacagaaattcaaagagaaggatctggaaatcctccaacaagttatttgaccttctggtctctcaataaccatttggtatctagctgataaatggaaattctctgcaaaattgtgttatacaggaaaagttgcagaaaaattgttagagaaagaaaatcattctcctgccttcacctgtaaaccatagagctcacatttttcctaaggggctttatgctagcaacttgcccctggattctccattcatgcctcaatctactaacatgaccgatcggaggtta

SEQ ID NO: 99861 - DNA, 1027 bp, Homo sapiens
agaaaagcagaccaaagtataccacagatgtgtggaagtacatgttcagataacagaaaatacactgcaagctttagtctcaagctccctagaccataaaagcttatagaatggtcagctttccaaagcagaggctaaataactgtcattctgttgcatccaacatagcttcccaaactttgttgatgtaggattagtaagatgttccattagaaactcctaaaataacttcaggatgcttttaagtattcttttcatttgtgccatggaactaatgtgaggagctggcagttggaggtggttatcgaagcctgggaatggatgtctccagtcactgtttggtggaagaacctttttcaggttgtccctgcgcccccacaatacttgagaacactttctagaccagaataaaatgctcaagtaaattaatgacatctgtttgcattttgaagatgagaaactgtgagacttttaattcctagaggtaatagcaggataattgagtacagtaaattagaagttgctatttatgagcaaaagtatgtatgactagagacttcatccccatgagcttgcctgttcaccatattgttattttcttgcatgctttattagtctttggagccatacttcttgagtttgaatcctggctctgccacttaactagctagctgcatgcctttgaacaagtttcgtaatctctgtgcctcagtttcataatttgtgaatctgttgattagtccactcaatacctattccaatccccttttagcttgattttttttttcatctgacagagaatggaaactttccatttccagaatccctcaaagctactgttcagggtttgttaactaaatgcatttccataaacctttgaattcagatctagattgtgtgggatgagagatgggacataggaccttcattttttgctggtatggatagtggcagaggcagcatcgttctggaactagtcgctgtagtgatagcgtcctgatttaacagtcagcttttttattgggaa

SEQ ID NO: 99862 - DNA, 1039 bp, Homo sapiens
aagaaacagtgttccagattgaagtgtagaggcacctcctggaaggagacccagatgatagaaataggaaatgaacaggtccttgagagacactggagaaaacaagacttcaggttttcctctgacaagcaatcgtctgcttctttctccatgggcgtttcctattcaactggcccccaaataatcgtgaagccagggggacttataattgaaaacctggcaattaaattttaaggtagctagctttattgtttttttaatgagaggcatattaatagatgtccttgaagaacgctatcatttttagtatgactcagtcactgcaatgtttgcggttcgtctccatggctacccacagaaggaaactggattattttatgttgtttttaaaaggacaaaaaatacgagttatttgaatcttcatgttggaaagcagcagcttctatttggcaatgagattttagtgtcaaacatttcataacctttatttaaatatgtgtgccaagagtgcccggtgagaggatagcccaaaagtagagagtttagaagtctcaaagtcagaatcacctcaggtttaaaaagagtgtggtgtgtgtttacttgcatctgaataagtgtttgtgacaggtcaatacaagatatttgattccctgcaaactcactgcttaatttgatctctgtgaggttaggatggcattttccatttatctctgtgaatctttaataaaggctaacagataaggatattgaggctttggcctttggcattattgtctaattctgccccacagataaattcaccaacattataccatctcatgcatgttatgactggcctgtgatatcatctgtggctcttttcaggtctttgtgagacatcagaactaagagcgcagaaacatcacaacccttaagaagagaactcctaccgatgtcttaaattcatgtgctattactcatttcattagtctatttctttgcataacctatgtaaaggcccatgtaacagatcttattaccagtaattagcacaaaacaa

SEQ ID NO: 99863 - DNA, 1011 bp, Homo sapiens
tatggatgtgtgagtgtgtgatttattatggtaccaaaaatgtccaccttctttcctgcagcggaataagcttttttgaaatgctgaggttttattttaatagttgacaacctgggaaagttctgagtatttattttactgctcttttttgtgcatagaaaggtttagtagggtacttttttgcattaatttgccaatactcttattctttgttctaaataaagtgactagaatttttgtgtactattcaattaaaggaaacaaatgtcttttccccctctatggtcttatggatacacatttgcacacacacacatatgtatatagatgttggtatatatacacacatatatttatatatacacagatatatacatacacatgcaagtggagacatagattgtaccacctgtatgaatatgtatgtacacatggggacagaaagagtgtgcagtctatttgaactgtatcaaagtcttgtgcaggacttagaccaattctcattgtattagtgtcattccttgtcaaatgtccctaaagtgcctttcttgattattaatgctgaagaactctgtcatgattagatggttaccctttctaagctctgaaaaactctaatcatttgatcatgtgctgtagcaaagaaagtgtttagaatcagccaaggctcttgttcatttgagagattgagtcttgctcactggaacatggtcatcgtttgcgttgctcctgtcatagaataggcctgtatcatacagcaaggaacatctcagaaaaaaaattttttttccaaatagcatgtgctatgccaatgtgattactaagtacaattttgagtcctttatcctaattgctattaaagaataaaaatgtcggccgggcacagtggctcatgcctgtaatcccaacactttgggaggcccaggcaggcggatcacctgaggtcaggggttcaagatcagcctgacaaacatgttgaaaccccatctctactaaaaattagaaaattag

SEQ ID NO: 99864 - DNA, 1030 bp, Homo sapiens
gaagagcagaggaaaagacatttagaggctgccgctctgctgagtgaaagaaacgcagatgggtgcgttgatggaagaaggcaggagactcctcagtgcatgtgggctctgcttcagacagattggcattctctttctccttgtctgctttgactctagtgggacccgagatgaggattttgtcttgggggtttttttaaagaaaggaggctgaggctggcaggggtggggaattgatgatgctggtttcagggtttcagaagaaattgaatcttctccatcactgcatcaagatgggccctgtggtcccactggatgcaggggatggggcactcaaatgctgcgatacaggctataacagatatccacaaagcagcttatgcagtgttggatttgtttccaggtgattttttttaaaaaatcaagaatgtcattaaatgcgacttagagttgccaagtaccacaagagcttctaacctagttcgcgtttcctagaaagaaatagctcatgattgtattctgttttggatttctagaatgttatatttaaatctcttctctttgtgagtcatgcaaattaaatacatgatcattttaaatgcattttaaaacctgtgctccactttgagggtgtagagaaataatttgtctggcattttccttacagtttaattgtagctagtcgtttccaccccactcccctgctgctgtctttgctggactttgtggccccttcaaggccgtttgtggtctactgtcagtacaaagaggtaatactggaatggaatgggcaggaattcttatgtctgaatgttgattcttaaactgcatcccaggaagtagttcttaacagaattctgttgttgtctgcagcctctgttggaatgctacacaaaactgcgggagaggggaggggtcatcaacctcaggctgtctgaaacctggctcagaaattatcaggtacgtgttcttacagccagtcccaagagctgccctcccgagacttgactttccttgcagtagtactaga

SEQ ID NO: 99865 - DNA, 1018 bp, Homo sapiens
gtcaccaatcatgtgacatccaaatttgcagacacagggttttacaatagtatcaagtggggataagcttctttgagtcttcctgctatctgctttagaattatattacctccattggtaatactcatagactccaaacagactccctgaggagctgcaccatccttcagcctctgaataaagtactaatagaaagaccttcagtctcattactgtggaggactcactgagggtttacgtagtctagagtcactccacgggcagatgtttgtttcttttatctgttcaggttttggctccattattcagctataccctggaggaggacctgttcgggcagcaacagcatgttttggatttcccaaatcttttctcagtggtctttatgaattccctctcaacaaagtggacagtcttctacatggaacattttctgccaagatgttatcttcagagccaaaagacagtgctttggttgaagaaagtaatggcacactggaggaaaaacaggcttctgaacaagagaatgaagacagcatggcagaggccccagagagcaaccacccagaagaccaggaaacaatggaaacaatttctcaagatccagaacataaggggcctaaagagagaggaagcaaaaaagattatgtaaggatgccaagagtccccaccacccccataatctcagtccctcagttaacttcagttaagtcatgagatttagtttggctttggtgtattagctcccaagatgataactatcaaaacagagaacgagtgtgtgtacatgtatacaaacgtgtgattcggtcttcgggatggagctttaggatacagaagcgttgcatagatagcttaatcatggtttttatagtatataggctttcttgtgtatttgcaacttccttataaacaacctgcttctattggtttagtccaagttgataaatattgttgaaatgttttgacaggccagagcatttccataaatttgactgaaagaccccagtacattgat

SEQ ID NO: 99866 - DNA, 1062 bp, Homo sapiens
ccagccactcagacatctgtcgtagaaccttccaggcagaggaagcagcaggtgccaaaagcctgctgtgggaccttgctgggtgtgttcaaggaacagaaagaaggccattgtggctgaagctaaagtgtcaagagatcaggccaggaatgataggcaggggccagatcatttatgaccttgcaggtcatctttggagtgtattcttattgctatgggaagccactgtatggttttaagcatggggtagatgagtcaaattgcatttaaacaaagagcactctggcatccaggtggatagtaggggggcaagactgggagcaggaagatgacttagaggcttggagtagttttggcaggaaaggatagtgtgatgggggcagtgcagctgggaggccagacttgagtggctgatggactggatgtggatatgaactcagaaaaagaaagtgtcaaataatttcagaccataaatgtcaatagagcaatttctttccttagagactaaagaagcgggcactgataatcgaaatatagttgatgatgggaaatctcagaaacttactcaagatgacataaaagctttgaaggacaagggcattaaaggagaggtaatattcaaaggatttttagttttgtttttgtctgtttggcatttaggaaactgttgggtttttaaagcagactgtacctaaggtaaaacaaaaaaataacgttatagctttgatagaaataggttgaaatgtacatgttactcaacatttcaaagattttatgtcttatatacaggaatataagtgaatgacattactaatgtcagtggtagagaatgtaataacagtgcatatcaggatttaactttgttcattttcagtaatgttttcagccagtgtcttcagaaattagtttcctttacctctcttctccttttgttggatatctctgttcttttacgttggtttaagtggagttataaagtacttgtattttattataaattccaaatagagtatagaaatataaagttcatctatttggacttctgtggaaaagggattggag

SEQ ID NO: 99867 - DNA, 1407 bp, Homo sapiens
cgatttagggaaccaataaaggtgacacacccagagaccagcaatggtggtaagcctctgacacgggagcgtgggtgatgtggcagtatattctgtcgtaatcagcttcctggtggcacagagaaaggaagagaaggagtgggatggggcacaatcagaattaaccaccacatgattcccagaattcagtgttctgtgcacatgggccatgtcctgaagctaggtgggctttctaccgtccttaggtctttgctggagtagaccgtgtggtatagtggaaagaatgaggcttggggtcagacacagatttgaatttgaatcccagctccaacaacaccttgcaactgtgaatcttggacaagatacttctccctgggcctcggattgctcttctggaaagagctatgtcccaggattaccgtgagaattaaatcaaaaagtgtgaatcacacctcgcacacactgcctagcccctggttggcactcagcagatgttagttttcttttgagaagaaagcattgtgttcctgtgggatttctcttttaaattgcaataagataaaaaatctatgtcataggaaacctcaagttgcctggtcctcagtagagcattgtcagtgttaggctccatttccaagtgtgtagattgtcagtgtttatttgcaagtataatttgcttttattagataattttcaaataaaatggccgatcagaccaagcccaagaaatttgttaaatccttgttacttcgatgagtctttgcttcccctttccaaaattcagtgttcttgtggcttattcattaattttacgtctctatcccaaccaggttctctctagttcctttgttgctttatgttcagagataatgctgctgatcatccattgtggagaccacttttgaaataaactgtagtgaacatgtcttttctgtactggatagaaaagatattcagttaattgattactttttttccctagaaaagtaactttcgaaaaacagtggttctacctggataacgtcattggccatagttatggaactgcatttgaagtgaccagtggaggaagtctacagcccaagaagaagagggaagagcctactgcaggtgcacattttggatgcgtgaaatagatgctctccaactgactagtcagaaacatctcagcctccacctaattcccaagtgctaggccatgctatcccaaaagaaatcttaactcataatctaagaactgcagctcagtggagtgaagcaagtactgcctttggccatgagataacctggattctggctccagcccaccattaaatggttctctgttcttgggccaggcatttaatcctatgagtcgttgctgcgtcattgcaagaacataatgtaaagttctttcagtgcccagaa

SEQ ID NO: 99868 - DNA, 2933 bp, Homo sapiens
ttctttgagcggaagttggatcactgaagcgccaaaaaagaatttaggggaagacctgattttcgcttgaggcatttttgcggcgctgtgcgctacagacaccttctggaagctgcggtggggaaactgagtttcccgagccgttgagacagatggggttcagcaccgcgcggggacgacaggaaagctgcggctgaagagaactgcggacttggcaggagtcgcctgaggagctaagatcccggagactcttagccccgtggtgcttctctacgggagggagggagggagaatccggccggacagatctgcgcgtatcctggagccggcccagttgtgaactaggagagctttgggacctctgtcccaagcaagtaagaactttagccttaggagatgtaaataaagtagtatttgaagaagcacaggtacccaactgtttctttttactctttctccagtcctacttcttaacgtttttttgaatttgttactgttctcagcatattgtctcgtttgagaagggtatggcacgcagcgttgttgaaggagcgcctcagcttgggaggctgaaagttttatctctgtactgtcgacaaacaactttgatcttgatcggtttgcttaatttctttgagcatcagtttcataatgtgtaatgcctaattattggagccctgtcatgccgttaaatcgtgaactttctagttactatcttgttttattaactaaaccccttttaagtaaggatttgggtagagtatttgataatgaattgcactgcagcgtacaggtatatctttatttacttgtatacttaggatatgaatcatttttaagtagacgtgtattttataagaacagttttggatttacagaaaaactgcacaaaaaatggatgtgacactgcaggattgactgtatgtaagaagctatgatgatgtatccctagtgtctcacaggccagaattatgttcatcctgtcctgccctataataagaagtctcaaatactgcaaataagttttcatagagttaattacctgtcctattttcatttctgtaatggggacttgtaaacaggtacagtacctgtccttatttttaacctgtgagcgtctagtatacgtaaaccatatttaatagttattaaactattatggtataccttaaaaagcgatagagattagaaacttaactgcagaatatttgggtcttgtatcatagctgtacaactttgcaagcctgtttgctactcttgaacctagaatacattaatttttccctttttattaatacatttttaagagcactattttccttacagttttggtgaagacctttttaatatctatcttttaggagagatgaatggagagtatagaggcagaggatttggacgaggaagatttcaaagctggaaaaggggaagaggtggtgggaacttctcaggaaaatggagagaaagagaacacagacctgatctgagtaaaaccacaggaaaacgtacttctggtaggtgaggtcaatgattgttcaatttttttcacttaaggaagcaattcacgtctatcatacaaggcggtttatctcatacttcagtttgtcttttatttcatgctactccttagtaagtatttgaacattgatgtcccagatttttactaaaacccctaatttggatactctattaatgagagtctcatttggaaagagaagcatattggaaaaatgttcactctgtttctactaacctagtattttatttttttcagaacaaaccccacagtttttgctttcaacaaagaccccacagtcaatgcagtcaacattggatcgattcataccatataaaggctggaagctttatttctctgaaggtagggtttaaaaagtacaaaaaagcaccataaatcatattttcttaacttgtctttggatgctacatcttgtattactgtaattcatttactaacatatacctgctttaatcttagttcacccaaacaattaaatgatgtttatgtttcaaaagcattttagactttatatcagtcaggaaagcagaaaccatactaggtatttcaaaaaggggacttaatacaagaaattggatacaaaaatggaagactgaaagagcagaaaggaaatattgaggtaactccccagaaagtagtaattcaggaagcagcaaccatccttatggctaagagactaaaagaagttctgaggttaccagaatgtgggaattcaaaggttggagaggtcacagcatagctgttattttgacttttgaggggcaccctacaaagctatgcttggacttctgaaggctaccttacagagctgtgcttagaccactaaggcaaatgaagctggttgccactggtaactgagggggcatgactcagtggtgcttggaactggaggctagcactatcgttatcttctgcagctgcagagatgctgaaaagagttggaaacaagaataaattcctttctcttcctgccaccttcccgtctctaaagtgccttcaattggcagaatttaaagagaatctgagacatgtagggtacagatctgaattatagcatcgcagagcaggaagtagaacagtgggcctgaaatcaagggacaataacaaatacagctttgtgtagaaacacaggtaaggaatctccctttgataattaggaataccaattaacctacatcagtctgtataggtgcagggaactgtcttttttgtgctgttaaaatacccatttgtttcttatgtctcatgaggggtgtgtgtgtgtgtgtgtgtgtgtgtgtgtgtgcatactttttatttttttttgagatggagtcttgctctgttgcccaggctgaagtgcagtggcgcgatcttggctcactgcaagctctgcctcccaggttcacgccattct

SEQ ID NO: 99869 - DNA, 1149 bp, Homo sapiens
caccgtgttagctaggatggtcttgatctcctgacctcgttatccgcccgcctcggcctcccaaagtgctaggattccagacgtgagccaccgcacccagccgcatactttttttttttaggaaaactagacgtttgaggtccaggaccctccctgccccataccaggcatgcagtagtcattttgtgaatgaatagagtactttacaaatgttttctttattggaaatctgttcgtttttttccatcaatagaatctgtttcatgaatgatcttttgttcctttaggatgtattagccaccagcactcccattgctcccctagcagatagctcagaacactataagtgatctttggacagtcctaaagatggagttcaagaggtgccttagccttcaccatctgtgcttccaaactactttattgtactgttcttctgtgagagacatatttgaaaatgtagaactttagagtgttaaaaaaaaaaaggcttttcagttttgccaccagggtcaagtgttggtctgtctcctgatctcaggaaagactgtgattgtgattgtcttcagctctgtcagagtaagagcttagtttatgtgtctggctttggctttattataatttttagtttaagcttattgtctaaattatctgaactaacatgtcctattaggtgtcaaagatgcaaaacaaagtttcccagatagtggggcttttagagagagagagtttctgtctgcatttcacattatgcaaacctaaatttgttttagaatcttaagtttacattctatactagttcttatatgaatgtaatcaaaatacaaagcaattagaaaaaaatcatctaccatgtatatagtgctgcttttgtctcatgaaaaatgtgcatgtacctgtgtgattatttgtgctaatgccatatttgttggattagtttacagcgatagctctcctttgattgagaagattcaagcatttgaaaaatttttcacaaggcatattgatttgtatgacaaggtaagattcctctacagcaaagctaccagtcatgtgccatcttaccaatgtattcgaggtacttgtgattatgatcgtaggcactggagtcagacttccttggttcagacctcagttctgccacttacc

SEQ ID NO: 99870 - DNA, 1373 bp, Homo sapiens
catgtgtgatgtcgtgaagaggtcctccatttgtctgaactgtggggctttgaagtgacagaaagatggctgtttcagttgatctctattcccgccactattgttgcgtaacacatcactccaaaactcagtggccgaaaataaagccaatcattttattagttctcatgatatctgtggatcaggagtttggaagaactactcaactggctagttctggctccaggcctctcatggagttgtagtcagatggtggctggagtacagcaaggtggctgggggctggccaggcatcttcttctccatgtggctgtgtgggctagtttgggcttcttgcacacagtatagcagctcaggcactcagtctgcttatatggctgctgacaggttcaggtcaagaagtgcagttggtaggcagaaatggccttgccttttgtgagctagtctcagaagtcgtgcaacatcactgtgtcacattctgttggtaacaaagtgagtcccaggccttctcaaattccaggagaaggaattagccttcatttctttttttttttttttttttttttttttttttttgagacggagtctcgctctgtcgcccaggccggactgcggactgcagtggcgcaatctcggctcactgcaagctccgcttcccgggttcacgccattctcctgcctcagcctcccgagtagctgggactacaggcgcccgccaccgcgcccggctaattttttgtatttttagtagagacggggtttcaccttgttagccaggatggtctcgatctcccgacctcatgatccacccgcctcggcctcccaaagtgctgggattacaggcgtgagccaccgcgcccggccttcatttcttaatggaggagtagcaaggttctaaaaagtcttgaagataaatattgttgcaatcatatttggcaaatacagtctgccacagtctgaatttataaatgcttcttgagatccaaacaccaaacaagtgcctgtgtggcataataagtattacactctacagaaagtgcaaaaggagcctagatgagaaagctggggattaaagaaaactctggaaagccttttgaaaaggagaggattggcattgggcatgtgggacagaatgagagggttgttgaaggagcgagaggtggcatgggcacagaggaagcaataagtgcttcatgtgggaggcaagcaaagcaccttgcatacccatagcaggatacgaacagtaagtgagaaggatcaattggaaagtgcctcaaaagctgtcgatattaaattgttgcaggaggaaatagaaagtcattaatctctcagtggattttactttactagcatcctgagaccaacttttaaaa

SEQ ID NO: 99871 - DNA, 1054 bp, Homo sapiens
tagaagtttgtttttagacttccttttcttagaaaaaaattatcatgcttttaaaacaatccccaaacaaattaatattatagaaggaggaataccccctttactagtcacctttatgttttccttacttctgttttttgttcttttttcgcacttgagcttgttaaagcaggtttggcattagcactctttggaggaagccagaaatacgcagatgacaaaaacagaattccaattcggggagacccccacatccttgttgttggagatccaggcctaggaaaaagtcaaatgctacaggtagacaatcagtcatttagtgtttgttcttttgcttgtaaaatgcgttaataattcacaagtgaattttctcaaagcatgtagtgtgtgtgttccagaggacatggttaggtggcgtaaatgaattggaatttgtgtgagtaatatgtaacttatatctgaccatatttttaaattgagccagtctcctgttacagaggctgtacaaacatcttggtctgttgagacatcaactattaggaaatattaaccatttctctaaccattgttttgctagtctttgttgttgttagttgttatgtgacctcacctatgaacagaatagttcaggggagttaaagcagggtcacctattctccctcatacaagtacataaacactgtattgggctttaagaacagtctgctaaaggtgtgggatctgtctgtatatatctccactgcttgtgagtccaaatcaaggcaacctttttttttgagacggagtcacactctgttgcccaggctggagtgcagtggcatgatctgggctcactgcaacctctgcctcccacttttaagcaatccctgtgcctcagcctcctgagtagctgggattataggtgcgcaccaccacgcccagctaatttttgtatttttagtagagacagggttttgctgtgttggccaggctggtcttgaactcttggcctcaagtgatccacccaccttaacctcccaaagtgctgggattaccggtgtgagccaccacgctc

SEQ ID NO: 99872 - DNA, 1550 bp, Homo sapiens
cgatttaaacaggtctgtctgactccagagagctatgcttttaactcttgtgctgtttacttttctggcctgttatagcatgtttgctcagaaggtgagcatgtattaagtcactttattacctgatgtttaaagaagcattggaaccttcaaaattaaaattggtactcatgtttttgcttttcgaacttgaaaatgaagcataaattggaattgtgttgagtatttatatgaccacagacttcagaatctgactgcctgggtttgattgaatcctgactttccaccttgatagctgtgtagttcctcattcactctttgttggccttggttttgacatcagtaaatcaggatataataatacctttctctgctggtgatggtgcaccttgtacactaaagctcttaaaagaatacctagcatatacctaacgtttgtgagcaactgctgttagctattacttcccttttactttggatgattctcttaaactttttgtttccttaggcagcgtgcaatgttgccccacgtggcgtgtatgtttgtggtaacaccacgaccacctctggtctgacggtaactctttcaaaagatagttcctctggagattttgctttggaagctggtgccctggtacttggtgatcaaggtgagaggccaaagggaataattagtgattctgggactttttgaaaagccttttccttttcagttaatttctttacattctgtttaagagaaacatttagatagcaaagtcctaaccagtaagttgacactgtcagaaataatcattggaaatgcagtatcatcatttttatactacagaattggaactgtacttaatgtcattcattttcagaatcttatagccgatacaagtatatgtaaaaatcaaataaatatgtgtagctccctgaacttcccatttcataccacctatcatatttgtgatcattttttttaaaagcctgttttgaagctttgtagtaagctccctgtatggtgggatttggatgtcttgtggactgccatgttcccattgcctagtacataggggcacagtaaatacttattgaatgcgttactatgatttagctctaaatagtttggaaaccttggcactgacaaaaaggtggatgtcatcctttgctcacagaggacttgcaataggagattacaggtgttactttcgatgtttttttctttttatgagacagagtcttgctctgtcacccaggctggagtgcagtggtgcagtctcagctttctgcaacctctgccttccaggttcaagccattctcgtgcctcctgagtagctgggattacaggtgtgcgtgaccacatccagctaatttttgtatttttagtagagacggggttttaccatgttggccaggctggtcttgaactcctggcctcaagtgatccacccaccacacctcccaaagtgctgagattacaggctacaggcgtgagccaccacacctggcctacttcagaatgaatagttttgccgtattgtaactgaactcattggtttttttt

SEQ ID NO: 99873 - DNA, 1180 bp, Homo sapiens
tggagatttagggtatttaccaccaccaccaaaaaaatcaacctactagtagtttttctttagtaaaatgacaaagtgctatattagaaaaatcagaaagatctattgaacaaaaatccagcagacttggattctgttttttaatggtatcatgaacaaaatactgaactagctaacctctgatatgtcatgtagcagtattgccaattagtgataataggacatgaagaattcagtgggtttgggggtgtgagaaagagccatgtcctcaacctacccagggtagatacatgtaattcttgtgcccatgttgcagtggttggatatatcgaatccaagaagctatttgcttatttctttaacctaaatcttggtttttcaagttctgcgtggaacttgagtagtaaataagtgagtagacagttttctagtttttccttttgattccaatcattgtttcttctttctttcatccttcatagaatggggagtgcactactatccagatttgatttggtctttatcctgttagatactccaaatgagcatcatgatcacttactctctgaacatgtgattgcaataagagctggaaagcagagaaccattagcagtgccacagtagctcgtatgaatagtcaagattcaaatacttccgtacttgaagtagtttctgagaagccattatcagaaagactaaaggtataaatgtttcttctccttattcagtttggttctgtttgaatgtcaaagttcagtgtgtggcttattgtagagcagtaggatacaaactttttttttaccagaactttttaatatttccatactagagtttacgtaaacttcatctgaaataatccaagtcggcctggcgtggtggcttatgccggtaatcccagcactttgggaggccgaggcaggtggatcatgaggtcaagagatcgagaccatcctggccaacatgatgaaaccccatctctactaaaaatacaaaaattagctgggcatggtggtgcgtgtctgtaatcccagctacttgggaggctgaggcaggagaattgcttgaacctgggaggcggaggttgcagtgagctgagatctcaccactgcactccagcctgagtgacagagcgagactgtctcaaaaaaaaaaaaaaaaaggaatctaagtcagctaaga

SEQ ID NO: 99874 - DNA, 1780 bp, Homo sapiens
ggactggggtactgggtcgagagtgcgagcaagcgagccagaaggggaaaggcggctgctcgtgcctgagctaccgcagaggggagtgggaacagtggggtaaagggggggggggcgggaataagaaaggccgagagaaggcagacagagggtggtggtggtgggggtggtggtgggggtggtggtagggggagagggagagggaggagctggaggaggttagaaggaggagctggaggaggctagaaggaggagctggaggaggttaggggctgagggagtgagtgagtgaagcggacgcgagggaggggagggaagggaaaggaaagggggggatcacgcaggggcgcgcgcaagcaccgggagcgcgctcggagacgagtggaactggatagggtttgctgtcagcggcgtgagcttcggccgccattttacaacagctccactcgcgccagacacagggagcagcgagcacgcctttcttgcaacctggtaccatcggacaggattcctccccctcagtccaacggggagatctttggaaacatggctacagaacatgttaatggaaatgatactgaagagcccatggatactacttctgcagttatccattcagaaaattttcagacattgcttgatgctggtttatcacagaaagttgctgaaaaactagatgaaatttacgttgcagggctagttgcacatagtcatttagatgaaagagctattgaagctttaaaagaattcaatgaagacggtgcattggcagttcttcaacagttaaagacagtgatctctctcgtgttcagaacaaaagtgcctttttatgtggagtcatgaaaccttataggcagagagaaaaacaagggaccaaagtagcagattctagtaaaggaccagatgaggcaaaaattaaggcactcttggaaagagcaggctacacacttgatgtgaccactggacagaggaaatatggaggaccacctccagattccgtttattcaggtcagcagccttctgttggcactgagatatttgtgggaaagatcccaagagatctatttgaggatgaacttgttccattatttgagaaagctggtcctatatgggatcttcgtctaatgatggatccactcactggtctcaatagaggttatgtgtttgtcactttttgtacaaaagcagctcgggaggctgttaaaactgtataataatcatgaaattcgttctggaaaacacattggtgtctgcatctcagttgccaacaataggctttttgtgggctctattcctaagagttaaaaccaaggaacagattcttgaagaatttagcaaaagtaacagagggtcttacagacgtcattttataccaccaaccggatgacaagaaaaaaaacaggcttttgctttcttgaatatgaagatcacaaaacagctgcccaggcaaggcgtaggttaatgagtggtaaagtcaaggtctgggggaatgttggaactgttgaatgggctgatcctatggaagatcctgatcctgaggttatggcaaaggtaaaagtgctgtttgtacgcaaccttgccaatactgtaacggaagagattttagaaaaggcatttagtcagtttgggaaactggaatgagtgaagaagttaaaagattatccattcattcattttggtgagtgagatggtgctgtcaaggctatggaagaaatgaatggtaaagacttggagggagaaaatattgaaattgtttttgccaagccaccaaatcagaaaa

SEQ ID NO: 99875 - DNA, 1043 bp, Homo sapiens
cattgtttattcagaggatattcctctttcttccctccatagagcagaatcggagatcagaggaggctcatagagctgaacagttgcaggatgcggaggaggaaaaagatgattcaaatgaagaagaaaacaaagacagccttgtagatgatgaagaagagaaagaagatcttggcgatgaggatgaagcagaggaagaagaggaggaggacaacttggctgctggtgtggatgaggagagaagtgaggccaatgatcaggggcccccaggagaggacggtgtgacccgggaggaagtagagcctgaggaggctgaagaaggcatctctgagcaaccctgcccagctgacacagaggtggtggaagactccttgaggcagcgtaaaagtcagcatgctgacaagggactgtagatttaatgatgcgttttcaagaatacacaccaaaacaatatgtcagcttccctttggcctgcagtttgtaccaaatccttaatttttcctgaatgagcaagcttctcttaaaagatgctctctagtcatttggtctcatggcagtaagcctcatgtatactaaggagagtcttccaggtgtgacaatcaggatatagaaaaacaaacgtagtgttgggatctgtttggagactgggatgggaacaagttcatttacttaggggtcagagagtctcgaccagaggaggccattcccagtcctaatcagcaccttccagagacaaggctgcaggccctgtgaaatgaaagccaagcaggagccttggctcctgagcatccccaaagtgtaacgtagaagccttgcatccttttcttgtgtaaagtatttatttttgtcaaattgcaggaaacatcaggcaccacagtgcatgaaaaatctttcacagctagaaattgaaagggccttgggtatagagagcagctcagaagtcatcccagccctctgaatctcctgtgctatgttttatttcttacctttaatttttccagcatttccaccatgggcattcaggctctccacactcttcacta

SEQ ID NO: 99876 - DNA, 1052 bp, Homo sapiens
atttaaagggcaaggatctgttctttactcctagtctcattcagcatttttttgcatacctaccctttttttaaatattttcattctctgtttgtggttgtgattgtgattatttgaataagttatttccttctgctactagactataagctctgtgagaataaaggttgtacatgtttttattcatccatgtgtcttgagtggtaaccacagtctctggaacaaagaaggtgcttggtaaatatttgttgaggtactaagggttttatttatctttgtctttacatgcacataacatagcatttgatatgtacttagtgttcagtaaaggtttgctaaaacaaattggaaaaaatatttttcacatacatatattccctttacggtacttacagattttataaatgtacaaacattatacatgatcttaatcatttcatattacttattctttttaaactgataactgatgtaatcatacctatagtttgttgagtccttcactatgtacccagcaccatgctaagcctaataacacttgccctaatctaactttagaaccattaagttaggcttttatatacccattttatagaaaaaaggtgactgagactaagaaaggttaaataatctaaagttataaagttaataaatgggtaagtcggtatttaactttgcaaaaccccagtttgcatgactctaaatcctatcctttcagcctccttacaatccaagtgatgcaagttgtatgtcagttactagaaagtgttaggtaataaaaataggtagaaatgaaatttctgtaagtcaaaaaaaatagtaaatgtgagtcaacaattgcagtgattttaataatgtgattatgaaagtaagctcaagaatgctttttttggaggacttaagtgtaacttttgttctgtttatgcttcttgtaggtttgagtggccgcttctttgtcaccactctcccagcattttttcagtaagtttaaataatcttctaatcttgcaaatattagaaatcaatagatgtgtaccaggaattctaagttg

SEQ ID NO: 99877 - DNA, 1098 bp, Homo sapiens
tggaaggcaatacacaccatgtccagtagacctatcagcaggttccagcacctcatggggtaggggaaacagataacagataagtcccactgagaagcataaagcgggatcggagacctgagaaaatgagtgctgggaaggggtctgctgctttacagagccatagtggggaaaggtgtcttgataggaggcagttatatgagtagagacatgaacttagtgagggagagcattcctctttgccggggatacagcaagagcaaagcatatttcaggaatagaggaaggccaatgtggctactgtagagttcagaccttttaggccatgaaaatgacttgggcttttcttctgatggaagagggaaggcttctgaaagttctgagcacagaagtgatgggatctgagcttttgaaagttccactggtggctgttgggagtaaactacaaaagagagaagcaagcagaccaactaaatggctgctgcagatatcctggggtgatgatgataactttgcctgaggtggtagctagagaggtggtgaacaaagtgacataatctgaatatgttttaagatagagacacagggtttgataatgtattggatgtgaagtatgagcaaaagaaaagattctagaacaactattagtgttttggcccagaaaattgggagaattgggttgccatgtcctcagataagaaggaaggaagagcatatttaaacagaaaaaaatccagaatttggttctggatatttaaatgttgagatgcctgctagacttttacctgataatgtcaggacagttagacacaagtctggggttcagggaagatgttggccctggagatacaaatgtgggcatttgaggctcaaatcctgggtgaggtctcttaaggaatgtaggtgtaaaagaaagaggtttgagatctgagacatgggattgccagcatttagactttgaggagacttggaggaaacagcaaaagagactgagaatggtatatacgtaaaagaatagaaggcaggaacttgaacagacacttgtgtaccaacgtccatcgatggatgagtggatatacaaaatgtcgcatacactta

SEQ ID NO: 99878 - DNA, 1095 bp, Homo sapiens
ttgtgtattgcaagtgcctataagagtatagttattaaggtcacaagctcttgggtcagaaagccaagccacaacaccaataacaagctgtataatcctgcaagttatatcatgtctctgagacttagtttcttcatctgaattacaggaataatcgccatgtttatatcatctagttgcggtaaggactaaatgacaaaatgcacgtaaggcacctaacacaattgtcacatccattgtttgtctaaatgcattttgccatcattattaagtaaataaaatatataacttacatgtatgtgatgtagtgggaaaaagcaagttaaataggcataatttacctatttaccatagaattccatgcactaatatagattgtcactataatctatatttatatatatagattgtcactataatctatgtataagagatttatacttttgtagctgtggcatttaaacctactgattaaaatctaacttctatgtattagctatagaaaaatgaacttgaggcatatttctctttgcagccaaacacctacccccagagaactatcacagcaatattgttgtactaagacttacagttcttatttagaaaactgtctagatttgccaacagttaaatagattttccaaccatcaaaataattttagagcaatttactttcagttaagaacatgcgggtatctttttctgcactatgaagtcattgaagcaaaatccaaagcactgttttgaaatggaataacaaggttaggggtcagagagacccagattcaaactccagtgcacttattagctgagagaacccaggaaggtttattggtttccctgtgaatgataatacttgctgtattgatttgtcttgctagttggattttaactggtaacaagacataaatcataatgtttgatactacttacttccctatgggccttaagttcacttttcagtgtattcttcttaatgttctgtgagactggtaaataatgaagtatatatatatatatgtgtgtgtatatatatatatatatatatatatatatatatatatatacacacacatatatatatattacttgaac

SEQ ID NO: 99879 - DNA, 1090 bp, Homo sapiens
tttccctttcgttgacaaagatggggtgtgctgccacaggaaacccttgttatatggaggctcttccagctttatttaaattgtgaacatttgtacttaataacacgaacaatgagcagtctggatttttctttttcaagttgtcagtgcaagtaaaggcattttaaaatccgaatctgcttccaccagcagttttgataattaaagtacacaaaatgtatcaaacatttgagataggccaagtattccgttgaatttgttacagatcttgaagtggactcaatcactacttgctacttttcagagaacctttccaggtatactagctaggtatgaatatcagaaggctattaccactgtttgaccacaaaggtaaagaacatccaatagacaactaaattctagatctttctttatttgcggtatgggaaattttttaacatattctgaatcttttattttttgcaactttcactgtctcagattagactttaaaactcaagagctagaataattggtctagcaccatctctggtgtcttctatggatgcgttgcctacagtatattctgtcatcatctgtggttttctaaactgaattgcatttaatttcaatcaagcaattcatgctgtatttgaacttcaggcatatctttattttccagaaagcctgtttatcatatggccactcctgacttcctgaaactctaacagattaactgagaagaaaacaagtattatatttctaaggcattttcagctagtggaaaagataaatgactatatgagtcaataaaaaagtataattttcattgaaaggtagattggaagagcactatcaagacaaaaaaaaaagaatctgtttttaatgaaaatgaagagatctgttttctcaatcgtcatactaaaaaatgagtggtgtctgcacatatttttatttgggataataaaattgaacaagattattgctaagccagcatactaaggaaagaggacatataagccatatcaaatttaatgtaattgccccacactatcttctacaagaaacaaaaacaaaaaacaaacaaacaaaaacttggaaataagat

SEQ ID NO: 99880 - DNA, 1003 bp, Homo sapiens
cagtggcacgatcttggctcactgcaacctctgcctcctgggttcaagcgattctcatgcctccgcctactgagtagctgggaccacaggtgggcgtcaccacacccagctaatttttttgtatttttagtaggtatggggtttcaccatgttggacaggctggtctcaaactcttgacctcaagtgacccacccacctcggcctcccaaagtgctgggattacgggtgtgagccactgcacccggcccagattgccttcttcaggtaagtattttaaacctcttatgagctgtttccttccttcatcccttcgtttcctcctttttcctcccctcctaggactctctttctcttttcatttgcctctattttccttcattcttttcttcctttgttcattccttcctcccttctttcttccatctccctcttcttctttcttccatctccctcttcttctttcttccctctcttccttttttcctccttatttcttgctttccttctttatttcactcatctaaaaaaaacctgtagtatagatctttgaggaaattattttagttttgacattcattgcacagttgtctgtaacccagttagggaattctttcctatttttaaaatgaaaatagctgagagatttgtgaggaaaatttgaaacaatgttgattctgaatgtttttaaaaatttctaatatttatgaaacaactgtatctcagatgagcttcaatttgcaaggcatcattccattttcatttttaattctctgttccaatgcctctgctaagaaataagcattttctcataggaagagattattccttttaactttttttcaattttaatttttattcagcctcttacctttttgctaaaaccaaaagttcaaaagaaaggtgatcaggacactcccaggaattttttagccatgtgagaatatatggtgaaatgattcaagtagatgcaacatggtctactggaaaagcactgagattttg

SEQ ID NO: 99881 - DNA, 1030 bp, Homo sapiens
tcaatgacctagttaaataaatcgttgtaataaataaaaatgtcttcctgtctttatgtaactgctcattttgtgaaaagcataacttggctgcacaccttttttccgccttcttctgataaattcttggagtccaaaaggtatctttcatttagtagatttttcaaaatgtttatattcatagcaagttctggtttgggtcaagcaggtggtagaaatcataactgcctccagaaatcaggagggcccacgcagtacaggacttggcaggccctggtggcctaaggtcagccagagtgcagatgcaatgcagcaactatagtaccagcattattctagaaagttcttacttcttggaagtactgacttgtaagtaaaagagcattttaacttgatcatattcactctggagtcttctacatctgaatctaaaggggaactgtattcttcctgcaaatttgggattctctaaataaagttccagggcaccagaggttccactgggttagacctttgatttattttaatgaagagcccttcttctttgttgatgtctgacagcacattcacagtgatccagtcatttttggggtaagatagaaggaatccaggtagaatacaatataaaaatgtctcaaactaggcaagagaagagtctagtcctgtggtaggtcatatttgtcaaaatatttgctaccctcttagctgttcatcctcactgagcctctctcttcaaaagattatccttcatatcccaacactgtgaggcttgagcacgtgctttgctttgaacaatgaaatacaagggaagcaatgtaatccatttctgagccaaaaaaattaagagccattgagtgattctgccaggcagtctcctgggtcatctccagaatctggagtgcagagccacagtgacccataatggacattgtgtaagcaagaaataagtatttgttattcataaattaccagtgttttgggcttgttactgcaacattgacccattggtagaaacaactcagcttctggt

SEQ ID NO: 99882 - DNA, 1065 bp, Homo sapiens
gtaggagagggagggagcgtctgtgtactgccacagctgggaacattactgcacctacttcctagtgccttgcaggcatctttgggacttgctaagaacctttggagaagtgtaagcagaggttaattgttcaaccacctgcttttagaaagatataaattttatatatgtaaaataatttttaaaatcatgattaatagcctatatcccttcagttacttttacaaagccttccaatgtccagaaggaaactgctgacagtgacatttatggagaagggggaaaaaaaaagtaatttttcaactcaaattgaagggcagtggatagagaggggaacataaattcattataaaatatcttcttaacccatatatatagccaaaaaaaaaaaggagctaattgcagaccaattatggaaaaaacctgaccttgggagaaaggcatgctatttatttataatcagtattaaggatttagaagcattttcaaggtttgcatttatttggggttgaaatgtcataaatatctgtcagcatggcaatattctagttaatttgattttggtgttgataaggccaagttcaaataatcaatctcaattaggctgattaatttcacactaaaaaactgtactgaggggacacaatttacttaaaccctaattgaccgtgttgtgcctttgggcacagagagatcttaaaaaggagaaatcagggaaatcactatacacaaacactggaaaaactgacttaattttcttgtttttaccaacaattggttgtgttgttgtcaaatggataaagtagaactttaaagaaaaatcaactttgtgcagtctcttaaaaatacctgaatgaaatgaaataaaattcataaaattctatccaacaattgaaaaaaacagctttttttttttttgcttggaggctagaggatgatgatgagtagctctattctgttagctctttctgtagctctattctgttaaattgtcatgacatttgttcagctcctaaaaaatgaaaattgggattgaaaatcaatttttagtattttttttccaaa

SEQ ID NO: 99883 - DNA, 1077 bp, Homo sapiens
tatttggatttcatttattcatttaaatatttatgaagccctactacttaccctcaggatgctaggcattctaaaggaatatcttgctagagaaacgtctccgtttagattgtaccttaagtttcagtcacagcacagaaaagggcttctttggaacctgtgacaggtgaccgtcttctccttttcctctgcagttagattcagggcgactgctttgggctaaattatgaaagacttaagcaggagtaaagagatttttctgaaagtaaaaatatctaaatacctaaatagattcccgagggctgttgtgtgtctctttgaagatctttaaatgcggagacaaagaaggcgtctaccagcagagggttgcgtatgtctgagtgacctttttatgatctcttttgagtccgtgaaggatgcgattaattaaagtcggaagtttgtcactgaaataatagttatgagatccagagaattcaaggtgttggaggactcattaagtagttgcataaatatcatgctgaaagatttaatgagaccacagggtcacttatagaacgatggtgcagagatgacctagaaaaaaataaattagaatcgatattgtgcttctgaattaacagctatagattgctatattaacacctgagacataaattctataattatatcttaatgatgaatattgatgttcttgtcacggaaaaaatgaaaattgctcacatttagtattttacttatcaatagtaaaataaatgtatatatgcgtgcttatttctgtgacatctgggaaccgtgaatgctttaagtagctacaattaaatgaatagtgttttttttttttccttttaattcaaccaatagttattaaatgcctactacacagcaggcactgggctaggtgctgggaaaaaacacagatgcacccttttccccccttcaagttgattatagtatagtgctatccaatagaattttctgcagtgatggaaattttccatgtctcagtgtccagggcagtagcaactagccacaagtagttattaaccatttgaaatgtggctgatgcaactaagg

SEQ ID NO: 99884 - DNA, 1102 bp, Homo sapiens
ggaccaatgagaaggaggttgttcatccaattttcaaaatgtgtgtgtagagctacctaaataaagtaggagaacagaagggaagaaagggttctaaaaaataaccagtctgtggcaaattttacatctgagaagaccaaaaagactgaagaccacaaaatttaagtgacttggccagaagtcattcagatattcttatgacatgaatttgatatgaagaaaatacattttaaaggtagttttccccccttatggtttatggttgaagcagattctattttcttacaaatgctgtgttctgatatttaaaatgttgtctggcatcattaggtctcaatcccttcttagaacaaaatgttcctgctctctcccatttgaagagtattctttcttcagatgagttttctaaactttcctattaaacttgctggaatgtgaatggggaaattagaaagatttttgtttttttgtgtgtcagtgaggtgattcatcacagcacatttcttagaatttggagggaatcctgggtctgggagtgctggtgacttggaacaggttctgctgcagctgggtgaacttggtctttgtagacttctctctcaagtttatctcaagagggggatttgaccaaagagttagaatggaaataatggcattcttctcccatttcttatttctgacctaacagcacaactcaaaatatactcaggtgttcttttatcttgtgagataactccctagaattggtgggagtgagtggggggggaagaatctgctctcccctgcaccccttaccccatttctgaaatgtctgaatctttcttccttccaatcatatgctcaagaatatcaaaaagagaaagatttccaagtcagttctacattttgatcacatccccctattaatcatatgtttttgctaccatctgcaacagagagaaattttaaattcattgtgcatacatcgtttaaaatttcccctctccgttatgttatttaaacttttcctacatatcaattagtttgaaataataagtctttaggctatccattaattgctgtactgtagacatgatctgtatttaaaattatgcaaggaaaa

SEQ ID NO: 99885 - DNA, 1042 bp, Homo sapiens
ctcatgtggctatgatggagcaccttgtacagggccctactctccatgttggcacatacgagtcactggggcatcaaacaggaagaagacaattgccagttctttccctgctgttccaacaatttagaaggaagtggggcttttacaatgtcgtactcttttgcatgaatgaaatcttagcctgttgtttgacagcgtccatttactaccattcagacctcatcatcaattcacctcaattttaattcagtaacacatgtgtttccaaggaagatagggaaggaagaaaagcaagtgagcctgttttaagaaaacaacagattgttgttctcttataggttgaactgggggaccttcagctatggatatattgtacctgacctagcagataatttctctcaggttaatgctcattggtggacaagaccccatagtgcttgataagtactatttctttaattattaacaaaagaagtaaaatacaagaaaatgtcaaatacctaaaccaatgctttttaacattttaaataatttaattctaagaaaaacctacattttagtaatttaattttgatgatgatttttaataatttataataattgacccagttgtggctaagttataactgtagtagactttcatcatgggatagtagtagattttattatattctaaactaagtcactgcttcatgacatattaagtgccatatatttcactctttttaaacagccatacaattattaatgaactaatttcaaaattgtatttattacattccaagttagagcttttgctttttcttcttataaactaaatacttgttcattgtaagaaaatatgaaaagaatacagggtaattctggctccgttccaacaaagccccatccatcagtggtctagagctattccagcccaagggttgcaaactcagatgttacaggggccaggcaagtcatgtaaataagtagcaggctatgtgcaagaaagagggggttgtggggtttctgaagagctagagatgacaggccctgtctaaag

SEQ ID NO: 99886 - DNA, 1053 bp, Homo sapiens
gaaaccagagtcatgcttccttggcaaaacatcagtgcagtattaaaaagtagtgaggaacagtgggcaatagatgctatctgtccagatgccgtttccagggttctagatctgcattttgcggctgggagcaatagggccactttaaagaggcatcacagaagctattgatgtttcaaatgggattaaaacaaaaccaaatcaaacattccccacatgttgtaggcagtttcaaataaatgatttgccttgagattttcagtagtctacatggaaattctcagaactatttttcattctcttttttaaaaaataatgaatttatttatttcttcaaggtgtcagagatttaatccaagctgtaattagcagttcacctctccaagtacattttacaactagatcctagatgttttcatttgcataattcttgaatgtcatttgtgttaacttaatattttttgtacagtctttctgttatcaaaagctttccctatatttcatctcatttgaaagaataaattcagatttcaaaaggtaatttcagaagtgtctcttttaatcatgataaatttgaaacatttcttcatttattctctagatttagtatttatctttttttaatatctctgtgtctatgtatctattatatattttatttatattttatacctatatttaaactgtatatactgctttatatttacacttaattttatatttatatttgatctcctataccagccgtccccaacctttttagcaccagggaccagtttcctggatgaaatttttcatggagggtggtcggggtggggatagctttgggatgaaactgttccatctcagctcatcaggcattagttagattcttataaggagcatgcaacctagatcccttgcatgcacagttcacaacagggttcacactcctgtgagaatctaattccacagctgatctgacaggaggtggaattcaggaggtaatgatcactggctataccgtcttaaacttctgctgggcggcccgcttcctaacaggccacagaccag

SEQ ID NO: 99887 - DNA, 1089 bp, Homo sapiens
ttaagaaagattagagagaagtgacatatggaagaccaacaaggcaatctaaggcacatatagttcatctcaaaatatgagaaaatataatatgagaaaatgttagtcataacaacattgaatttaaaacttgagaaagcattctgtctttcactgttaaatattaccattgatgtaaaaatattatagtaaaattattttacttttaagataaagaatcctttggaaatcttggttaaaaaaattaatctttaagggaaaaggcatcagaccagcctcagacaccctcacagcaacattatatgctagaagcaatgcctacaaagtcctcagggaaagaaaaggtaaaacaaaaattttaaacaaagtcaagcaatcaattaagtatgcagtgaacagacagacatcttggcatgcattcattaaggattatgaattccataatcccttaaaaaattattataggccaaatgtcagcaaaccaagagatgactggagaaaatacagcacattcactgttaatgaaatgatttaattttaagactaagactaaatcaaatgccaatcaaacccagaaaatgtaggagtaacatagtaacattcaggaaaggaaggaggagaaagatgaaaagcaatgtaaatatactgattacctttagaaccagatgtcaaagatattataaatcaaataaagcaagtattagaagtaaagatatatttaaagcttcaaagattaacactgagacaagttatgtggtaagcaactacagttttggatgatgaagaggaggaaaaggagaagggcgtgggaatatattactttcactgtttcttatagtaaggaatagtcatgaattgtacagatgtaataaatcatggcacatccatacaatggaatgatatgaagctgttacaaacatagaggctgctctacatgcatatatataatttacaaaattttaaagagaatagtgtataagaagaacaaagaatgtatgtatgtaagtttatatacatacactggtatagactcacaggcaggctaaataaggcacaggaatataatgcttccctctcagaacttgaagt

SEQ ID NO: 99888 - DNA, 1026 bp, Homo sapiens
tctacccgcctcggcctcccaaagtgcttggattacaggtgtgagccatagcacctggccataccccctttttattgatacataataattgtacatatttatgggataaatatgatactttgatacatgcatacaatgtgtaatgattaaagcagaggaaatgggatatccatcaccttaaacatttatcatttctttgtattaagaacattccaaatcttctagccattctgaaacatacccctttttatgacttttgaattttgtattttgtgcatgtactgcctattataaaatgtatactgcagttgttttggcaaggaaaaaatgagttagaatcctgattttaccctccagagtttcacactcctttgaggtgagacagataaacagataactcttaaataatgaggtaagtgctatgaaataagacggtaccaggtgctttggggaagtctaagaggcttaattcctactggaggggttagagaagctgagttttgaatggaaagaataatttaagagatatttgtaaatggtgtagatgaatctacttaataacagactcaaaataaaatatgaggctgctgaagaagccaaatatggaaacatcatcttgtaccccataaatatatacaactattatttgtcaatgaaaaataaaaccaaaaataaataaataaataaaagattcactggttctggttccagccacctggtagattgcagggctacttatttttagttcagcaaatattttttaccacctcactatattccaagcaccatgttgaaccctggagattagaatttaaataagaaacagtccttttctttaaggaaggtgaaatctaataatggcatgtggtagatggcagtcataacttcaagtattcaccgctctctcaatccgtaccctttgtagcaccctaccactatgggcaggtcactttgccctatacctaaacaccgggcccaacccagtgacttgctttgggcaaaacaagatggtagcagacatgaagc

SEQ ID NO: 99889 - DNA, 2399 bp, Homo sapiens
tcttccttccttcctctttctttctttccttctttctttctttccttctttctctttccttccttccttccttccttccttctttttctttctctctctctctctctgtttttttttctgacagagtcttgctctgttgccaaagctggagtgcagtggccactgcaacctctgcctccctggttcaagtgattctcctgcctcagcttcccgagtaactgggattacagttgcgtgccaccatgcccagataattttggtatttttagtagagatgaggtttcactatgttggtcaggctggtctcgaactcctgacctcaagtaattcacccgcctcggcctcccaaagtgctgggattataggcgtgagccaccgtgcccggccaagaccagctttcaaggacctttcatgtgcacttttaaaaaatcccacaatttttttttaccatcaaaacagattgtataaataccttctattttattatacaaggatatactgcacaacaataaaaaggaagaaattacagatacaagctacaacatgaatgaatctcccagacgtactgctgagtgaaagaaaccagacacggaagagtaccttttgcatgatttcatttatactaagttcacaaacaagagaaagcaaatctgtggtgtttgaatagtggttacctgtggtgtggtggtggtggtggtggggtgtgtgtgtgtgtttgtatgtgggaaggatattgactgaaaaagtgcatgaagaaatttctggagtgctataaaggatttatatctttattgaggtgtggtcacatagacgtttatataagtaaaactcctcaagcccccacttaagatttttgtactttattgtacatatatatatatataaaatatctttatcaccttcttcatcgtcatcatccagtctagttgaacatctgcagtctaatcatatcctaagcctagctgatatatacaaaattctattcttaagcaagtagtttggaatggaattaatctttattttacttttctattttccctttacactccaatcaatgattaatttaatcgaaagttcagtgggagttttttttttttcaccagacattacattgcacataaactcaatccttaggcaattttcttcattatcattttctttggtattcaaagaaaaccaaagttgttttagttgttcagtgcacaggggaacaagacacaaagttagggaaaggataccctgaggtccagacagctcgtatcaggcctgtctgtgtgctgcccacttttcaaagatatatgtctctaattaaggtaaactgggcaaatgcgccagtggtgatctctgtcttccaaagcacagcatgcaaaaagctaggtgaaaactgtaattaatgtgccactttaaatgggaacaagagatgtactgccctttgtctaaaagagatacaacatgatcttttgctaatacggttgagactattcagctaaaggtccttattgtcactattatcctttcatattaagtaacaatgacaataagcaagactttatacaaatcaaagtaaagaactggtggcgtttgcagtttgctttggcttttcttgtggtgaatgttaattttcataacacaatgttgccaggtaattgataactagagtctgcagctgagcacgatgaggtgttcagggatctacattctagagaaagtcttcaaaattggtctaggcatcctccttgctgcagaaacagctccatcttacctgccttcctgttggccaacccattagcctggctgggatgggcaattttctctattttctctgggcttccagtagatactctagaaggctcttcagcttaactttcttgcagatgcctcacccaacagggtggcctacctagcatgtgagacccagcattgagatgctctaggctggaccaccatgaagagaactgtggagcctgggaaaaaaggagaacctggggttggaattccagaaggaccttccaagggcctcccttattatctccatggcagagagcttgcattgcactcctgacagattgtgtccctgatttcctagccagagaagcagccacagtgaaccaagagaaggccataatggctataggtcaaaggtagagacactggccttttcttcttgctgcccaacattctggcggaactaggccttgaagggcaaatggcagggttggggagggtggctggggaagggcagtgggtaggaaaatgtttaaatgccagatcctgtgccagtaaccttccacttcaagaattaaggcatctaatagggcttgcagtgggacagggagaagacagaagactgaatttaagttgagtttgaaggtgaaggtttaacctgatgatatggtttg

SEQ ID NO: 99890 - DNA, 1753 bp, Homo sapiens
gggcctcctaaaagcctgttagtgaaggaaatccttattttcagaattttaaagttgcttttgctttaaccaattagactctgtatagtacaatacttctgagtgtagacttcgtatatggtactgaatcgaagtatggaaatatggaattctctaatttccaagtgtgtttaagtgcaactttatctagaatcataaaactagcattttcctagagagaaatacaactgcccactatagtttccataaatatggatatatctgaaagatgaccctactcttccaactttttttcctcttaacttctgtagtgattctagctattgttctaaaacatgtatttgaaatttaattttggccagaatattcaggaaaggtgtttttttttccatatacgtaatacttagtggtctatatatttaagttataggtatgtggagatagctgtttaataattctttttgtctggaaataacgttattcaaacataggcagctatgtatcattttaaaatgatattgaatttccccttaaagagaaatcagatttataatgtaaacatgaccaggaaaagcaactggtgactttacctggggaggctccaaggaggttaagaaagtatctgaacaactgtgtttttcagaatagaaaaattgtgtgtgtgttgcgggggaaggtaaaattttaactttattcttttattgttttcaagacggctgttttcagaaatgtgtggttgaactgagaccctcatattttatactcttcaaatttgagtggcctcagttatagaatcatacagaagatcaaaagtctagctcagcaggggcatgtggtgtaatccctcactatctgtgttatgtaatccagaatgctgtttttcataggacagtcttgcatgatccttagctggtgtattgatctattatatcatcttccttttgaactgtagtagtttaataaatgattgccatctttggagagcacctgttttcataaaaaatcactttttgaaatggcaaaacatttttattggcacttttatgaacgtaagacttgctgccagacgagtaaccttttgaatgtgacgtattataacatatctaaaggtaccatgtattagcttatggactacacttccttccaactatattattactcaacagttggaacttagttttgatggtattactacccagctctgaattaatcgctgttgaaaatgctgttctacaagtaactgtcaaaacagaatttctaactccatttgatcactgggtgcacatttaaatctgtcggaataactctacctttattttgcaaatgcatacccacgcagaaagctttgttctaaaatactctattggaagttttatatttatatgcctgaaaatgtgagtgatgttaaactgcttacatgtcctggaatcgtgaggcggtgtgtttttgccttatgagataaagaaatatggtagttgaaaaagtgttacaggttaccaaaaaccttttgcaggaaaagattttaaaaatttgtatcacctctgaaatatttcaaccacagcagagtccattcagtgcccgtagcacagctagtttgcctttcccaagattacacacaactgtctttagattaatgtatactgctgactttggcaacatgggacagttatatttggcaatttcagtaaacatggtattttcctaagataccactaacttcattttggggtttgatttattaagaattgaaatg

SEQ ID NO: 99891 - DNA, 1855 bp, Homo sapiens
tgttgggaaataaatacagcttttcatcgctggtgggaggcagcagtgactttctgtggttttgctgttggttttcagatgtgaactgtgtttgcaaggacactgcttaattctcagtgctgtccattccacattttcctatttccctctcatattgggaaaatgaataaacttgtgtagctctttcttctattccttagtatttgtttgtttaatagttttgcttttgataaagcctcaccctttaaagtagaaatactttctcaaattgtaatattatttatctagttatgccttagaatgatataaaggttttacatgttcctaggctgtgattctttagctaaccaagtataaaaatgagtttacttccttgccagtggaggcagacctgggtgattatgcattactgagtggatgagtgtgatgtttacattgtcttggttggaattaagcttgctttgaaaatatcaccctggaataacttttatttgcaaggcccacttcactcctttgcagcaaccactcccaaaccccattttctgggtggaagggtagaaagagtctgggtggaagctcacgactttggatgcttttttatgctgaaggcgtaacccaagtttctagaggagatgaaagtaataatgctgtacctttcaaatctcagctaggagatccttatgttccagggaatgaatgaccagcagagtgtttattttccctgcatgcacttcgtctacttttcctttcctttatcaaataaaaatagttgaaatggacataaatccaaggtttttctctgaacacctctcttactcactacttataaaaccttcaatgagaatgtcacacaccatgtgaccataagatagtgttatcttctcccctttcctgggattctccttcaaagctcaaaggatcttttggtatgcctagggctgggaaattccacctctagctacggaaatacccttgggccaggcaaatcatggctttaagatacattgcccttcttgtcctcccgaacaattaaagcatgtctttggctcccagacatgagtgaattgaagtagccatttccttagaaacaggaagaaaaaagcaacttgaagtaattaattgtaagcagctcatccagagatcagagaccacagaccacagacccctgattttacatttgacatctccctttcttctctagaacaggagttcttcattttagggccaaggatgcagtttggtgggtccacgaatgtggctggcaaatgaattacatctttatattcacttacttccaagtgacaattggggcaggtgttagggctactactagatcttggcatttagtgggttgaagagaaacacatgtattacttcacatatccctttaaagagttattttgataattatatttcaatgagattgatttccattgtacttttaggtatttaattttatatatttaaacatattatgctgggccaggcatgctggctcacacctctaatgccagcactttggaaggctgaggtaggaggattacttgaggccaggagtttgagaccagcctaggtaacacagtaagatcaatttatgcaaaaaataccaataaaaaaattagctgagtgtggtgcacatgcctgtaatcctagctacttggaaggctgaggcaggaggatcgctcaagcccaagagttcaaggttatagtaagctgagatcgcatcagtgcactctagcctgggtgacagagtgacagtctattaaaaaataataataaaatgaaaatatcctgctgaaaagggtctttaagatttaccatattgcgaagggcattcatgacccacacaaggcga

SEQ ID NO: 99892 - DNA, 1061 bp, Homo sapiens
taccagatcttcctttggacttgccaagcccagtgactgcatttggacagagggacctaatattaactcagtcctaatagcttcaaaattctgtgactttggtgtttcagaatataattcagtgagccagatgctgtccccagggtatctgtctcccagctaggcttttttttttttttttaaacaaaacaaaacaaaacaaaacaaaacaaaacaaaacaaaacatattaagccatttagacctggagggagaaaggcctccactagaagaattaggggtctctggtgttcaggggcagtcaccatagctcttgtttttccatggagtttctcggagagtactcaacttctctgctttacatagtattataataacaacaacaaaataaaacaacagacatttgttgagcagttaaaatgtgccactttatttaatacttctgacagcctttttgagtgtgtcctaatagcatctccagtttatacttggggaaactgaggttaggagatgttaaattaatcatcccaggatgttaaagttagaattgagactgaaactcaggtaggctgacatcagaactccaacttctaaccaccgtactgtgtattacctgtcattaagctggtacatgctgcagaaagacttgttaccataacaagttttgtgataattattttaagtgactaggctgagatatgacaaaagcttctggcaatcctgctgtgaatatggaattggaataagaaattgaggataaaacaatgcattcttatctaatcctaggtacttctgtttctgcagttgcatgccagaaatccgagatagggagagtactaaatgctaattcgtggtagcctaaacaaatagttttagttttctggaaggccggtttttacctggtgaagttcctcatggttttaatgagggtgtggtgtactctgattcctctaagggccaagtaagtgaaaggcccaagtgtggctgaccaggtgtcagaggccttagggagtggtgaggcttgcgcccatccaggggcccaattgtgccccttcccatgga

SEQ ID NO: 99893 - DNA, 2108 bp, Homo sapiens
ccatgttggccacactagtcttgaactcctgacctcaaatgatctgccctcctcagcctcccaaagtgctgggattacaggtgtgagccaccacgcctggctgctacaccatgttttcttttaaagagatattgggagaaatattgcaggaaatctaggtcactgattgattcctaactgtgttcagaagggactactttgataactgtaattgttattaatgatatgaagtaaattatttgtgaattttaccacattccttgaaagactgagactcagtcagggttagtgagtcttgattagataaatgacagcaaagtgaaatactgtttctgtttcccaaagatggatttagtcctttcatctgtttctccagatactcattttttaagaaaaattctggtttggttggcagtgacattcagattctgattgtatgccttctgcatgtttatttttacaacacactgtgaattgtagaaatatggtgggacagtcatatttccttggcattgaaaccttgcatattcaagaaagtctgtgctaggttttgctcatggaaatgttatagtgtttcacagtttacagacaatttcctttgataatgtctgtgaaagcacagtggagggcaccacctggtcactctttcaacctgtatcattcagggccctgctggggaacagatggcatgtgtacgccaagtcctttgaggagggcttgttaaagggaccttttgcaaggtgtgggcaggtgtagggaatacaatcagggtgaatgctaaagaaagacccagcagtgacggggagttagtcctactctaaggaaggggcaagaaaggctgacaagagctgtatccctttctagagggaccccgtctgcctgtaatatccctccagggagacagaggggaatatatataccttcctcactctctgcctgtcccctaaacgctggctagtgtcttccattagccgaacccagacagaagccagagggcaggagagaggaggaaaagggtggaaaaggtaagtgaatgggtctgggaaggccagtagcagacccccacccatttgccctccagaacagaggtttgcatggttgagtggtcagtccagggtagaaagcttatgatctggttttgtggacaaagaaaataaaactgcatctacagtgattaaattgaaattgaaattgaaattgggaattttctacaataccacatggctggtatcagtaaaatttgtggtgggccttagagtaacattaaaaaaattttttttttagttccctttggaagggattatgctttatgcttcttgggaaatgcgtagaatgggaaatgttatgtatttatctgattaaccaaaaatgtaggcttatagataggacagacagaagggattcataaagtctctcagcatggagttggattcctaagatagatataattcctttgattttaatattttataaaaatattttatttaaaatgtcaggtacctgggggaagagactaggaggaaattaaggttattaacagtaattttccttcaaggaagtcaatttaacagaatcattagcatcactgagtataaatgaacaagctgtatttccccatttgttcagcatggcagcaagactctgaaatttcaggctcatttattctctcattttcttggccctgttgcttgaaaggtgaagtctgctctttggtttgtgtacttgtcctgaatgaacaagcaatggaacttaattagaatcataaaataatactgctataaggtatatcagagttcatttcttcttacctccaaattgtgtgcagtaagaaaccaagatactagtcattagcagctactactttgcaagttctcagagttggtcactctggaaaaatcatatcacctctccatcatgaaggaattgcactagattaattcatttttgcttttacccttatatattcctgaagtccttgattccaagggtttggttgtccattactcactattttcatagattagaggcagagcttcttgagtacctcttcattacttagcccttaaaatggtattctctggaggtctctacattgcttttgactgtgt

SEQ ID NO: 99894 - DNA, 2817 bp, Homo sapiens
ttctaaatcttcatgaaacaagctatccatctgttgagtctaccccatcaatatccttcatttttgttcacttttctccattcctattgccgctagcctgaatttatgtctgcagaatttcctgtcttgattgttccaagaatttttcattcagtctctctatactgtctctttcttatctgtgcctccattcatgtcttctattggctattcagtgagcatcaggtactttaacagtgagatcttgctctcaggagtttacagtttactggaggagacaaatagacactactttataagtttacatctttgcccgttgactccattctccaaaccagctaaagtaatttgcacaaaacaaatcttattatagcattacctctaagatacttcaacagctccctgttgctatcaggattaatttgttttcctaatttgccaaatgtaagccatccctggcctgacccctgtgatgaagttttaactcctttatttgcatcacctatactaggctgtgttgaaatccaagaacataaagcctgctgcactgtggacactgtggctttgcactatgactttgcactcaatccccttcttcaactggctgactcctacaggcctttagagacttcatacagttgtcatcttcctgtaaagccttccttgatttccactccagtccagattgggtgccctactttagtcctcctgttgaacagtttgcaaattttagccacagcatgactctcttgggaaatggaacaatctggtgcatattagtgactaagttgatgtctcttaaatgaataaataaccaaatgccattattgcaaagcctgcagattgggtaaattaggaaaacaatctgatgattaagcaaaaaaaaaaaaaaagccaaagtttagtaaaccgaagccatctgcagacctattaaagaaaaaagtatttcatgattatttacactggtcattgaaaagtagcagaataatcaatttggaaatatgataagtaatttgaaaattctatatccattatttctggtaacagaaatcctgatattgtaatcagtatactagatccagaggagacatttccctgaagataagttatcatttttttcctgataggcacatactcatattgtttttcctattttatgagttcgattttaatcaagttattcttatttttcttaacagtgtgttataacctggaattagaaaaaaaatttcttatttcaaacttggttggaaatttaggaacaaaataatttatttaatcagattattttattaagtgggactcttagtaatttaaaatgctttgtattcattttcttgtagcattttcttttcaaaatgacctgcaagtacatcagtgccaaacagagaaagcaagaaagccattaattaattgaagggaaatattctgctgaatacaatactgtttttgaaagaacatgttttatagttccaaaaccagaagggagcattttattcgtagtggtttgaatcttgtgaaaagagtgtctttgacagtcttcaccaggcccccctccccaagcttggagcattaataggacttaagaggtgttttcttcacatttggcttctttttgatttcacagatttcttttagctttgtgtcgaaaagtgctaagtatgttaattattagatatatcattattcacatttcagtgcagacaacatttaggaggattatagtttagttattacagcttttcagaaaacacttcatgatagcacttggaaatacagatagagaatatttccttttatttagagactttttggacctgtgaggccctctgagaatcttaagcttggccccattctgtccatttttcatttcctttgaaagagtttcaaagtaactggttaaagtttctccccatctgccataagtagcatagagggatttcttgtgcagctaccaaagggaaatgaggaaatttaaaagtgcagatgatttgggtattaacacatatcctggcagtggctctgccagaatcaggctctcccaaaccattttgttttatgttaatttttattttctcagctacagtattataaacatggcagaccaacaggttttccataaagattgatgatcaggaggaatccactccttaattaagagcagcagatgccttctgaaaaccttctggaaatgttctacttaatattgaaccaaagtgcttccagctttgttggaaaggttaaggcaataattacatggaaggtatgtctcatttgtcaacagggtttttggtctagaatatctcaagagcagttcctgtccatttccttctagaggtgacagcagccttcttattgcagaagggttatggtgcagggaacataagtgcttaccaataactgcttcctatcctcacacaggatacgagacacagggtatgagaccctcagaaaggaagtctctttctctacacacacacacactcatacacacacacacacacaccgcaggtgcttgagccacactgtggaatgggatacataagaaatggagccaattctttgatatttttgtctttactggatggctttgcaatattttaaaaatgttgaaacttccaggattctttaacaccgggcccctaacccattatttattaggcttaggcattgtgccctgggccttcagaatacaatcccatttcattctctcagcaattctgcaggttaggtataattacgaccattcgatactaagaaaactgagtgattacagcacttactgagggtcacatggttcatcagtggtatagacaa

SEQ ID NO: 99895 - DNA, 1420 bp, Homo sapiens
tactatacataggttgtatacatagtataattggtttgttggatgggccacacttagtgagacataaacagaaaatagctttattctctcctctcctgtactttgaatgattttttttggcagatcctatagcttttcagtcattttacagtattggaacaacctaattttcaaatattagaaaaacatagtacaatgtaaatcaaaacttccattttcccatccagtttgtagcttctccccttttttcattcttaggcttgagcccaggcttagtgatcagcagtagggaagaaaaggaattcctggtttaactctcctctcttcctctcctacacattatctggctcctccagagttgacacgggggacataaaaggggccaaggctattgcacgtagcaggtgctgtttgttttcaaggccagttctttctcatacacaccctgatggattttttggagagcccttgcaggtccattggcatcatgccattatttgctttgagcactgcaatatcagctcctcatattccagtggaagatcactggagtgtctctgtgtccttgtccaggcagcccactcagatggaggcttttcaggatcattcaaacatgacaaccttccatagtattcacaaggtccacaggaaaactctcatcttaacaccatcagaccccgagggcacagcctgcttctacttctactggggctctgttgccttgcagatggcatcagccagccaatctgatgcacaagccatggtttctgcactgaagcaggcatccaggcagggaatagaatatcagcctctgtcattgcagatagcctcaatttattatggcttttcttttcttttcttttttttttttttttttgccttccttatgaggtgttagagagagaaggaaagggatctgttgaattttctttgaagagtttgctgcagtgcagttcttctcatacacagactcttggaggtgatctctggactggcttggccatgtgtagcaagtcctgtggacatatacaaggaactcatcatatcacctttggcattgaaacattagcagaaaattgaaacaatattcccttttctcatcattagaagaatttagagatcactggcttaatagtaagatgcacagataagtgttaaaccttcagctacatttataattcgtgaactgccacactctgtaagctcctaccttcacagtaatgagaaatactaagtaccaaataaatgcttaatgaatcaagtcatggtgattgcaggatattggtctctgggaaaggtaaaggtgaccaatataataagaggaatgaggttgctaatctgtaaaattctttactgatttggttaaacaatgggtcacttaagtggaaaaaaatagaattcaaaactactgttagccttg

SEQ ID NO: 99896 - DNA, 2621 bp, Homo sapiens
aaatctgcttaatataactcctaaagctttatttgtagactagatatttgtatactatttggagcctttgtcagctgttaggaattattttaagatgtggagaaagaaataaagttagctggtgaataaggaagtattttcacacttgatcctgtttttagttttaatcctggaattgcttatagcagttaatgtggacctcaatatttcattttgtaaatgagcagtgtcagtatgatggtggggttaaatgcaagggagatgcttttgtcctacttttcaaggtatactttaagcaaggtaagcattcgtaaaggagtcctaatttactagaaagcttgaagttttggagcagagattttcaaagaagttgtacgcagagttctttctgagctatggcctgatagtgtctttgtgaaagtatcttcttcccatttcttttgttatgaagcctgttttttaaaatcattggcctttggtgaagattgaacacattgaaaaataactgtataggagaaaaactgtgagtgttatagtgttatttaattgagaatactatttatgtgtgtgtgtgtgtgtgtgtgtctgtgtctgtcatgggaaagtattgaaatgatgcattactgaagaaaaaaggatttgtttatctttccaaagagaatcgagctattatttgggaaaaaactcaacatccttttaaatcatatttttttcaaatgtatgtgtatgggaaatcttaaaataatagataactaactaatagaaagggggagggaaaaaatggaagtgtgctttgtcacccgataactatcccaaaataagtttggcttctaacacatttttagtgtgtttttttttttttttcaaatgggtattagatagcttccgtggtagaagtgaggacttgcagaatactctgtgttactaaaaaattgctggaaaagttaacctgaaatggcagagtaaagaagctcatgtttaagctaatatactccagtaacttttgcatctctgcacgttcatcacagactgtgagcatattgtgtataaataattaccaaatgtttcgggggtggtgattctatttcttctccatgagaatttataaagttgttaaatttggtttctttggagtcatcacagtttatttcactgagatgtttactggataaatattttcacagaagttttcatcaacttcaaagaggtagtagttattcaatgcaaagtattagaagcctattgcaatatacatgcaatttgttttctttcgacagtagacttgtttctctttttggttcaaatgaattcattattttaaactgcttcaatcaattcgatatgttgtattcatagacacagtgggttttatttgtaagcctccccagagaccagggtccccagggtcttggtgccacatgttctgtaaatgtgacaggagagctggggtgtttgtaccatacatgggagagggctgatttctgagagaaactaatgctgttgactcataagtttctttttatcatttctaggtcatacaagtacatggtagctttaaaaaaaaaacatgccataggtatgtagagcctttataagtctcgacaactgtaaaatgagctagagaaagtcactatctgggtcatgtggaaccacatctggtttatgatatgggcatgtagtaattgtgcttgagattacagtggagcctcacctggcttatgtttttggccatagactgaaggttcctttgaatgttccctcagctaatgtaggtatgcagtttataaataatattttcataaagacaaaagtgagaagcagcattgtacagcagaaatgtgagagctgactttcctaggttctgaccttcctaggtttgagtatccagtctgtcttttgctagaaaagtgacctcaggtgagctccaaagctccctctgaacttgtcctcatgggaaaggggagagactagtgcctaactggggagcggtgaagactgcatgaaatactagatgcaaagtgcctaacacctcacctggtttatacaacaatagctacctgttagttgtagttctgttcttttctttctacagacatttgaccattaaatacacaattatttcaacccattattatatttctagaagtgatgcttacagatttttttttctttttgagaactgcatgcttttcataaagtctcttggaaaagtaatctctatgtagttttgcttcttcattcattcagcatttgtcaatacttgttactggcttgcttcctgaggtctaggagtttatgttgtatcaagagagatctacagataatagaagttactgtagaattttaagttccacagaaggtgcatttctgaggccctataaagcagcatttgaatcaggtcagctcttcagccctcgagaggtattttcatgttcttgttttctgttttttagtgatgttccatttctggtgtttaatctaggcatgccactaaatatttacttttctttgtgagacaggttaagactgtcttaacttagaagattcttcatttctttggtcactggaatagcattgctgtcttttttgtcatcattccgttttgcattgttatcattctc

SEQ ID NO: 99897 - DNA, 1076 bp, Homo sapiens
gttgacttaatatacctactttttcctcttaataatgccagagcatatttgggggggggctatagcttgaacaaaaataagacattattaatatcagcactttgtaacctgagacagatgatttaatctctcctgccatgttctctggggtttaaaggtgctattcagcaagattattatgaacaccaaaaaaagtctgcataaaatagctgcttggctgtcacttccatataagctatgaaggcaatgatgacaattaagtctaggacttgtaggaaccacatatactcactcctactgcctttgttcttcttcatgtctgctctgccattgtacttttttttttttttttgagacggagtcttgctttgtctcccaggctggagtgcagtggcgggatctcggctcactgcaagctccacctcccgggttcatgccattccattgtactttttaacacattggcatatactctgtgctgactactccagtatggagtgcttctcaaactttttggtctaagacccttctatactcttaagaattgttcagagttctaaacagctttttaacatgcagcttatatcataactatttgctatattaaaaagtaaaatgggaacatttacaaatacttattttaaataacagtgataaacccattacatgttaacgtaagtaagaattttttaaatgaagaattactgtatttttccaaacaatatatgtttggtgagaagaatggcaccatttaatatttttgcaaatctcttaaagtcttgcttaataaaagatacgtgaattcccttatttgcttctgcagtttattgagatattgaacatgatgaaggctctggaaaactctttcagagagtgagaataataaaaggaaaataatttcttagtatcattatgaaaataattttgacctttcagaaccctgaacttgtcttgagcacaaaatttgagagtgattggtctacgttaaatccccgaaggttgtctttagagtatttccagttttgccacatttactactttgtactagaaaatccctttcccatccaaaatattag

SEQ ID NO: 99898 - DNA, 1178 bp, Homo sapiens
gccctcctcacactggaacctcaccacacccctcaccgggatgatctacccgtcttgaccatctcctggctctttagatctctctggaaggtctcaaagcttttccctttgttggattttatccacacaccattggaggccctacctgtcaatttccagaaggcagtgcgccattgacccacttttgtggccaccacagtacccagagagcacttggaattcacctaacacctggatgaatgtttcttgaatttcttagtccctgatatggaatattccttgctctctattttttttaactagtttttttgtttagtaaccatcacccacaatgaccagaattttctctccttgcttctggcttctccacagggctctgaacgccgcttacgtgtcgtcccacctgttctctatttttgccctaatttctcaccattttctgtttcttctgagttgtccattctccaccctttaatttcaattagtcagtcgtaaatatttgtccctatggcaggaccagcttttgtctggtctaaatgtaggaagtggcttgtttataatttcctagcacaagtaggccagttactgaacacaccgatataaaatgtactactagaatattcagaaatcctttagggagaattgctggttttcctgtgaaagggaaagacaagtcttcagtggaaacagcactttaatatcaagttttgaatgaactgtattcatttcattcaaaactcagctctgacaaatatgggtaaaggacatcagtttcagaaatgcaatgcaatgcttgcaattatggaaattatttcatgttttccaattgcttatattaggttgattatatttaatgtttattcctgacaccaaatttatgtattttagttataaaatttgtgaattatagctgcaaaatattatagttttcaagtcgaattattaccagcggcattcctgtcaactttgctttcctcaggactttcaaatagaaatgttattaaatatttcctttttgtcagtgtttgcacttgaaggtaaatttaaacatgagtgtgttgtttggtttctctcattgtggatggactagctagtttaatatttaatggcaagttttgatgtatactgataagaagagagacaaagaaacattattgtatttaaatattatctttctg

SEQ ID NO: 99899 - DNA, 1028 bp, Homo sapiens
ataaaattgggattatattggacatacaatcctgtttttttttctgttaacattatattgtgattacgtcctacgtgattttgttttaaacatggtttttaatggttgcatacctttaaaacaggaagaattataagttatcccaggaatcttctgttactggatacttaggtgttttgtttcattgctttaaaatcatttctactcctcttcacaatgtggatacttgggaattgtcacatcatagtcaatttcacaagacaatatagattaactagccatgcactcttaatgtacatatgcagtatttcagacattagaagtagggagatcagttttgcttgatgcaggcagttaaaaatcacgcgcatgtaaagaaaggaccaattttacttgcctcagtgttggcccaagtttggagactaaagcatttacagaccattagctctatacttcactcttgagaccacttgttgtaatgagctgtcaattattgtgcatctaagtgtagttaaagggaccattgggcttgcagtttaaaagccaacatttataaatgtgtaggaattgaattataaatgcagtggttcagtaaggatgtactgcatcatggacctgtctggatacagtatctgttctctgaaagattttagtgttcattaaaaacataagaaacagtaaaaatgtactcttgagcatatagctatacaatttttatgtttttacaatatagtttgggaaaaatatttttttaaatcaagagattttaaaaagtaaaaaacatttctttactaaggtatttattaaatatgcaatgaattaatttcagctgacatgttggagtgaggagaaggatggaaattggagatttccatttgattcagtgaagctacagtctattaaaaaaagtatattcttcactacctgtttatcattagtttttgaatagtatttgcctttgaaaatctgtgtactttgaaaatattttactgcagcttgtaaatatggcctgagtaacatttcacatt

SEQ ID NO: 99900 - DNA, 1024 bp, Homo sapiens
aattgggaggctgagatgggatgggaggatcccttgagcctgggagttcagagctgcagtgaggtatgatggtgccagtacgttccagcctgcgtgacagaataggacctgtctctaaaaaagtaaaatcttatattttgtaagaggtaaatatcacagtgagattggtgaataaaggcaaataaagaaaatacctcttttatagaatagtgatttaacactttacagactgtgaatgagagactgtatttaagaaacaagcaacaagcaatgataagagaaaaaaggcagagaattagctgatgtgaggtttcaagtactggagagtccaagggggtcttagtgttgtgaccaattcacaaactcccttggccattccccagggagaaatattcctgatcccttttaacattatgcttttatttgcatgtatcatctttttatatgaactttgttttgcagtgttagttgataagtctcatctttgtaattgacaattgtttttatctcctgtattgtattttaaaaagtttattatgaagtgtttatattacttataaggaaataaaatagttacattgaagattgcccaggaaatacatttcattttaaaccttttcaaatagatgcattgtaatgttaagcctggccccattaatttatttcaagggatgttctctgaatgcctgaaatacgcttgactccatcaattcaccaggcgtgtctcttgatggcaattctgctttcagaccaatgagaacaccgtgatccagtttagctgccttctgaagcaattgctagttttaatataataaaaataaaacaataggatgtgtattgttctacctgtgaaactgtcatttttccactaaaattacaaaatgcaacatacaattcataaaactaaaaacttatttttaatgaaataagaagcagtttattaaggtatattatactctctgattttatgcttggtatggaacttaatgaatgtgtgtggtaagaagtaaaaatggattagttg

SEQ ID NO: 99901 - DNA, 1419 bp, Homo sapiens
agattgctttttctaaacggcaaatttctgacttatttctgcctatacaatagctcctcactgcctctagggcaatggttctcaactaagggcagttttgcttctaggggcatctgacattggagacattattgactatacttgggcactactgtactatattgtagtgactaaaatagagatgctactattttctagtgagtagaagccagggatgctgctaaccatcccacaatgcccaggaccaccccccgacaacaaggaattaaccagcccaaaatgtcagtagtgcctctgttgagaaacactgctgtagggtaaggccctaactcctagctgatgcttccctttctaatttcatacctctgacctttggctcatacttgtcatgtatgcttcttatgcagcagcaaactacttcctattttgatatcttcttacctttaggtctttgcttatgttgttctcatagtctgtgggttttatcattgtgctttgtgcatacttctgtttttctgatcacactgagttgcaattacttttttttgttgttgttgagatggtctctcgctctgtcacccaggctggagtatagtggcatgatcttggctcactgcagcccccgcctcctggattcaagcaattcttttgcctcagcctcccgagtagttgggactacaggtgcacaccaccatgcccaacaaatttttgcatttttactagagtggggtttcaccttgttggccaggttggtcttgaactgctgacctctggtgatccatctaccttggcctcccaaagtgctgggattacaggtgtgagccaccacacccagtctgcaattactttttaaaatctgttgtccctacaagcttgtgagttcagggtgagctagcaccaggctacatggctaggaagtatttgatggaaagaatgaatgtttgcgtgagaccactaccggaaaaggggctgaagctgcataagtggatagctgacccaccctcagcgagctttcctcacattgggtgaatcattcccatggaggcactgtggacagcagctctccctgtgcacatgattttaatgccacttcacagtggttcttcctctgtctttttgtgttttaaacctttaggagacatcagtgtcaactccaggtgggcttcacaatactccaggtagctttgagagacaacgtaagacatgcaaagagtgtgaagacaaagctttgtgcctcaaatgtcctactgtaaagaccagggcaggggagaatttttgagaaatgaaggactggttcaaggcactgtcttttgccccaaggcggcattaacattaatttagcataatatagaccagttattctcaatcttgcctgcacatcagtatcatctgggttcctcaaaaaataccattgttggt

SEQ ID NO: 99902 - DNA, 1033 bp, Homo sapiens
cttttcttgaggttgggcaggggagaggatagggagagaatgttcagcaaaaatcagtcatatatttagtgtggcttcccattcgttcatttcatcttccatctatccatttatctttccattcacgcacccaaccatgcaatattcattgatcatctgtgagccacctaaattggaatagcaaggatctctcctatcaaagagtctagaataaatgccaggcatttacagtgggaaaatgttaatatcaggtaaattctgtcttggggagaggtcttgtgacctgtttttgggggttttagggaaagcttccaggaagcagtactgtctcaactgatacataaagggcaaattgaagttagctggaagaactgcatgtttgggctagagtgtggttaagcaatgaggaagaatttccagcagaagaaactccatgttctagaggtcatattttatgtgagggttgtatttctaaagttcttgcaaatttggaactcccatgattcaaaataattctgtcaaaagatggtggatattttcatttaccagctaacatggccctgtggccactctgtaaacagagtttagagtttcctctgccccagccagcatcaaaactacaattcttgaagaattgtttcggtgggggtgcctacatagatccaaattaatgtgagacaatattagtgcttttgtatcaccttatttcaaagctgcatgattcaggttcacctcaaatatgaccaaactctggagtttcagagcagtagctcatggcccatttgatggtattaaaagtagatcaggatggatagcatgtacacacaagactaggggtgagggagaaaggagataaaatggataaggaatcagggaccaggtcagtgaaggcttgtaaactgtgttaaaaggtaaaatagtcacattaacattttaaagaatttattcgtgtagatagtaattcatgaattgggcagcatcaggtagtaagtggttcagggctccgctgaaagggcacaaggggaacattttt

SEQ ID NO: 99903 - DNA, 1046 bp, Homo sapiens
actggtggaaaactggagggccagaagagagagaggtcagggtgcctttctctgcctctctgctttctttggtatctctaggaacacatgtgtctcttccatgtgtctcttccaatcagctctcaccagactccccttttctccacagcagcctgatctccacggctgttgccctggtctctgtcagttggctctagcctctaggctctgataacgtcacatccttccattatcccacctgttagggaagatagcagctctcctcagttgctagtctctgggctgcttcactgtccctctgtggtctgtcagtcattctcacatctgtaacaagtcacctgatttgaaagacctagagtagtttctgtgttctggttgactttgactaataacgatttattgaatttgccttctcttgcaacccttacttccctcctgatttgcttcttgcaacgtactgtgcaggtgacatccacgttatgcagtttatttcattggacataacaatggaaactcttttaagcaatagagcacagtggttttgagcctgcgctctggtgttagaatgtttgcatcgtagtcctggctatgctactcattggctatgtgactctgggcaagtttcttaacctgagactgactttttaatctaaaaaaatgaaagtaatttcagtacctaagttgtctcaatatgagtttcctgggaaacaaactcccaactggaggttggtgtgcagaggtttgtttattctcaaatactcttcagattaacatctgtggaggggaaaggacggattcaggactgggcagagggagaagttgaactgcagtgcaatcttaacaagagccttagttaaccctctgaagcaggttgggcgcttattcactgatgttgaccattggaggcagttgaccgtgaatggaacagcttcctccagctgagggaattttccagagaggactgacagttgagggcattctgcctgcatcactcatagtagcaaggaatcaattcttcagtcctgaagcagtgtctgggcgtcaca

SEQ ID NO: 99904 - DNA, 1112 bp, Homo sapiens
tatcaacacttaaaaaattatgatggtcactaagaagaccttttttctgtacactttcagtgcttcttcagtcatctgccatgggtacttctgttcttcatctccagattgtttctggaagtcctgtgggcagctctttaacactggaaacatgcagtctcctcatccataaaatgggcaatacctctctcaatgtattcgagaagtcacgtacaggtcacatatgaccattactcataatatgtaacactgacatggcactaactatgtgctaggtacagttctcaacaggcttatgaggtaagtgttattacagtcccattctgagatgatggaattgaggcacagaaaggttaagtaacatgccagtgttgcacagacctgaggtttgcacccaggtagcctagcactgcagacctgtttcatattcatgctgaaggactaactgcctctgtaggtgtgagtactgtacatggaaaagttagagaagtaaaggtctaattttgacagaattgagaggggagggggcattgacttaggttttagaaattaacttagactcttagtacataggttgctgtggcaatttacatagctatttctttcaggtacatttgacattcaaaagcaatcagatcgtattatctgttctttgagggattactgggctctgtgaatcttgaaggttacatttgcaatcagcattaattttattgttaaccattttccttcatgttggttacagggttgcctccctccctccctccctccctccctccctcccttccttccttccttccttccttccttctttccctctttgggctttagtggagcttataactagttgaactagatggatcaactcaagttgattattcaggaggccttattatcccccagagagcagacacggagcttggctggacctcacggatcactagtccatgtcactgcacaatgttcttcctctgttcttcgctattttagtccaaaatgcctgctaaatggagtggagtgaagaaggcacacaatgttaatatgaagtaacttccccagtgcattttctgattcatcaagatgctcacattaagctacatgaacaaatggag

SEQ ID NO: 99905 - DNA, 1048 bp, Homo sapiens
gctaggttttggaaaccagagctcgttagaagtgtgtcctggcttggggaaaagatgaaagaagtccaggatagttaggtcctcaaggaagtggaccatgtctgtttattcatccgtatatacctggcacctgacacagcgccgggagcatggtgggcactcagtagatacgtgttgagtaaatgaacgcacagagttaaattgggcagctgatgtttttggtattttataatttttgcttggtgacaggaaaccacaacaaaatatgtgcctgtgtgtgtgcatgcatgttttatagcttcctgaagaaatagaatcaatttcagtttttgcaactaaaaaagaatgcagaaagtgagcttggagtgaggagctgctttcttataatgacaaagaatagttacaagctgttttctagaccgaggtaatggtggaggtaacttctgctcctttgttctgtgtatctttgtgagaagggagagcctgcaagggcatagaaaagggagaagccttgtggaaaacagagaggtttcttctggacttcgggtttggaggattagcagaacatactagaaaataaggttctttctcttgggaaattactcatgctggcagcctgaaatagcatgaaaaggacttttattagtggcaggtcttcagatagtttgctagagaggagaagtgcttccaagttgagtgaaagcagaaagcgagccagagttgcattagcaagtgattcaaacaatgaaatctcaagcagcaaggcagctgacatctcagcacttactctgtgctgacagataaatataaattatttttgagacagtggttatttgagatatgtaaaagtttttagatagatatcattatcccaattttacaaatcaggaaacaagtttataaggtttgtaattagtccaatgccccataaacagctggtacataatggggctagggtttgaacgcagcttatttgatttgaaaacctaggttctttccacatgttaagtaatcccttgcctttttgagaactgcattttatagttag

SEQ ID NO: 99906 - DNA, 1093 bp, Homo sapiens
acagatgaagaaactggggctcagggaaattaagtgacttgcccaacatcaaaccatctcatgtcttctgaatcattttttaagtaaaatatttttctcatcatatgacagtctcttaaatacaatattttagttatgattctgttgactgattagaatctatataaactgaagacattttaaaattatattaaatattttcttattagaagcattagaagagtataactcagtttagaaagatttcaatctttcaggggcatgattgggaaaaataacttgtgtgaagtagtttgttctttagtagtcaagtggatgaatatatgcagtgttgacttaattatctttgtggagtagctgtgaaccaccagtctattctgtggttctatcctgaaaactgtcttttcaatataaataagagcaatagactgtcaggagatttctggggaggtggagggaactgcaggatgctaggacttgagactgatggaaacgtttgaggtagagtcaggttttacacgtggtttgctggaggtgccatgactcagtttcttcctcttgagtctgcctgtgtaaaagtggttgaaatgtgcacatatgcatgcaaacactattgcatttgggtggtgttttttatggttacttctagcctgcatcagcattttggcttgggtgcccactctgtatgatatattggctgaatgttcatctctgaggtctgacagtcggcttttgagagcaaatggatggccacagtacaggcacgtgcccgctatagcaactgccaaggttcaaaacaaaaagtccagcttctcgagggcacaaaacatgctgtttcttatatgttctagtgtaatgcaaagcatatactaaatatccactaaatacctgtagggtgtgcttccattcgctatactttcatttgggaaagctttataatagtgtgaaatctagtactgatcacactgtaatttttagagatagtagtacaagttgggacagatggggagcctaataatttaatgattttaccaagtgcgttgaaaacttgtcacaatatcagcttggtggattaaaaattggcaaatgaaat

SEQ ID NO: 99907 - DNA, 1022 bp, Homo sapiens
gtgactgcctctgaagttctccacctgcctcaggcgtgctctccagtgcctgtttctgactgagtgaggttgaaatcctactgactccttttcaggtaaaaaagcatactgaaaaatggctttaggaatagcagttaagatttatatagagggggcagttttgttaagtttatggtttctgttgtttgtagagggctatcacggttttattttcatggtccctgaaggtaagcagatatagctgtatttagtgatagaaaatactatattgcttagagaacccaaacttcccatgaaaattgttatatttattattacttttttctttagactttcttataagagagaaattgaagacaaaattgtgccaacaaagtatattagacactgtgattttgtggtaattttggcatcaattagatatttattttaatatctctttttataaaattttcctaaacctaactgtaactcgaatagagttttccataagacatgtataggtatgatttgcttggctggtaggatttcttggtgtgttttatttatcacactccatattttaaaaattaactgtgtgtggggacaggggatatatgggaaatctatgtaccttctgctcagttttgctatgaacataaaactgctctaagaaatgaggtctattaaaaaaaaacagtcccttgataatactttctgtgaatacttaaatataatgtgataaagcacagatgatgttaaactttttttataaggcataaattttaaaaagctaattcatttttctttttcataattagtaatgaaaatatgggacatatttcagtattttgttttgattgccactttttttgttcaaccatattcagatgggtaaaatgattattttcaagtctcttttcctaaataagaagtgagaataaaaatatactttgaacatgaacgcgtacttattcattgtcttggaaagttaatgagccattatgtaaaattcctttctgaaatcagagagtaaaaattaa

SEQ ID NO: 99908 - DNA, 1832 bp, Homo sapiens
caggtgcaaattttgcaagaaaaagctcctcagatttcccaagaatcatctcattagaaaggagtttggaatgtgattctgtctggatgctatttctgtgataccttgaaaactttgttcctacaaaattatttaagcatttgagcacaaaaataaacaaatgtccttgaatttattatcccatatgggcttgccaactgctacagtgagacttgtggagatgataagtcccctgtgagtgaggcacttaagctgcaggacccatatgttgtgcctgattgtaatgcagagaaagttctttggaaactatgaccttaaccaagctttgaatagctgaccaagataaagccatcagagatgtcctaagggttgccattcatagagggtcatcaaaagtctttggcctcatgcactttgtgccaccctcctcactaacattctattcatgatattagtctttttgagacctcccaaatggtgctgatctaattcatttctgcaaacagacttcagatgttatgaggtgtctgtcagatgaggctcagggtaccaagcattgtttttgcttgccatattgatcactgttaaaggtgtatctgaaagtaagtcttgatagtccctagcaatcaaaagtgtttcctcaagtcctaattttttaggtgtttttccctataccttctgagtctcttacttcaggctgctatcacaaaatgccatagactaggtgccttataaacaaaagccatttcttaccgttgtggaggctggaagtccaaagtcaaggtgcctgcagattccgtgtctggagagggccctctttctggtttgtagatggtcttgtcattgtccttacatggcactcaggtcggggggatggtggaggcagagtgtttgtctctgttcttttataatgctgtaaatcccatcatacaggccccatcctcatgacctaatccaactctaattacctcccaaagaccccacttccaaataccattacactggggattggggcttcattatggaaattttgggagtggaggacacaaatgttcagtccctagcaatctcactaggacaacaaagtgagacaaataattgttctgtagagcttcttagaataacaccaatacagtctcccaaaagagagaaagaagatcaataataggggttctaggaaattgctttcagaccttgggctaattttatgaaatgattttgagaaaaggaagggcaaagtgagtaatagattttagcaacagtcatgagagtgggagttgagagggcggtgtctgttttgttgttctttgtccatagcgtctcacctataacctggcccgtggaaaatgttcaaaaaataagttttgtataaatgaattgatcattagctggagtggttttatagcaataagaattaccttgttgaagaattggttcttctttgcctttaaatgtcttcaggtttgggctccattcttgtagctagctgctgactattggtttaccccatgtaaagtgagtaaagggttgagggttttttcttatccttaggctatcaatcacctgcttctggggctctcacagttaaaagaactctttaaagttggctgtgctggaagctacccattataccaggctgaagtgtctacgggaggcatgttcttcgttttttgtctaaaattgagggttttggggaatttgctcaatcatcgctaggcctaactcaagtctcagtaacccgggaacctgtgagctattacagaagatgcatctgtagtatttactgagtgcatggatgggtggtttacagacttctcctcaacaaatagcag

SEQ ID NO: 99909 - DNA, 1035 bp, Homo sapiens
tgagataagagtcaaaagaaagttttttaaaaaatagtatttgtcaaaacccattctgattgttttttcttataatgacagattagtctctgccaactcattccagaagcttccatttgatcctcagaggtttttaattggcacgaggctcttttcaggaaagggccactttaacatctatggaaaaataatcatgtacttttaattccacttatctgaaaccaactagtaaacccaaagaaaacactgggtgttttaattttttgaagtggcttgaattgtcccgaggtcatggcatccagtgaattcacttctttgtctttcctgtctggccgtttttgtgccttctgggtgtgaacaactcaagcggtttgccatgtgccaaacgagctgctgcctcttctcctttccagtggtgtggtccaggtccactttgcagactgagttcttttctctctgcaggtgccttctacttctagctagttatcttgtgcttctcttcccagcctgtttatctaaatgagtttcttttcctccagcccagctgcctcctgaaggtacaggaaacccccaatgaaaccatcagttctgcctctgatggtttgcctgtcctttgcctcagacgctgagacctcggtgccctggccacagtgacccttttatttgctttcctgctacttccctacctgttgttttattttttacttattattattattttttgagatggagtcttgctctgtcacccaggctggagtgcagtggcgtgatctcagcttactgcaaacttcaccttctgggttcaggcgattctcctgcctcagcctccctgagggattacaggtgcctaccagcagcctggataatttttgtatttttttttttagtagagacagcgttttaccatgtctgccaggctggtctcaaactcctgacctcaagtgatctgtccgcctcggcctcccaaagtcctgggattacaggcatgagcaccatgcccggcctacttgtcactttaaaacacagccatgcctc

SEQ ID NO: 99910 - DNA, 1016 bp, Homo sapiens
ggatgtttctagaagagattagcatttgaattggtagacagagtagaaaacagtgtcttcaccagtgcaggtgggtatcatcagcagttcattgagggggtgaatagaagacaagtgcagaaatggtgaattcttctctttctgcttgagcttagacatccatcatctcctgctctgcccttggacatcggtgctcctggttcttgggctttttgactcaggctgggatcccatcaatcctcctgacctcctatctcaggcctttggactcttattgaattacaccaccaactttcccggctctccaacagattgtgggacttcttggcctccctaactgcatgagccaattcttagaataaatctcagtttatatatatctctctatatcctactggttctgtttctctagagaaccctgactaatacagtctcagacaactggcttcaggattcatcttgcctaactgtgggggcaaaaccatgcctggggaggggtggactgctttgaaaaacaaagaggttttggagataaagttagcctgaaaatttttctgattcagacaaccttgcatcagaaaaattttgatgagccttgcttaggagtgcaaaaagcagacgttacagttttaagcagaaagggctcttgatgttaagtaaaggactggtagagattacagaagaatttcaggtactgtagtaattacagaggcagaactcttttctccttagcaacagtctatgtgtggggagcagaagcttgttatagcagaggtcactacagagaaatctgtgtgtgcaggcagagtcaaaagcaattgaaacaagtttgcactaatgactttggggaccagagtgccctgacaatggaataggagggccatattatcaggggtgacctctaatttgcaattaaaatgacttctgggcatgtaaatggacaactgggtgggaggattgtgtaatgtgggtggcactcagtgaatttctttatcttagactttgatgaaggaaag

SEQ ID NO: 99911 - DNA, 1018 bp, Homo sapiens
agcaaaactccatctcaaaaataaaaaaataaaaaataaaaaaaaaaacaaaatcttatgctgattcaggagaacttctgagctgagaaccattgtcatttctcaacaaaaggactctgcatgagcaagttaactgaattcctgtggtaaacatgttaggtccctctaggtgtagtctcagagatataactaaggtttttatatcatttatacttagctttttcttaactttgttttaagtcagtatttgccaactattatctagaaagcaatgttttttctcaaaggtgtctgtcactagaacacattccccccctctcaaaacaaatacagtagaagaacactgaaacaaaagaaaaatcacatagtgtacttttggtcaacatttatcttgctgtaaaaatagaagaaagagaagaaggtaggttggcatctattaaatggtattacaattactggttctgtttctttgtggaatatggggaatcaacaaagtaaatttattctttctgatcctaagttgtcagggagttattgaaagggaattgcagtcctatttctgcagcagaactaatgtgaaaggagaatggtaaattaaataaggtcaaaatgatttagctagctgcttcagtctcctgaatgatcacatgtaagatgcaaataaatgtagggctttgtgctattaaatagagttatggtttttatcttggaatggatactgtgatgtggctgagtagtcatattaataggatatttttggtcactcacttgtccttagattatctcagttccagagatgggaatgattaagattgtaccctactcatgaggaatagaggagacagtgtgtcaaattggaatagaagaatgagcaatgaattctttcaccagcatatcactgtgttcccaaattttgatttaccattgtattctcttttttaaaggccacctatgaaaatagtagagggctattttgactctcatttaatctttgctgtatcttcaaagttgagaggga

SEQ ID NO: 99912 - DNA, 1019 bp, Homo sapiens
ttttaaaagaaattccaaaatagtctctagtcttttttgtgtgtcatttcttttggaactataggattcaaagctctggattgtaacactaaatcaccttgacaagtccctagaatcataactagggaagtacattgggtttgccttgggaaagaaggatataaaaatggaggtgtgtttttcttcctaccctccccatcccaacagtggtggaaagtttcatttattcattcaataagcatttattaaacagtgtagaaaccccatgttagataactttgagaataaacctaaaggacggtacgttgagtatttgattccaagttggctttttcaatgttcccatcactgatggaatcctgagaaccctgttagcctagcactgactgtttctttcactcttggatctcagatggtggggacactgaaatctaggggaaggttgtccggtaccacttacaattccagtttctctggttcttcgaaattgtcctgaatttctttaaaatcattattcttagtcttgaaacactaggttatattcataacaaatggttttgatcttaacagcatccttaattttctgagagaaatgaacaaaaattggtattctaaatgccaggtctcccagatttttattatttcagacaattgttgcagcatgcgaaatttttaaaattacaatttacttattttgagtcttatctcttcctgcatgttgttcatgctctccactgcattaatcttcatctatttacatttcagtcaacctgtttatctgttgttaatccatcttctggctgattcctgtcaatctcagcctacaatagctcactgggaatatattacataaaagtcatcaagggcaggagagagagaatggtattctgattttgatctttactcagaattctcaatgactttccctctgtgatagcagcagatgttcccaaagttagttattgaaaatgacagtctcagtttcccgtttttcactcttgactctcaaaaatggatac

SEQ ID NO: 99913 - DNA, 1512 bp, Homo sapiens
gtggagagtctttggttgtaggtttctagaactttcagtctgtaagatgaatcccttcattctggctgatgctgcttctgaaatgcctctcaaaactgattcacagacatcttccttgatgcggcagagcattaagcaggatctcccagcactttctaggttcaattttattaatttcactactaaccttgggcactttaccctttgctagattttctacttgctctctgcaatagtgttgcccgcatttagtaagcatcacatgtttttgaagtgatcattgtctacaattctttctggggagaaatgtttctgtgacttgttttcagtcctgtgcagattttgcttaagaagattcccactgatgtgaaaaatcacaactgtgtacattatcagcaaaaatcctccattttgggggaactaccaggggatgatgtaaataaattcttccagtgctcccctaatggttcattttacaaacttttaaagaaacgcaaaaaggggaactggaaatatctttatatggctgatttgttttatttataaactgtaacttgccaatacttgtattccagagccagaatcctagtgaatatgagacatgttcttttataatcccttgatcaaattgctgtttgtttatttatttatttttgagacggaattctcgctctgtcacccaggctggagtgcagtggcgcaatctcggctcactgcaacctctgcctcctgggttcaagcgattctcctgcctccacttcctgagtagcattacaggtgcatgccaccacgcctggctaatttttgcatttttagcagagacggagtttcaccatgttagtcaggctggtctcaaactcctgacttcgtgatctgcccacctcggcctcccaaagtgctggaattacaggtatgaaccaccgaacctggctcaaattgctatttttaaattgctgttacaagtaaagcatttggactatgtatcatttcttaccttcaggaacaagaggtcattttatagtaatggcgtgaaccagcaactttattgtttctcctaataggtcctcctggaggatctgttcctctgggctgttggcatttaatggctgagtgttttcctccagcgttttgcatatcatgtgagatacttcattatcttctggcagtgcccgtggctgattttcttccggcctttccatgaggggaaggaagaatcgcacaacctgacacttctctaagtgatcagtgtttaatgatgacaagagatatccagaaagtagatttattattgaatgttcctatctatttttagtcaagtgcgctatcttttactactccccaaggatgactcataaaccatgtcttagtaggcaaagaggagttggggagtaggagggactgaataattctctcgggactttaaatcagtgtggacacatcatctgcttttcactccttcatcacattaatctggactatccactttctctgtttaagagttgtattatcctt

SEQ ID NO: 99914 - DNA, 1128 bp, Homo sapiens
catggtcacgtctatcacattacagtagtcctctcttatctgtaggggttacgtcccaagacccgcagtagatgcttgaaactgtgttaagtactgaattttatatatgttacatttcttctatctgataatcaagataactactagtggccaatgagtgggtagctagagtgtacagcatggataagctagacaaaaggatgcttctggatgtgagagattgcattgtgttcctcagaatgggatacaatttaaagcttatgaattatctcgggaattttccatttcgtacttttggactgtggttgaccttgggtacctgaaatcatggaaagcaaaatggcgtctgcccagtttcaaagggaagagacttatgagttcaactctcagagacaggagtgttgaagtcacaatgtgcgaagataatattgcaactatttttgggcaatatcatctgcctcagggaccctctccattgccactcctgtacccatcttgctctcttgagctgtgctctgggagcgctgtggtatgagcacagctttcattcccgggcacccttctatacagtggctctctcttctctccttacccagtaagctggactggacagtccttaacaaaatgtgaagtcttctgcttaggcactaaatggccaaccctggccctctgtttatttttcattatcttccttctttattgttagaggccttcccaagcagtgggcaaacaccaaccccagctgttctcctctcattttttaatttgtggagcaattgagagagaggagagagaaagagcaaaaacaaaaaggaggaagaattttctaaccccttactggtcttactgaaaagacttgtcttaccttttccacctaaggatgtcatctccagaagacagaattcttcggtttggccaactgccaggtttttctcaccatctttccatttctaggttgattctcctttgctctgtctcttgctgtccctggccaactgggtttctcttcccaaggtgattagaaggaaaggggaaaagcatggggccaacaccatgacctttgagagagaactttcctaacagttgctaagctcaacattctaccaaatactgttcgccctggttttc

SEQ ID NO: 99915 - DNA, 1908 bp, Homo sapiens
tttgtaattttttttctgtcatttgttcattcatttagcaaatatttattgagtgtctaccatgcaccaagcactgttctaagcacttggaagagagcaatgtacaaagacacatccctgatctcataaaggaacattttctaatagagggaaatagataataaaaagaagtaaacacgtgaaagaacaggataatttcatgtagtgataaacattaagaaaataaaaggaagtggtatggtagaggctatggtaggataggtgattcatttggatttatggtcaaagaagattgtactatgaaggtaatgtttgagcttagatccaaatgatgagaaagagccaggaatgtgaactaagagtaccactttctagatggaggcaaaagcaagtaagtttgcttgtaaataaggttgcaagtaagtttgagaagaacttatgtttaactaacagtggccagtggggagcaagtggtagattaagtcagaggggtagacagcagttagatgcatgatcacctttagaccttcgtaggaaggagtttttaaaattgttgatgtttcttgtttgttgtttgtttgttttaaatggaatgggaatttatcgataggcatgctctgatttctattttagaaaatcactgctgcagtggaaaatgaattgggagtgtacagttggggataaactggaagcagaaaagccagttaggtagctattggattaacacaagagtaaaggcttatacctaagtgctggaggtggtgacgtagagaaaataagcaagtttgggaactattttcaaggcacttcagcagcagatgagttggatacagatggtaaggtgaataaaaaaaggcactgaggatgactcccagggtgccagattgaacaataggtaggaaatttactgagatggaaaagactagaggaaaaatatggataaaaaatcaaatgttctgctttaaactttaaagctttgtatgcttattgagtgtttgagtgtaaatggcaagtaagcagttggatatatgagtctggagcagtcagatccatgagagctggggatgcagaagtgattaatggaaatagagacagcctctaaagctttggggccatctgtgatcacctaggaagagaaaatacatagaggtgggtcactcaaacatgtagaggttaagcaaaccaaaaaagatcaggattgtggacaagtggtgggtgaggtcaggaaaaacttggagattgtagaatcactgtcactaagaaagagaatgtttcaaataagagagagtagttcattgggtcaaatgctgtcaagatgattgatggagtcagaaaagtgatggttgaatttcaaaacctggagatcattgaggaccttgacgagaggaaagaagaattgtaattcgactggcctgaggaaaaaggaaggtaaggaactgaaattttcataggttgacacttgtaagatgttggattgggggtaattttatcattgagaaagggcataggaaaaagaggctggttctttgaggttactatatgatataatcattttagagagtggaaatgtaaatacccaaagaagggttactggacaatgcttgagtgttcatttgagatttgtcctcatgcatttaaagtaaagaccagtttgtttggccatcagttttctccagccaaactccattactgcagttgcttagtagagaatgaagtgtaaccatgtttggggaattaacaaagcaagtattctggaaagagaatgaggcaagggagtgaagagtggttgtaagatgtgatggacaatggaatataggatgggtaagaaggaaagggacacctaaggactgtgatggataatgaaagtgtggtagggtcagtggagtgtaggcctcagattggtcattg

SEQ ID NO: 99916 - DNA, 1395 bp, Homo sapiens
ttatttttcttttattaaagaaaatgcagtataatgcctacatcatggcttaaaatattaagtatttagtcttcttcttgagtctgtgaacgctgggcagttctgagcaagtggaccaggcttgactgatctcagctatgctcatgtgtatgtctgtcagctgacatgttggctggtggctgtctgggcaagagcagccttctccttcacacctctgggagttggccagttgtaggttgaggatgggacaactgtgccatgtgccgcttatcatccagaaggctagcccagcctgttcatatggtggaggcaggagttcaggagttcaagagagacagagaaagagactggaagtaggcaaagtctcttgagagctaaactgggaattggcaccaagtcacttctgctgcattctgttggccaaaggaagtcccaaggtcagtccagaattttggggagtgaggaaatagattccacttcttgatgggaagaaccacagtatcacaagacaaaggtgtttgggggtaggccaaaaaagggctcacaaaatccatgtcaaatccctggaatctgtgaatgttaccttctatggcaaaagatgtgattaagttaaggattttgaggggaagagtttatcctggataaacagataggccctgccctaaatttagtcacatgcatctctacaaaagagaggcagaagaagtctgagtgagacccacaaagaggagagggtgatattaagatggaggcagagataggactgaagcaacctcaagccaaggaatgcttccaccagcagaagttggaagaggcaagaaatggagtctccccctagaacctctgtagggagtatggccatgccagcaccttggttttgtacttttggtctacagaaccaagaggcaataaatatctggtgggttttttttttttccagcctcccgagtagctgggactccaggcacatgccacatgtcctgctaatttttgtatttttagtaaagacagggtttcactatattggccaggctggtctcgaactcatgacctcgtgatccatccgcctcagcctcccaaagtgctaggattacaggtgtgagccacagcacacggccaatatctgctgtttttaagctgtctagttggtggtaatttgttaaagcagcccgagaaaactgatacaggtgtggatacagggagggataaagaattgaagacatttttgcaacaatctacatataccataaacttagataattttatatagctctttttcacttaatatgacaaaacatttattcatgttattacagtactgttaaacactattttgaataattgtataatacatactatatactgagttgatctagctgaacattttattgttat

SEQ ID NO: 99917 - DNA, 1917 bp, Homo sapiens
taagttgcttgcatatagtgtagtctatgaataattctctttgatttttatttgttgagtttgttcccacttccaaaggggcttgaggtagattgggttctgaaacaaagtgcagaatagagcaattatgtaaacatagatttcctggaggtcctgaggaggcaggtgctccaggcacctggtgatctgatttccactcttgggcattgcactctggtctgatttctgtaggtggagataaaatgggaaacatttaatgcagcctccatttcctctcaatagaaattatacaaaaatattttttatttcttaaaaaacatttttctttcaaatttaaatagcctgtaatacctttcttcattttacaaagccccgacttacagcagcataatatttattaatagagttaagcagaatcaatgcatgtgtcctgtcacactgagaactgtagtattgtggacaatgtttctaatgtattgtgatcggttagctctcatgagaataagatgaatgtttatattacatatatattatatatctccatctatacccattactatatctgtgtatatatatgtatatatacgtatatacacataacatcgaaagtatgtgtatgtgtgtttatccatgtactgtgattaatactcatgtacaatgatgttcacttgaacgccagcatttttttatgtggttgatctttgcatttttctgtcttcaggccatctaaatcctctgactttgaggttttttgatttggttgaaactaataccaaaattggaaatcttttattacaccaggttaactcaaagagtttcttaatatgggataaagggatagtttgtaagattaggaataaatgtgataatcacttgaagttcctggagcatacatagtgttttgattattaattttggcatcgcttaaacatgttagaaataaaaagggccagcagccttttgtgtcagattaacttagtaaaaattacataaagagtttgcattatttatttctgttttctgtttcattgagtggaaaatttaaatctgacctactgactcttttaacacactgagaactatgtatttatttctaatttattgagtgtcagaaatatgtcttcaaattccctaaggctcaacttcaaggcaggttcctttatgaggttttctctcatcccctgcattaatttcctattgttgctctagaaaatcctcacaaatttagtgacttaaaacaacacaagtttattttcttataattctggaagtcagaagtccaaaatcactgggctaaaatcaagggctaaaatcaaggggctggcagagctgctttcctttctgggggctcctgagggggaccctttccttccatttccagcttctagcagttgcctgctttccttggcgtgtagctcccttctatcttcaaaaccatcaagtctttcttacaatgtcatctctctgtttcttactcttactcttcctttccccctgtttaaggacttttgtacctttgtgattccattgagtccacgtggataatctgggataatctctttattttaaggtcagttgattcagttgattagcattttaatgccagcttttttttttaattttattattattatactttaagttttagggtacatgtgcacaacacgcaggtttgttacgtatgtatacatgtgccatgttggtgtgctgcacccatttttgagacaaggtatctctctgtcgcctaggctggtgtgtagtggcacaatcacaggtcactgtggcctctaactcctgggctcaagggatcttcccacctcagcctcccaagtagctgggacatcaggtgtgtgccaccatgcccaactaatttttatttttttaaattttctgtagagacagggccttgctatgttg

SEQ ID NO: 99918 - DNA, 1060 bp, Homo sapiens
tattcttgttttataaattttcagagagagagatgatcatagaattatgattttatttacttagatttgttcattttctgtatttttcaagtaaaaatcccttaaagaaataaaatacatgttgaaatatgttctagccccggagactatcttagaacagaacacattgccttagaaggtaagaagcaatatgtttacaaatgaaaaagaggctaagttgcatgaaagtattaaagccattatttttcttctctcccaccctaagtatattagtccaagaggcaagtgttcgcactttcaaagcaatactaaaattgattctttatcccatcctttcagtctaagacacttttaaagaaaccaccagtcttcctccagtgtgcttcattttctaacacagtgtaagaagcatgtgagcagatcacattaatgtaatgatgtgtgcttccagcaggacaatcaaagcaaaggggatgcatgaatctctctttttttttttaatttgctgagtgtagaccatgtataatttttgttaatgtttacttcttctctaatcatatatgtgcgtgtgcattgaaaagattttaggaaattcaaattccaaacaagaaattaaatacttacagtaattctgccatccagatataaacactaataatattttgttgtatttatttctagaatgtctagacatatacatataaccatttttaaaacttaggaaatatgctgtgcatatgattgtttttctcatagaatattgtgagtgctgtttcatggcattgaatgttcttcataagcatagttttaatgactgaattagatcattttagagaaatcaattaaaaatattctaagagtttaaattgggaatgaatatatctttgtggtgaggactgaacatacttcttcttttacttgactttgagtatgtaattgatttcataagtaaaaagataatgaaatgtttaccttgtcataatcaatagtgatttcctaagctgttaatgttaggtgaatggaagtcttcccctgtggatatggaagacatatccaagga

SEQ ID NO: 99919 - DNA, 1048 bp, Homo sapiens
tgccatgtcttctgctgtgtttggtttcatatttcagtcattgacagctccaggctgatatcccattattccaaacatagcagaataaagactctaatttcaaagtatctcaagtaaatctcagaactgagcttgtgaatcttgattgcttatatctgggtattttgtccattcctgaaccaagattattccatctccagctgtggtaggtcatagcccaagtcacaatctttcacttttagagtcagtttcacaggaacctcgggaactaacagcaggaaaaggaaggatttctagataaacatcagtgccctcttatccatacaagggggacgatgttaagggggaaagactatcaacatccactgcagaagcagaaatggtgttaagagacaaagactatcagcatccacaaccatgagcaaccactgttttagaggtaaagaaactatataattagcacaggccaactctttttttatttttataatgcccagactacatgcatgtcttaatcatttcttttatataaaatttctgtgcacctaatgagaaggtatttttagctacacatccatgacccttatcctcattgttgcatttctcctctgaaccttgtcatcacctaccttgcccaaaaggcactgcttgttttagccattgagcaaggtgggtaagcatattgaatttgctgtcatatcctccttaaaggtgcagcaatgcaggtcacatgggatcaaaaaaatgaggcttattcctaatactttaggctatacttgtgaagcctcatgggaagtttttctttaaacaagtctacagcacttattttaggcttaactaatctgattagttgttaacagaaaaggatatatttaaagtccacggatatgcaaacatttaatcagtgagtataggttttatgttctgtcttcatttatcagtgatgagagtgaccttggctatgacctcccacagctaaggatggaatgcttttggttcaggaatggagaagatgccaagacctgaccaattaggatgaacaagctca

SEQ ID NO: 99920 - DNA, 1091 bp, Homo sapiens
ttgagcttttctgctccccagggtggggacgtgtgacaaatttcttggtgagcatacccttaaaatgaaaagatgttcttgggtgatatcagacaaggtcagtttgttctttggtgtcatgaaaaggctctcccagtttgttcactgttactagtgaacttgacttaccttgtgagcttctggttacagggattttttttttttttttcatttcattttacctaccttggtacctagcagtgttggatatatagaaggtactttctatattttgtttttggaaaatactttaaagttacacaggagaaaatatatccatgtaattcagaggaggctggattcccttcaggaatgggggcattattggttttaatcctcagtatatacttattagaaaataaacaatgagttgaatgtttgacgtaggtcaagtagcatgcaggaaggataatcatagacctgcttttgcaaagcgtacaatcaagggtaaaagacttacaatgtgagaatagaatgatgtcactaccacttttatcattactcttgcctagtatgtatcgagcaacaatgaaacgtcagaacttcttctaagtcatttcaatattaacgcctttaattctcaaaacaacgctcttgaagtaagcactgtgattattcccattttacaaatgaggaaactgaaatacggagaggttaagtacttgctgaagatcacacagttataaaaggcatgcctgctatttgaatttttgcagtctgactccagagcccatacttgtatgtactggtcagatggaagaagcaggggatcccaaatgagcccctcacccaaagctgtgggttagagaagggtcccagagtcagtgacatctgtgctaagtcatggatgatgggtaggtatttgccaggtgaaggaggaggaagaggaaggtgttgagttatgttctgttcggatgataatacagactggttattatggttgcagtgtgtgtgtgtgtgtgtgtgtgtgtgtgtgtgtgtgtgtgtgtctgtttggagcagatgatacagatgctcgagccagagtatgtatgtctttgttaagccatgtt

SEQ ID NO: 99921 - DNA, 1003 bp, Homo sapiens
agtccctgctctttcttcccatcataccacacatgtcatttctgcctctagctcacagccacagtctagtcctttgataagaagcaattccagaaatgaagattcaaatcccagctattctgttctactcaaaatatggcccatggaccagcagcactgagatcaccagggagctacttagaaacctgcagtttcatacttgggaggctgaggtgggaggatcgcttgaacccagtttcaggctgcagtgagtgatgattgtaatcctgcactccagcctgggtgacagagcaagatcttgtctctaaaagaaaaagaaaaagaaatagaaatgtgcaatttttgtccctaccccataactgctgaatcagactggtcattttaatggggcccccaggtaatctggatgcacagtaaagtctgggaagccctggaccaggttcctggaagccagcttctccacctactgccgctatgtgactgtcatcttccttccgtgtgggagaagtggattcactgcatgttagctacagggtataaccactggagtaaaatttcagcctttttgaagagtaaacatgtttaacctagaaaggactacttagcaacataatattgaaagaccgctcagcccattttttgaaaagcatgagctgtttccatagataagccaaacaggcctgaacaaaacagaggaaaagcgaactttgctgttttgatttgtggatgatgatttgattttctaaaaagaacagctttgtttctttccctgagaacataagattactgagttcttagagcctcagctcatgcagctttcctgcttgggtatatgggtagggcaaagccagattaaagatgcacagtatcaagccatctgacctccaatgccagatttcctgcagtagtctaattaccagtttattagctgttaaccttgcaccacagttacaaaacggtaactgctggttagagtcttaatagttgataagtgtcagggagg

SEQ ID NO: 99922 - DNA, 1053 bp, Homo sapiens
ggaagagagaattagagaaaacgtgaagggggggaaatgacatttgagccagacatcaaaggacagacaggattggaagatggggagataggtaggaatagaagattcattttagccagagagaacaatagggaaaatagaagagtgactagcaggaaattcagctcaaatttgagatatgaaagatattttataggtatcaataattgacttacttccaaagagttcatcatcattttaatcttccttgaagattattttttaaatccaagtaagatattttaaaaattagaccgtacataaaagttgaaaaaggaaaaaaatgctgaccttcactccagtgaaaccactggctaacgtttgagtattttccttcaagtcttttgcattttgtttctgtgcctctttttgagtagttgaaataatgtattgcattctgccttttcatttaaaataatactaccagcacctacccacgttatgaaaatctctttggaatcgtcacatttaatggccttatactgtttagccgtttggctttgtcatagttgactttaccccaccctattgctggagtttagggtgtttcatgttttccattgctatgaacagactagctgttggccagccaaccctttttgtatttcacaaatggtaaagccaaggcacttgtaataagccaagatggggactgacttgttcagttgctagaagccaaaagactgttgcataaaaagctgccttctgactagaagaggggctgtggggtttctaggaatagagattaataaggtgcttaggtcatatcccctgagaagtttaatctgagtgggccactgaccttctggcctctggaaaggagatccattgaatttctaagccctttggtactcctcccatttcctgcggaattttgattgtgggtaaagtttcaaaacactggctcttcacattggatttccaagttgggaagagaaggcaggaagacctatcaaaggacaaagatattgtgttctccacttcgatctgaaagatggaatggcaggggagaag

SEQ ID NO: 99923 - DNA, 1087 bp, Homo sapiens
ttcaccatttagtatctttgtgactttggaaagtgatttaattgcttgagggcttaatttccctatctgcaaaacagacacaataataggaccatcacataaagtctctatacagattcaatgtgaaagaacattttagaatgcagtattagaagtagtttaatcactttaaaatgttgctattaataatctgttaattagcaagtgatattatgcatgtaaaataaaattttggaacaatatttttcttacaatgagccaggtctgtaggctaggcatattaaaatatttaaaataagtcatggtatattaggttaaaatgatggaatgaaaacactccaaatcagagtttcaaagtaattcaactgaactgtaaagcaaaataggtataacacaattctatgctaaaatgttttaatcttaggtttatcatataacattttattacctaaaactgctaaaacatgtaggttttatatttaaaatgatagtttgtatttagtttgaaatgtggagctgaatgattttgcaaaattaaattgggaatacgttatattttaggtaccctggaaaattgtctgtggttagatggctgatacctttccttcttatttagtttaattgaaaaaaaattggcattgaagaattaaacacactctaaaatttcaataaatattccatgactactttatttatctagatatcaacttactaataatatcagccatccaagttaaacaaaaagtaaaacatccagaagtgaaaaatacagccaaatgttgtacatggctagtatacagatcctgctataaaatgctattataaaatccagctgccctcactcagagcctactgattcttatatatcacataatctttcccttgttccttcctctgaagacagtaggagctataaacaggaacagtttgggagaaagcaaagcccggcatcaaaagagatatagaacaaaatgtagacacacaactttgttatcacagggcatgatgaccaaggcattcctttcctcattcagttattcacttcttcatcaaagattctctaatcatctgtgatagtaccagtctg

SEQ ID NO: 99924 - DNA, 1052 bp, Homo sapiens
aacttcttcaatctcttgccaggtctctagtctgtgagtcaaagaataccatatttatgagtgatgttttgagatagtgggtgctctgtgaatttcaggtagtgtttttttgtttgtttgttttttcctcaccagggagcatcataatttttcagcatgtttgttaacaatgtacattttattttaaaaaaaatcatgacaataaattcatacattgccaaataacaggtgtctgctatctgattctgtcagataaactttataccttttctggaatatatgagttagaaaacttcaggtatcagactcagctgcctcaagtactgacataccaggcatttctctgtttaatcatcactcaactcatggatgaaagtattaggaaacagaagggattatgaagataactaaagttattactggcacttgaactgaatttctcttaaaatatcagtttactttgatatgtgctacaaagaccttaaccatgtttctgtctgattcttttgtgaaatgaaggtatcaatacagaatgaactgttttgataagctccctcacaattttaaagtatagagttaatctctaagaactaataagcaatgattccattttcttgattttatttttatgagccacagttttatatcccactgcttatctgatttgaaaatggttgtaatattttgagaaagttaatatcgagtcatgccaaaaccttaataaacttagtcttgaactaatatttcaggctcatgagggatttctgtatgctaagatagattttaatattacagaaatgcaatagtgacctttccataaaaccttaataaaattactttgttctataaactgcagaagagatgggaactttcttgaaagagaatatgcatgatttatctgcatttcatggcttaatcttatatctcatttcttcagatctcttatgtttttcttttccttaaggcaaacaacagtaatttccatatttttaaactagagaacagacagaatttttcaaaggcatgttttccttttgcaccagtgagattgg

SEQ ID NO: 99925 - DNA, 1050 bp, Homo sapiens
ttatgagctagagtaataatgataatgatactataaatttttgagcgctcactatgtgccagatgaccttctaaacattttatgtgtattatttgtttaattttttacaacaaccttacaaggttgttgctattaatattctcagtttacagatgggttttatatagtaacagtttttgcttaatgcagtgcttttggcagtcattctacatttaactttgtatgtgttataaatgtaatagtgattgaactttgtgccagtcattgctttgctcatttcattgatataaaccattttgaccaaagctttgcatgcctctgattctatcatttattgtctgtgcccttgcaaggtggtgatgactccagactttctatagagcaggggctttgggccaccaatctgttcagaatggctgggtaggtgaattaaagcctcatttgcattgtaaatgcatgatttttcttctgttgtacttgaatttgaggtgacttgggaaggagtgtataatgaaattgatgtttcctttaccaagaagttgaaagtaaaacatattaaaacttcatttagagtcagagttggttcctttcaaaatcaatgaaatgtatgaagtggctaattcgctgatcttcccagagatccagattgtcagatgcagaaactaggtcttctgtgagctgacatagcttaatacttgttgacttgatatttctgcagggtgcatctctagatttacaggatagtcactttttaagtaaacaaaattgcaaatgctaaggatggacctaaacatggttactattccttgtttgaattaaaatattgaagtaatagctgttcatatgtctgaaattaaaataacagtgaactgcattctgctataagatgaaacagaataatattctgccatccagagacaagcactgttaattcttatgcagttttcttctagtcttttttcatatttgtttttcttttttttctctctcccatggttgagatcatagagtaatatttttaaaatataaagcagatcccatttctcctgt

SEQ ID NO: 99926 - DNA, 1038 bp, Homo sapiens
cgttctctgtatctcactgtcattgctggaatgagcactttaaatgctcatggttgattactgagggagagacgttttcatttttgttcctattggttttgaaatgaaagatagacagcaggtttaccaccttttgaagttgctgaataactcacttcattgccctcttgtcatctgagaacgtgctctgtcgtgtcagggaggtgcagggcagagtctccccaaccaggaatgacctcttctgttcactataccccaacatgcacttgaaaataaaaactgtgttgtgatggctcgtctgtggcagcagcttcttggcctgattgtagactgaggccagcttaggcagagtgggatggaggagttggagcaggaacaaacagaagatgaccttctgtgcagaaaccacattttcaacaagtctaagtcaacccagagttacgaactctgggtttcccttatgcttagctttgtattctagctcactggaaatagacatgcactaataccattgctctttttaaagatctgtgtaacagaaatggattccctgtcaaaatgtatttgtatttctgcctcatattatatattatctgcatcctcttgggtgacttgcctcacctcagttaggaaaagttttctcatctgtaaggtagggatggtggtgtttacctcatttgtctttgatggttaataataatcagtactagcaacattataatgattattattactatgttttatattaataatcaatactgggccaggtgcagtggctcatgcttatgatcccagtgctttgggaggctgaggcaggaggactgcttgaagccaggagttcgagttcagcctggacaacatagcgaaactctgtctctacaaaaaaaaatttttttttttaattagccagccatgatagtgaatgcctgtagtcctagctactcatgaggctgaggcaggaggattgcttgagcgcaggagtttgaggctgcggtgctatgattgtaccaggagtttgaagctggagtactatgattg

SEQ ID NO: 99927 - DNA, 1034 bp, Homo sapiens
gcctgggcaacatagtgcaaccctgtctctacaaaaattacaaaaattagggtgtgttagcatgtgcctgtagtctcaactactcaggaggctgcggtgggaggatccattgagcctgggaggcagatgttgcagtgagctgagaatgcaccactgttcaccagcctgggtgacagagcagagactctgtacctcccccaaccaaaaaatttgtaatacctttcttatcagttgatttcaaggaatatatagtgttacaaatttcacctctacaggttttagaataatgctaggtgtctgggcccttatgtttatttttacattaaatgtggtttctttttaccacgtttcttcctccatgctctgtgatgtaacttatttttttttctatctgtgtacctctatacaggatcccaaaatcttggctgctcttgaagctgttggaaaatcagaaaatgatctggaagggcggatagtttgtgtctgcagtggcacagatctagtgaacattagttttacctacatggtggctgaaaatccagaagtaactaaggtagcttcagttaaatggcctccttctcttccccaccatgtatatatgttgtgtgtttaattttatgcgtgctatatttttatatacttaaattgtatggtaatttaaaagttagcattgctttgctgacatgtttctgtagaaaatcagcaattaaaatacccttttagcatgtcactcctgtgggccaacaacccaaatacctactacgatatgttgtagggatactagtccagcacttctccaacttgagtgtataccagaatcccctgagctcttgttaaaatgcagattctgattcaataggtctgaggtggggacaagattctccttttctaacaagctcccaggtggcatggatactactcatctgacaactacagtttgagtgacaaaggtctagatcagtaccacccagtagaaatgcaatgtgagccacatatataatttaaattgttcttgtagctgggttttaaaagta

SEQ ID NO: 99928 - DNA, 1113 bp, Homo sapiens
tactttttaggcaaatgttttaagatcattatctgtgggagctatagtcatacagtagtacttcccgaattagtggcctgaaaaaaggattccttaaaaaagtccacatataaagggggttctttggtcagctaagcatgagaaagcctttagacaggtttctttatggtagtgctttcagaagaagtatttcttttttttttttttggaggagctgggtctcagatatatttgagtcttagtgctttactctttttttttaagttttagggtacatatgcacaacgtgcaggttagttacatatgtatacatgtgccatgttggtgtgctgcacccatcaacagaagaagtattattcttatgtggatctcagcaaggaagaaagctattcagctgtttcctaaactttttttttaattttttgatgagacaccattaacatctttcagaaccagtgtggcactgaataaaagtcagtaaattatatcatagaggcattattcagctcaatatttttctagaagtatcaaaacaatgatgtaatctaaggattcatttattcatatttaccataaatattctatttattttccctgtttttccacttccacttgtcttcactcctcactgttttctgctgtgtgtggggagactttaccttaaaagacagagaaccaggtaatgaaactcaagcccaccgatttagattccttttagtagctcttatattgaaagtcctatttagtttatagaattacctatagatttgatttgcttgaactaaattggtggatgctgcctagttaagagttagacaaaggcttcttgattgattatattgatctcagactaagcaggtatgattgtcatcaagttgaaatactatttactttggcatgacttaatttgccaacattgtcaacaggtacctgtcaggaagaatgtgaccgataaatacaggccatcaactaaagaaacaactctatgaacaccttttaattcaccagctgtttactcatcccataccaacagaatttcacaaatttgactgagttgagtccaaaagtaatgctgtcaaaaaactgatggttgctgactggcttaagatgatg

SEQ ID NO: 99929 - DNA, 1047 bp, Homo sapiens
aatgtcagccagtttgaaaagcagtgatccgtgaaggtgggggccatctgccttcacagggccattggcaggcagttgtgaggtgccaaggggaaccatgttgagaaattgcagggataagcctgtatctctcaaaattatgccccagcaccaagagtgtgattcatcatactcacttggcaatgggccaagaggttagtcctaaaggtactgtcatgtcttatcttctggtcattgtggcaggtgcttacaggtgtggtctctaggctataaatcccggcttcaccatggcaaattcttacacttgtgcctcactgtcctcatctgtgaatcaaaattaccatgcagatgaaattggaaagtattctttattcaatactacttatcttgttatggtatccctccaattttctttcacccttttagtggaggaaagttatttagtcttatctatttctatgtgttgtgcagctgcttcttcttttcctctgcagttgccctggcatgtgtttttaaagagaaacccagtggatattctgatgttatgacttcaggcactgatagtcctaaagggtcaaaaacttttagaaggcttgcttatacctgagtgacacaaatatctctatctgacatgagatctaacaacatcctgcccagatccctttatgaagctggtgttcacccagccatcatctgccatgagaatgggctcaccaagggctcagacctgtccacttcttcagagcattgccctctgctgaaggggagcttccattcctggaagattatactcttccctcctccaggaggaagtccacagccaatgatgagctgcaacagggtacagaaggccatccctcttgccgccaagtctggcacaaatcacatgagttcaagctaaatcaagctccatctgaaaccacaactttgtttaactcttttttctgctcagtcttctctcactctcttcatccctaaaacatcccgttattaaagtagttagtggtgcttctacgaaacttaagacagaaactttactaaatcatc

SEQ ID NO: 99930 - DNA, 1021 bp, Homo sapiens
ttgataccatgccagaaaaaaaatcagataactctattggtgaatgagctgccaagagttagttggaaattgttgtgtatgttttaatggatatgaagagtaaacacttttaaaatgttattcactatcattctgaagtttctaaaatggaaactattagtgtactgtccataatattaaaagagatctggcttcatagtgattacatagcttgggaatggttcctgctctttagcattaaaccaaaatttaatatccaggaagttgcaggaataacacatgaagaaagtcttaccttttgtctccctcttctcttgtcttgctgtttacataacccatgcagtctgcctttctctcaaattcacaaatttacactcagtttatcctcccactcagaccaaagttttggaaatagcaattctcttttgccaccttccctcctctctcgtaacctggagtgaacaccaatgactagaaaattgggaagtgagtagccagacagtagttgtgggcaggggctggaagagatcccaaacaaaacggctgtgttaaagaaggctgagagccgcaggtgccgtcttggaagcatccctatataatcagcccaaccatgtcctgaaggcccagcagcccacgaagaaggtatgattctgctggggcagttgccccatccttcactcaagagttctctgtaactttcagaacacggtgttaaaaccatcgtgtagattgcagaccctgtttcagctagcaaagagtgggactcccttagtttctaggatcgttgctgttttagccacttgcgaagtcccccggaatagaatttaaccaggactctaataggactggacacaactcaggggtgtttgcttttgtagcatttcttttggggaatgggggtggtttagtttgattcaacaaaaactcattgagtaccagttagctatgaggcactaagcttatgtgaacatggggctatatagagatttgagtaaatcacattccctttgtaaatgctcta

SEQ ID NO: 99931 - DNA, 1040 bp, Homo sapiens
ctcacaggggaggcattccaaagccagccctcatggatagaagtaaaactccatcctcaagtcaagctggacttctgaatgtcgagttaaaatgaaattatcatggtaacacattacctgggcttccaatcagggagcgattgaaggctccttggtggctaaggtatggctcagagccaagtgtggtgttccagggtaccaagtcctctgctcaatagctttcattctgagtggcaccaacacatttataatggagagtctctcctaacttttatcatcaccaggaagtgtgttcatcaaggtgttatctattctactagccttgatgctcactgttctagttaaaaggctatccaaaaatactatgtcttggggtactactgagatttgttgaaacattggataattgttccccttccccctcacccaacccatcatgttgacagtaaagtcccttatccttgaggcagctgacatttcagaggggctcaagggtgcttagcttgaaaacaagaacaaaatatgtctgatcacgcccgtgtcaactgtggttaagtgtgggaaccaggataaggacaactgaaggcatggattgagttgtaaggggccgcctccttttccctaggcccagttattgtcaacatgagggtttgttctagagctactgtcttatctgccacattcctttttcataagaaggcaatttggtagcatcagaatttatcattgtttttgtccaaaaatgtgtgtcccaggccaggcgctgtggctcatgcctgtaatcctagcactttgggaggccgaggtgggtggatcacctgaggtcaggagtttgagaccagcctcaccaatatgatgaaaccccgtctctactaaaaatacaaaaaattagccaggtgtggtggcgtgcacctgtagtcccagctacttgggaggctgaggcgggagaattgcttgaacctgggatgcagaggttgcagtgagctgagatagcgccactgcactccagcctaggtgacagagtgagactctgtctcaaa

SEQ ID NO: 99932 - DNA, 1261 bp, Homo sapiens
caatagtattcttttttttaatagtgtttccttctatttgatgtcttcttaacattaaggaagtaccttaaattttggggtgtgactgatggaatcggtgtgattctagatttctttaggtcataggaactgtaagactactcaggaaagtctatagcctttatttttaatccaagtgtctgccctgaatttattccttttctatcctagtgaactcaactggaagaactagacaaaaacatgaatgtcggcttgaagaagccttgtcaaacatagagaacattctgcctgttccttgcactccctcttttgagtcctaccctggcccctcttatctctccaaaatcaaaaacaccccttgggcagaacaacttcaatactcataacaaaaggagacagacagagctcactcaagaaagaatgggcattggaatgtaagggtcaattactccaagagtttaaacctaaacattttcaaaatgccttagccacatagtctcaacaagccagtattcaacactgcattggaagcccctgtgaaggttccttgtgaaggttcaatggcttcaaatttataaagcttgcactttagaaactctgttaactgaagtgtaaatgcactgatgcaagaaagagcaagtactaccccacatatcagacagatgcctctacttttaaataatcctttgagtatgatacgatgtttattttacttgaaaatatttcaagtttttccactccactggttcatataatgagacaaaaaaataaacaagtcccatgaacactggaaaggacaaggtcctagtctcatttgcagatgttgattgtctactctgatataaacaattccacggaaaaactgtttgaagtaattagagagttcagcaaggtaaccagagaaacaatgagcaaagcaaaaacctggagacacacatacactgccattaaccaggtagaatagatagtaggaaaacataaatcccatttatattagcaaaagacatgctggttcctaccaccttccagctggttaatcctttcactctttctatgaaagtttttattcatatactaatgtgtatcttcagggggctgcaaggagaggagagactatatatatagtccatttactgctttggtcaccctgtagggtgacctcctccctatccatgcaatcaacactgactagattttcagtagtagctttagacctgactcctcattggcttctcagtatttccttgttcgttgctcccca

SEQ ID NO: 99933 - DNA, 1143 bp, Homo sapiens
aatcagatttgatgaacttgaaagacattttttattcttctttccagctcttagttttggaacagaatctccttctccttcttttaaaattataccagttaaagtttttgatacatctcacattagcattaagaggacaataatgcattttgccaagtgagaatctttaattgcctagtaatgggtgtttcttattcttggacggttaatgggtgtttgaatttacaaatgccacttttttctctccagcaaatatcaacagtacaagatgtccaaatattgcgaagatctatttggggatctcctgttgaaacaagcacttgaatcacatccagtatgtatttttaacaaaccatatttctagcatgaatggatttgttttgaaaatttctgaagggtcaagtagtactagaggactaatgctaaagatcttcatatttatttaaattctttggtacggaaagcttacatcatgcttcagagggatgtaaagagacacaaaataaacatctggttcaatttcatttggaggatctttgggtcttatggttttcagatctcagtcttaaagtttcataaagcacccaggccaagagtccagattcaggtcagttgttctcaaattcagttacatgttagaatcacctacaaaactgttaaaaacacctgtgccagggccccacttggagactgatttaattgatgcagggtcagccctgagcatggtgttttaaaagccctccaggtgaactgtatatgcacccggtattcagaacccatgggaggctcatgctgtggaaagtgccctggattgatgtcacgacatcctgaagttcatgttcctaactccaaaataaatcactgagtaatgttgcacatacatttttgaacttcatgttaaacctgctaatttcttcataaagcaaagaacattaacctgtgctccatagataggctttatgagatctgtgaattcattctaattgcatgcaatttttttgtatatactcattctagagagttaatcacatttttataaggatccatgacctccaagagattaagatccacaatcacaagatgttatgagctccaaggcagctaatgaaatcaaagtggaaagacctgctattgacagcagca

SEQ ID NO: 99934 - DNA, 1009 bp, Homo sapiens
agaagtagccatccacttaaaaaaaatttattaagcatcaagcatttcaaaccacattttaggagcaggagaaataatacataacaagatgtgctccttgacgttgaataggtaagagtttagtgagagttttacttgaaaaaatactgcatatatcaatgtccccattttcttttagcatcctttttctctaaaagtgcttatgttctacccaagattgtgaacaaggtctgactacttggcagtggtttggtgtcatggattttccatttgtctttcacacagctgaccaagaggaggaagctcaccccgaattcaaatttggaaatgaactttctgctgatgacttgggtcacaaggaagctgttgcaaatagcgtcaagaaggtcagagtcccctttctttcatcactctcaagaggtagcagctgttatttatgaaattttggaaatgtgagaaccacaagagaataaagtaacctataattccccttctaaattgcttaggatacgagtctgtgctgggtgaccagaacttgacacatacacaatattaaatttaaaaggacatttaaattactcattagtcagggccagtgttaaccactacccatttggccagtgtcctctaaatattatcatttattgtgttattgcagctggggagggagaaaatgacagcatcccaggggtaagatttaatcttgaattcatcaggaaaatgacccctgaacatcccgagtctagccctcatttgagaactagtcctgctaattatataccttccccctaaagtacagtaagcataaaaatgtttccagatattcagccaaggaaaatagttattcatatacttaccttttgtcaggcatagtctaggccataatgacctaaaagtgtaaaacacacttgccttctgcccttaggcagctcatggccccctgtagtttagggaaagggatcggaaacagcaaacaagcaagtagtcaaataactatataattacaact

SEQ ID NO: 99935 - DNA, 1057 bp, Homo sapiens
ttaacagagtttagttgagcaaaaaaaacaattcccaaattgggcaggacccaaaccagaagaggttcagagaaactccagtgcagccatgtggtggaagattttttggcagaaaaaggaaagtgacctacagaaaacagaagtgaggtacagaagcagctgtattggttacaggcttatttgccttatttgaacagaggttgaatagttggccacctttgattggctgaaactcagtgattggcacatgagtaggttccagtctgtttacacacccattcagtctacagtttactatgtgaaagtttatgaaaaaacctttagaataggtaaagagacacctttaggctaaacttaatttaacaaatgctactgactgattaagtaagaagactcaagagtgtcctttgggttgttagcatggaggtcgttggcaaccttaaagagacatttcagtggagtgccaggcagggtggtgacactggatcacacagatatgaatgactagagactatgcttttgagaagttttgatgtgaaggggagcaagaaatggactggtggccaagggcacctgaggagtcaagggagtgttttctttttcggatgaatgaatctggagtgtgtttgaaaacttggaagtggtgcagtagagaggaagagattagttttgcaggaaagagaggggataactgcctggaattccttgaggaggtggaagagggtgggattgctgtggtgcaaaggtgtggcccttcacaggagcaggaacacctgattagtgaagacagtggatgaagatgcaggtaggcagatacatttggtgataggaagaggggagagtatttgtctgatgagcaaagccaaaggaatattgcctttacacactatcttttctgatatagggaattgtgactactctgagaatattgaacatctattaagactcaagagtattgttttaatacaaaaattagccaggcgccatggtacgcgcctgtaatcccagctactcaggaagctgaggcaggagaactgcttgaacccaaaaggcggag

SEQ ID NO: 99936 - DNA, 1043 bp, Homo sapiens
cacttaacagtaataactcattctaactggttaacaatgaaattaaaaaatagaatcggtttgggagtgcttgtcacttgtttgtagtctgcatttctaacaattctttcaaatgcataacaaagcttcatccatttaaaaattgtttcactaggccgggcacagtggctcacgcctgtaatcccagcactttgggaggccaaggtgggtagaataggatgtcaggagtttgagaccagcctgaccaacatggtaaaacctgtctctactaaaaatacaaaaattagctgggtgtggtgacatacccctgtaatcccagctactcaggaggctgaggcaggagaatcgctttaacccgggaggcagaggttgcagtgagctgagatcgtgccattgcattccagtgtaggtgatagagtaagactccatctcaaaaaaaaagaaaaattatttcactaataacatgactatataaaatattgaagaccagctcacaattctagccactagttacctaaattgccaggtcactgtcacatagtttgccatacacactggtgcatggagggagatgctagcaatctgtcaacctcccactcacagcacctagagagagaacacttgtcactttttctcccttatgtaaatcttgcccagtagcctacttctgaaatagatttatttttgctttttacccataagaagtggtattttgacagtgattgtgaaaaattacaagagctagttgcaaattgtaagagaacagcaggaggtggccccaggaattctcctgtgggttgaaaaacgtcatggccctcaaacatcgtcacttccagactccctcacaggtaaagaagaaaaaggtagtacctctttccttcctaagaacatataataaccagctgctgctggtaggataatgtctgtcctcttttattaagggcaatgagagcaagagaaacttaatttataatttattaatttgaaagaacttctgagttcttttaaactaatcttgcattcctgtttctttattctctgac

SEQ ID NO: 99937 - DNA, 2128 bp, Homo sapiens
ctttgtatagtggttgaattgagtaatcatgaaacagataatattttgtaaggtgtgaatctattactagaaagaccagtgttgcccaatgagccatgacatctcatatttgatgaatatattatcttcatcagaaagctttgtagcaaagacccatgggaatgggaaaatatctaatttctggcatgcatttgcaactttccattttcaggggaagtaattgtctcgaaatgaaaaaagaaacagaaatcaaaattcagacgctgacatcagatcacaaatctaaggtaagaaaatgcccatttttacagcagtgacttgcagaagacactttgtaattttttagaaggagtacctagtgtaaattagaaataacagtagcccagagctggtctagtagcctgcagctgatctgggatgtcaggggagcccagggttcatgtttgcctcagactcactggctttaagaagagccatttcatggaacatcttcttttgtcttgtctgttgaactatgctaacaatatttatgttgcctgcctcagaggcatcaaggaaaataataaatgaagatactaaaaggaaatattatataaaatacagaatatacttccctatagaaataacattaaacataggacagaaaaccgcccaaattgggaggtgatacttactccatcctaactttacatggaaatttggaatgagaaaaaattaagagctgatattctaaaagagaagcctaattactcacattttcttaaagacaggagaaaataggagcttgagagactttaatcaactttgtgggcatttggagaactaagtgttaagtcccagttaagaatgaaaacaattcttccagcaatgatagtttttaaatgaaaaggaaaaaaaaagaaaaaaaaaaccaacaacaactgttaaagaaagctcccaaaaatagctgtggttgaaccagccagcctcatctatctatatgcagctgtgtcatctggcctaatggccctgctgcatgcatggagcaggcaagatgttcaagatgttcttggtagctgtatgttttgtagggcatgaactctatagaggcagtaaggcatgtgtctttaagagttattccccactctctctcttcttaactggaatgtttgagaattagtagttgtgcaaactgtcatgattcttagatgcttggcatcaataagaaaagccttggcaacagtatcagtttgcttttgctatataatgaactgtgtcaaagaagagcacattgaaacaactactacagtttattaggtcacaattcagtgggtcagaaatttgggccatacttctgctgattttggctggagacacttgtgtatctactgtcagcagggggcgtatggccttacttatgtatctggtagttgtctggctgttgcttgttttcctacatgacctatcaacctccagcaggctagcacaggctcagtcagagggtagccacagggatcccagcatagcagaagggcaagtactttccagcctctgcttgcatcacatttgctactatctcattggctaaagcaagtcacaggtcacccagcttcaaggagctggagaaacagactccagctcttgacaagaggcactgcaaaaccccactgcaaagagcttggatattgggtggggaggactttctaccctagtgtctatcagggttgacacagtaagtcatgatccagaaataaaagaacacacagctctctattcagacatgtgggcttgtggacatgaagctggagaaacataaggtgataaagaaaatcctgatggaattggtaaaagagcctaaggcccacacaaatcagagtgttggctgagtgtggtggctcacgcctgtaatcccggcactctgggaggccgaggcaggtggatcacctgagatcgggagtttgagaccagcctggccaacatggtgaaaccctgtctctagtaaaaatacaaaaattagctgggcatggtggcacgcatctgtaatcccagctacttgggaagctgaggcaggagaatcgcttgaacccaggaggtggaggttgcagtgagctgagatcatgccactgcactccagcctgggcaacagagg

SEQ ID NO: 99938 - DNA, 1034 bp, Homo sapiens
tacaattcatttgaccaactcataaacacatcacattctggtacaagttacctagcttatgtttttgctcttaaagcacttctcagaaagtgctcctgggggaaatatgggaatatgagtaaggataaagtcaccatctccaaagctttagaagccacttcagtgattcaacaatgggtagggataaggatgccttggagaaggtttttaaaaattctccctagaggaagggcacagtgaaaggtaaggcacagttatgtgttagttaactaaattaagaaactacttggaaattaattgtgttgcttagcaacaagtttgactaaagaatgtaaatgtgctcagaattactcatcactacaatagtggtgtatgccagagctagagaaaacagtcatcttgtgtcgctagctttggagccgaagtacataatttttaaaaatcagtttgagcttttatcctaacacatggctaattcaagccacaccagagttcttgcattaaactgctagattagtgatagctgtattgattagattgtattgggagggtgctggctttttgttgcagaaattcaaatatgtcttttaaggtctaccacccacaactgacactttgagtcacaaaagcttgggaaagcatagaacatgaaaaggcttgagacctgataaagatttaatgagattcaaggaaaagacattcaagatatcatactgatgcttctggcaagcaaagaatttggacttgagtttctgtgttaagctttgctttagaaatatggcctgttcaattgcaaattcaatcccagatctttctagtatacattttttggcatttaagggtgagaaagctctcaattcacagttactctgtatggtacaacactgtcatgggcacagtgcaaaagatacagtgacttcatttctttcctcataaaaaggcaaggtctggaactatatagtataactgccttcataaccaggtaaacatttcatcagcaagaacagttctttgtctccagacaatgcaaactt

SEQ ID NO: 99939 - DNA, 1069 bp, Homo sapiens
agagagcccttgcatatcaaagaaaagggcagcaacctaaaggaaaaatggatgtaaaataagacgtcatcacagatgtatgaaaccatgctctaatcaccaacaatgacaagataccactttttagagcagactggcataaattttaaaaaatgataataaccagtgttgtgaatatgttgggaaaacagaaactcctattccacagttaggcactgtaacctgatacaaatgtcttaaagaataatttgaaaatatcttcacattttaaagggcactcatctttgaccaagacactccactcctagaattttacagtgcagatatacatttacagttatatgaagtaaaatgcatgtggcttactcataatagtgtaagactagaaacaacttaagtatctgtcggtggggagaccaacccaattaattgtggtacggccataaaagaattgttctgccaccaatataatacatgaggtagatctttatttactgacttctgtggagttggggtgggagcaagaagggactggaggaagatgcctcatttggggtcccctggggagcaaatgccaggaagcaattagaagcaaaagagatttgttggggaaatgtctgtgataggtcaaggggagagctgccgggagcaggcagaggcagccttcagactatgaagcaggtctgatgcctataaaagtagatgggtactgctctgagaagccctcggccaggccaatggggagcccgagagcaaagattgctgattagaggagccctgtgttgggcagaaatgttctagcactagtagcccattgtgctcagccattggcttgaagcatcccaggaagagcctggcctcaatgtaaacactgtggcagcctacataggtgcacagctggaggcatctggctgtcacataaaggctttcggttttacattatttatttgtattaaactttttcaataaatatataccaattgatccaaaaaatggagaaaaaagtttgaaaaaaaagttgaacataaaccccaacatttttccttcaattttcacaatacaaattgtc

SEQ ID NO: 99940 - DNA, 1040 bp, Homo sapiens
tcattctttttctctttttcaaaagtgcatctcgtagcaccaactgtttttctcggaaggaatgcttattttttcaccggacattctggctatactgcatcatcataaagttcttctgttttttctcctctttatttgtcaaactgggaaatggattcattttggttttcttcctcacaaattcttttcggtctgtctttctagccattgcagttgctagtcttgtctctttgtcagacttcggcttttaatgaaggcgttcaatgtcctgaagagaaagtaattcacccctgggctcttcatcactgtctatttcaatttatttcctcttctgggatttcccaggggcagcatcaagttcttttctcagttgggccatgcggattttctggaagtcttcctgagttaaaacttggctggtgctgatggctgcagctttggctttccactcctccatgggcatcctgttcagcttcttggagatttcttgctgttcttcatcggaagagtgttgcacatcaatctattcaccatcagcatcctgctcctcactgagactggtattttcccatccatcttcatcattttcagcattctcttctttctcaccttccagaacttctgctcctggaatgtaatctttagcatctaattctccatattcttgtactcttgcttctatggaggcctcagtaggcttaccctggaatttcttctgcagcatctgaggattcagtgttcggaagagctgaatcaaagttctagcacacatcattacattcttatccttgtgtgttttatactgagccaggtcttggagaagttcttcagtcatggccagagaacatcgagctgttttctcttttatagcattgattcctactgtcatgacttctccagaattcttgtcggtaaccaaattgtttgccacagtcataagcaatgattgaataatctctgggggtactaggtgatgagatgcttgtgcagcaaacggaggatctttgttacttctctttggtggggctgcagaaaccttt

SEQ ID NO: 99941 - DNA, 1031 bp, Homo sapiens
acacagcctattggatccctaggctcaatatgtcctaatagttatggaagtgtgaaagatgtgtgcactgcaaaatttggctccaaacatttttttcatcttattcctaatgaagcaacaatctgcagcttgcttctctgcaacagaaatgacactgcctgggatgagctgaaggtaggtaatgaactttgaattccatatgcagaggctgagggaggaattagtcactcaatagttattatgatttttttttcgtagcttccctaggtagtatagaaagcaaaaattaaaatgattgatgcaaagtcacaagtaagctaatttaaatgcctgtggcattataataaatttggcatgtgttgccatttattatttctactatttactagaaacctaaaaggcccttgacatgcgaacttttctaagaaattagcttgaattgtgtagtctttgatggtaatgtgtatgaataattcacttggaaaaatgagttccccagtcaatacccatcatccacttcttagcagagtttcctgttctctgccagcaataatacatgcaacttttatacaagggaaatgataatctatgggattggtcacaagttttaaagattcatgtatgctcaaggatatatccttagtaaatgttaaaggtctgtgtgattttttatttattattgctgggatgtaactgtattatttccaaatccattcaaaataaatttattatttagactgaaatgatttttttagtggaagtgtcagcaaaccttgttgacccagatattttgaggccatatattcgtctcagtttgaagagctaagtgtatatgaaagaaaatactaatctggctccgtgaaaacaaacttctgactgaagtatcttcccttaatctctaaaccttactattcagaatgtattaatcacatgacaaccttggcaccacacaagttttgttcttttgtaattaaaatcacactctctgtattcactatgatgctttgagagcatgattttttgtgtgttaa

SEQ ID NO: 99942 - DNA, 1042 bp, Homo sapiens
tttggtcacacatcccattttaaagatcctgacagcctccatacagaatcatgtgtcaagcttcagtgattgtggcttattcacagctattctttgctgcaacctgattgaaaatgttcagagattaggcttgacacccaccactgtcattagattaaataaacatcttttgagtctttgcatcagttatctcaagtctgagacctgtggttgtcgaatcccagtggactttagtagtactcagatcctcctttgtttggtgcgtagtatattaacaagtaaacctgcctgtatgctcaccagaaaggaaacagagcatgtcagtgctttgatcctgagagcctttttgcttacaattccagaaaatgctgaaggccacatcattttaggaaagagtttaattgtacctttaaaaggtcaaagagttatagattccactgtattacctgggatactcattgaaatgtcagaagttcaattaatgaggctattacctatcaaaaaatcaactgccctcaaggtggcactcttttgtacaactttatccggagacacttctgacactggagaaggaactgtggtggtcagttatggggtttctcttgaaaatgcagtcttggaccagctgcttaacctaggaaggcagctaatcagtgaccacgtagatcttgtcctgtgccaaaaagttatacatccatctttgaagcagtttctcaatatgcatcgtattattgccatagacagaattggagtgactctgatggaacccctgactaaaatgacaggtaaaaatcactctttgcttttgcctcttacagttaataaatcacacttttttgagcagagatatttttggtttgtgtcactgttaacatcttgaaaaattgacccagcatgtgtcagtatcatttctggcagcaaaggtttctggaaaagatcctgtattgttcacatactaaaaatgcagtgattatagccattttctatgtattttcagccccctaatgtactatatcatctaacccccaaatattttacaggt

SEQ ID NO: 99943 - DNA, 1029 bp, Homo sapiens
ggtcggtctttcgcctcctacagagagccagcctcctccttgtccccgccctcaaatatccttcagtgaggacaccggtgacctttgggggtggagagggaggcgcctacaagccccttcccctctcttcggccggacacaaagcgggcttttccacctagagtcccagcgctctcacctgcgcaccagccgtcgcgccgccccaggccgccaccgccagaggccccagaaacagatctcaagcagccgctgctgccgcggatcccgacaaccttcgcgtcgcgcgagggcacggagcacgcgcagctctgcggtcgacgccgggccgcccccactccgcttctccgggttttccgtgaagctccagccaacagcggccgtcaccggaaaaaacggggagcgaagtttattcagcgtatattccagcaaattgttgaaactgaaattttaaaagaacgcataaaatttaaataacatatcaaaatggcacagcttctgccttttggtgagcgcttgacaatgatttattgaatgaaagaaagaaatagtccactgcgctctgctctctgtcctgacatgaccaattacaaagcgcttggatttgtcgctcagcgccagtatcccgcctctctgtgcggttgtctggaaaatcaggatttttactctcccgtaactcccgggatcgggtttggaaaacggacatgcgccgtgagagctagttgccttctactaaagcatccgccctcagtccttcctgagggcttacagggaagtgcggagtttcgcagctcgtactcttcacagattagataattcacccggcatttccccatcctgcttctgggttccaggacaaaacttttattctcttttaacattaaaaaacatataggaagttatgttcaaacatggctatttttattaaaatttatccggcactgtgaaagctacctttcctttctcacaatctttcgcaccgaatatatgttccattcttgagctagtcattttccaatgttaagaaaacac

SEQ ID NO: 99944 - DNA, 1044 bp, Homo sapiens
gctaatttttgtatttttagtagagacagggttcgccatgttggccgggttgttctcgaactcctgacctcaggtgatccacccgccttggcctccaaagtcctgggatcacaggcctgagacatcacgcccggcctggcccattctttgttcaacccgtgcttcttaactagattcacagtgtattatcaatttattgcatgttctaaatgcaatggatatttgacaggtttttttctgtgcttttagttcattgacttgatgttagggcgtcaatttagctttccaaaaagttgaaaagagattttgtcatcccaatatacttatatgtaatttctgttataacatctgaaatgtagggttttctctgtaagtcttagcatccaatttaccactggtttgcgttttttttttaaaagttgtttactgtgcttcttgctttctcatatcttgtatgcatatttgtacttttaatttgttaaaagttgaactcaaaagtttgcatgtggacagcagttcaatactgacttggaaaaccttgggccttggtttaccaaagctttttgtggcaccttgctttcttctgtcttcccattttattttacttcttttatttttattttttgagacagggtataaccctgttgcccaggctgaagtgcagtggtgggatcatagctcactgtaacctccaactcttgggctcaagcgatccttctgccttggtctgtcaaagtgcaggaaagcaggcatgagcgactgcacccagctgccttctgtctttctttaatgagaagactaaatcaagagttctcagccttggctgcacgtaacaatcacctgggagctttaaaaacagactccagccctgtatctgcagagattgagaccctctggatgaaattaaagagccagtaaggagtatgagaaaacagaaacaacttttacgttttatgttgctatgttagattttctctcccttatggtgttacttaaaataatcgggattttgaaaaccatgaaaagatctggattaagaatgta

SEQ ID NO: 99945 - DNA, 1205 bp, Homo sapiens
ttataatatactctaacttagcatacttatgtaaattatatactttcagatatttggaaaattgatctttttgggttgtcctacacttcttaaaaacaggcaacaaaataaaaatgccactgaatttagacttgaattgccagctctggtagcaaaggctttttaacatttattctgtaaacctggtcactgagcttgttgcatcctgctgaaagcaactttgagggcctaggaaaataatcattgaagatgcattgttgctttttgtgtgcgtgtgtgcacacttgctttttaatgatcagtaaaaaaaatttagaaaagcctcaggatgttccttgatttaaaacttaattaagatagaagctaataatatcttttccatttaaatgaatgttaaaatgccagtattttaaagacaaagaaatttatgcaccaaaaacatcatctttgtggtataaacttcaaccacacctctaatctgttgcccattattttcaatatgaaacactaggatcttctgggtatgtgtttatatgaattacaactctcagctttggctgtatgattatatataactgaagtattatttatttggtgaaataggtccagagtgcttgacctcttttttggaaggcttactgtggaatttggaatttagggacagtaaagatacgttggataaataggtataaatctaaaaaaaaacaaaaacaaaaacaaaaaaccacattctgatttagtaacatcaatggacccaagtcagcaaacttttaatgcataacagtgccacaccccaaatattaaagaggagatgaatggaccctgtccctgggaatcttatagtcagggagaggaccagagttagttataattcagtgggctaagcgtgagagtagaggtggttcaggtgtgtcccagagaaggagcaattcacttggttcatagaaggctccaagaaacaggtggcatctgagttgggtctcagaggataactcaactcgctttaggagaggacattccacagtgcggcatgcatgggtgaaggcagggagagctggagctgcatgttcaaggacatgtgccaggagttggttatgtggtggcattacaggtgtgaagttgcctgtgccataagatggaggtttgggcaggggcactgatattgttcggatttgtgttcctgagcaaatctcatgttgaattgt

SEQ ID NO: 99946 - DNA, 1029 bp, Homo sapiens
tctcccattctgtaggttgtctgttcactgtgatgatagtttcttttgctgtgcagaagctctttagtttagtttgatcccatttgtcaatttttgcttttgttgcaattgcttttggtgttttggggacttgacaattttaagtaggcatatggaaaatttatattttgagaatgagacggcggagaaaatgttcatatggttatgaggcgttccttgcttcatcttttaaagatgctttttggtcatcacttggtctttactgttaaaaactatcattcatattccatgtccatggcttgatttctcattatgtcaaagcagataaaaggttgaagcaaaagaagtaatcagcaaattctctacctgggtaaatgccaggagagttctcttgcctggttgccctctttcattttcctcttataaatgtcccttgtttgttccttgatggctggggttgagaccttctcaggtgtggatagatgggaggctcctgtgtgagggatagtgggaagggagaagagaagaactgatgatgagtgcaagatcttggagatgctttcatatatgttggtgtttctttaggacattttctgtatgctagtcttaccataagtgcaagttcaaaacatcaaaatataaattacaatagctagttggccagattagatactatgtaatattatagctctgtcttatttttaaccaagtcagtgcttatttagatttactaacatatttataaatttcattgctttcagttgttttttgtatccatatatatattctttagtatttctttctgtgaaggcatgtaagtgatgaactttcactatttgtgtgtctaaaaatgtatttggtctcaccctagaaagatatttggttggttttagaattctaggttgagcattattttccaacaacagtttaaagataatttttaattttcttctggcatcttttattactactgagaaatgttttcattatgtattgatgcttaaatccaccttaaaacttagtggcttg

SEQ ID NO: 99947 - DNA, 1407 bp, Homo sapiens
accttgctgctgcttttttagtttagcatgtcaaagtgttatatttctgggtattggtttctgaactgcaaccaaagtaaccagtcctattggaagaagacagagggttccatgaaagatttcttcaacaaaaaatgaaatgaataaaatacatcatgtatttaaatgcattgagaagagatttttttaggcctgtcaggtagcatgggaatgatttagtcataggaatatagaaaactaaacaaaagaaaaatgatgcaaccctcagttctcagtaaacaaaagattgtgcaagataggaaattaagcatagtatactacgtggctcaactttttgttcttcttgttatagagatggggtcttgccctgttgctcaggctggaatgcagtggcacagtcataactcactgcggccttgaactcctaggctcaagtgatcctcctgcatggttcagctttgaacagaggttacatttcataatattgtgaactccaagttttggaaggctggggaaggaaacatgtgggagggcaggtataaggattaagtcttcattttccacataaagtatataaaactgaaataataagacattcgtaggataaacatagtgtttagaaatatgttggcaaattaccagatcaaaaagctaagtttcagtgtggttgcccatggtgagtgagagttggagtgagagagggggctggatgaggcagaagaggccattttgtttttttgtttgtttgtttgtttgaaagatggggtctccttatgctgcccagtctgatcttgaactactgggctcaaacaatcctcctgcctcagcctcctgagtagctgggactacagatgtgcaccactacacccagcttgagacctcactttgatatgtcgttttaatatgtgtctatgcattaatataaaaattaagtgcataaataaaatgtaggctgcgtacagtggttcacatctgtaatccctgcattttggaaggcccaggagggaggatcacttgaggccaggagttagagaccagcagcctgagtaacatagtgagaccccatctctaaattaaaaacaataataataaataacatttaaaaggaattaattaacttatgcaaatttttcacatagatgcagccacttttgactgggttgaaaagtacttggttagagcagggtttcaaagtaacagaaaaattgatgaacaccaaatagtttgacacttcatctgggttgtttattctaagactgcccttggaatggcattaattattcatgcaaacgacttacccatctgaccttcctgcatatgaatactttttttttgtttttaagggctgtggttctggccttgaattcttttttttaatcactattttttagagacaggatctcgtta

SEQ ID NO: 99948 - DNA, 1010 bp, Homo sapiens
ctaggcttttgtcttgctagtttgcctcaaggaatcacttaaatcctgtgtcctaggttttttcgtctacttaaatgggaacgtggtactgactattatcagtgctcatttgaaaatggctgcgttgattttgtgtatcacattgaaaagatttatgcaattattttcatatcaattgagttctaggtactgatttttctacacattttaagaaagaataaaactgaagtgcctaaacagaataaatcacaaacattttaaatggttatattccttactggaaataactttggagtgtgcaacctttgtcccgaagaatgattttacagagatttgtccctgtgaaacttttaaagtgaaagaagtacctctatatttcttctcctgatacttaaagtctgcatcttccaattcctccttaatttcatgtattccttgtaagagctttatgttttaaagacatacagggtcaatgcgagtttgcagagtggttgatgctatgcccaaactaacataggatgctgttttcccattcagtatcattgttctattgctttgctcatgctggaagctgtatttaagtaagtatgtgctgatttcgtgaaagaattgaaataaaattagtaaaagttttcacaccagcagtcacccaatgagttttatctcaggcttagagcttttagataccttctcactctgtaaggcatctgctctgagtgttgatgactttgaaacaaagttcttggacttgaaattaattttttttttctaagagttctctctgcctttctggccagacacccagttttctaggcttcattttcccagtcctttcctcatgtgataatagataaactagtctgttctttttttggatgactaaaaatgtgtaaatacagctctggcttcttatcctcctttttagtctcaactttccacctgcctccaagaagtttctgcctacattgatccctaaaacttcaaacaaagaactgagtttatcatggctt

SEQ ID NO: 99949 - DNA, 2439 bp, Homo sapiens
cacaccctgggcttgccaaatgatgtctcgtccttcattctttagtcacttactaaacgcattcctgctctgcagagcatcttgaatttactcctcttagaaattcaagcctttattgtccttgtttttatgtccatgttaatctctgaggacctctgtgcctctcttctcttaccattccagttcatctagacaagtgccagggtaatgttttcttaacatcatattcatcatgttacttccttgcttaggtgatcagggtaattccttttgtttaaatggatctaatctgaactctccagctagacgtaaggcattctgataattactctccccttcctttttaacttggacccatgtttgttttcatcttggaactggggaacgtggcccacttattcctgtgaaactaatgcatttgcatttcctgcagtcatctggcttttctgtggttttccctctgtttgctatctctcaccttttcttccttggtccacacccttcagctttttccaagcttgaccagtgaatgacttgctttttctttgttacacatctaaacctttcccatattgatttctctcttgctatgtgtttttttgactgttatgtgcagtttatgttatgttttatatatatttccaatttgttttctttcctaagaacatcatcttgaggtgatatacatctgcttttatatacattatgcctagccacattccctgggaagaaggagctgtcctatgcttctttcatatctgcacagaccttgaataatctaaagcaggggtgtccaatcttttggcttccctgggccacactggaagaagaattgtcttgggccacacataaaatacacttatactaacaatagctttaaaaaaaaatcgcaaaaaaaatctcataatgttttaagaaagtttacacatttgtgttgggctgcattcaaagccatcctgggcagcgagttggacaagtgtggtctaaagcatttctgaagtgcccagtaccccccactttccttgtcccaaagatgacaagtttcttcgtcttggctcatagagaacagggaagtcactccagctttggattatttcttactggtctttttttcagttccagtcagggaatgttgtaatcttcaatttgtggtatatttgtttttttaaaaaaaaaatcatctcaacctatttctccttttaggagtccacagttccactttgaaaatatttttaataattcttttgaaaataatctctattaataatcaagatgacaatccatagaatttgcttctatatgcttcagaaaagtaaaatgtttcagtataatggttttgattgtctagacattatattttattttaataatttcttagtgttagaccttgatacttttaattttttccaacatatgtacaaagcatgtgtttttattacttattctagtgtaaaaattaattcttaccagaaaagtaaactcaggatctcttaccaaatagatgaactcagtaagcaccttggattctctctgagggctgtagggggcatcattgttccaatgttttataaagtatcttcccgctgtgatctaaagaagcacagcaactaaagtgcttttacagtcgttggctcgtgcccacgttactatgacatcctaaatgcctgtttgtttgcctggtggttgtatgtgcacacttgcatccctagccttttatgaatgtgtatatttagattgcttctgtcatagagtcctcctcactaggatgtaccaccaccaaacaccgagggaagacagtcccaacgacgaaaactatccaaagtggccccagggaaagcattctcagagtgacacaagactgcctcttcagtacttcctttccagattcaggaacctggagatgatggtcggagagtaaggatcctctttgtcctttgaaagctttgggaccccagttccgccctggtcccagcagtaagggctggagggggccagtcgagtctggaaagaaatccttgaagtcatagttttattaccattactgctcatccgactcacctttcctttttgttattattactcttagtttgggggatgcttggttgagaaagtgagggatggggtagcgattgagagtgtccttgcaatttacagtcccagagaattccatggaaatgacattccattgaaatggcaaaaacgtacagcagcgtagccgtcattagccaaataatgtaacgatgcatagtgtttgctaattgtgctttgagatacttctctagtagtaggctcttggaatatccatgattaagtaatacaggaagctaggcctctatatgtgtcactttgtcccatgtgagtgtcatgtgacaaaaacactgattttcagactgttggaaataatcaggttattaatagttaccttaaacactcacatac

SEQ ID NO: 99950 - DNA, 2129 bp, Homo sapiens
atgttgtggtttcacttttgaaaactggatgactttgggtgaattttattacccctttgagcatcttatttcttcagctataaggtaggattaacagcagtgtctgttttacagggtttcttttggatatcaaattaatataaaagacataatgctgtgaaagtgggaaaataacattttatgcatgtcttaggctgtcagtaattattttattatcttacagtgacatgctgtatggtatttgagggacttggccttgacttatttgttcctggtctcataattcttgggagtgaggagtagtctaattcttttcatatgtgagggctcaattagcaaatctttatttatcctcatcatgcaaggccctgggttaggcactatagacacagatgaggctgatgattgcccatccctaacctcaggtagtttgcagtgagaaattaatgtgtcaaactaatatcattaaataaaggttagtgaaaaagagataccagagcacccagcatagctgggttatgaccagatgagcccagtaatttttttcagacatgtttctgaatgggatgttgtggaaaagccatagggcagccagtctgttgggtgcactatttgttaatcagtttatactttgggctacagtggcaggtggtcaggattagaagttagggttgttagattttagtccttgctattgattcctatctaggggcaagtcagctagcctcttttgtttccgttatctgtatctgtgtgacaaagaagccccactattctcatatttcaatgggtcagaaaatccagctgggcagtttttctgctttatttgtctttggctggggtcaatcactcagatgcatttggttactgaccaggctacaaagctctagaagacttcactcacatgtttagttcttctcaatgataccctctctcttcacaaggtgtctcatcactcagtaatctggcttgagctcccttacaacatggcatctagcttccccagagcacatgaaagtggaagctgccagcttcctaagggctacctctggaactggcacactattatttccactgtattctattgggcagcaaatcacaaggtcaagaggagaggaaataactgcctcttgatggaaggagcagcgtacctccagaggagggaagggattgttggtggccatctttggaaattgtttagtgtagttttcttatttgtttattatagttttcttatctattaaatgagatgttgaattagggagtttctaagggcctgtcaaactctacatttccgtaatactatacttttttttttttttgagatggagtctggctctgtcgcccaggctcgagtgcagtggcacgatctcggcttactgcaacctgtgcctcccaggttcacgctattctcctgccttagcctcccgagtagctgggactacagtcgcctgccaccacgcccggctaattttttgtatttttagtagagacagagtttcacagtgttagccaggatggtcttgatctcctgacctcgtgatctgcgtgccttggactcccaaagtgctgggattacagacgtgaaccaccatgcccggcctggtaatactatacatttttatttaagggatttttgtgtgcatggtataatggaaataatttggcctttggaggcagaaaggcctgggtttgaaccagggccttaagattgaccagcaccttgggaagtgacttgagtctttctgagcttttgtacacatctgttaaataatagggttaattaaataggattaatgttaactcacttctataataattgtccatcttagcacagagtcacgacccagaaggtgttagcacccatcccttttcccttctttgttacctgatacaggccttttaaagccaacaatagttaaagatattcattgaggtttttttgttttgttttgtttcattcaagtataaaaatgtttaggtgtttaattgtgttttgcagatgctggcttatttttctaagaccaggagttcaaacaaaactgttaagtttgtttatctgttttgttgttataaattgtccttagaacattgttgctattaagaaagcaggcttaaaaataacttaa

SEQ ID NO: 99951 - DNA, 1020 bp, Homo sapiens
ttcatcgattgtggcacggggcagtgtcacatggtaaatacatggctgcccatgcccacccttgagcatgacagctgtcagaaagaggggcatagattcccccagaagttacatgatagtactttacaatttagagactttgctggaaagtttctttttggcagtctcatagacaggcctttttacagaacatagtaatgagcacttacagtttgtagagaggcctcgggggcatccaagaggtagctggaataatctgacccttgagaagcttctcttggttcctggggatgacgatggtcataattaactgctttacttacaacttggcaatgtgttttattatcggtgtgcattttgaagtgttttaaggtttttcacatccctcactgtgtgtgtgtgtgtatatatatatctgttatgataattaaaccaaatattgtaaaagtcaagaaaagtgtcaaagaggatgtcattctactaaacttttttgaatggctactctttgatgatcttgtgagttgggagaggacccaaccttcagtagcatgaatctggtcttaaatcttaaattttgaagcactgaatgcattgcaaagtgtcccatagtcatctatgagtgtgcatatttgcttttgactcagcattccatttgtacttcctccacaacaaaaaatgcattgtagctttagtatttttaattgtcaccaagtagtactgctagccattgtgcaaagtctaccaacagctgataaaatgattacatttttaaaggttgctggatggaatcagatgttgctgtatcagttcctatgccgcgtgtgtctgtttcacttcccataatgactgattctccacctgccatgacagtgcattcttgatctgctgcgccctccttgggttggggactggaatatttatttttaggaaaagttaaaattatccagagaagggtgctttctgtaaaatttacatgaatcagcctcttattgcagagatcatgggagatgtgtgtgtgtg

SEQ ID NO: 99952 - DNA, 1036 bp, Homo sapiens
aactgcaaccccagccccctgggttcaaacaattctcgtgcctcagcctcatgagtaggtgggattacaggagagtgccaccatgcctgactagttctttagtatttttagtagatgcggggtttcactatgttggccatgctggttttgaacgcctggcctcaagtaatccacccacctaggcctcccaaagtgctgggattacatgcatgagccactgcgcttgtccaagaaaggtaattttgtaattagtatgggatgagttagtttgttctctttagttttactagcaaacaaaatgattatcaagaaagttctatagtattgattgggtaatacataaatgaagaattcctcatgaatgttgcaaaaatgcaaattaattttaattacatattacaatttaattttaaatttttaaatgtttaattacatattaaaatcctgactataaaaaaactagtagcaaaaaggaaaccattttaagataatgctttcccaaaaggagtctatgataatgatggagttcaggccatgcgaccccaaagtatggcacatgtgaaaacagcagaagcattagttcattttcccctccccccacccttctcttctaaaggaggtcataaaacctaggaaggagtttctgaccttcctctgaagcaaatcgtaagaccttatttgagaagtgccctctctatacccagaggaaaggaacatccttatctctgaatacaaagggtcacagagaaaagtctgaacaaacatactttgctatgtttcctccagtttattaccattagatcatacttttaaatctaatcttacttatccacaactatccacttattcatcaaacctagcataaaaatatacacatttactcctatattcagatcttcatttccttaggaaggctcccatgtcacacttatattaagtaaatttatgtgcttttctctcgttaatttgtcttttgttttaggggcctcagtcatgaacctaagataagtaagggaaagatatttttcctccccta

SEQ ID NO: 99953 - DNA, 1052 bp, Homo sapiens
agtgtatagtgtcactgaagaaatagccttcacttcctcctttagctaggagtttcattcacttatctaagaagtatcttgaggggagctcattgctttggtatctattagtagtatgccaaaaagaaatatggccagcttctcaatggtcagctttttagtaaatagatgggtgaagacttctctctgcttgtcactgtgtgaggcacacagtgataccaaaattgtgaggtcattgagggaaaggctatgtctgatgaattcgtttcacatctccagtttttaatataggtgctccataaatatttaatgcctaagtgaatgaaagaataagtaagacatagtcctcacccttaagaaaagatatgcttttattatcctcaagaaaagtatatgctagttagacaactaagtcatacacatatgaaaaagatagctagtaacacagggcctcatataatcccaagtattcaaattgtccatatagtgcctgaagaagatgacagtggcttggactgctcagaaaagcctgtggagttggtggtacccatgtgggtacacctgaattcctgacaaagaacagagaatgcacacagggagagtgcactcagaaatgaaggtagaaatgaagatggcttgaatgggggacctcgaagagacagggctcactgaagccaaggggagacctgggaaacagagttggatggaaagagtgactgaagattgtagaggggctttaaagcccaacatacgagattagccttatatttttaggcattagggaatcaatgggttcttgagtcaagaaatgattacattaaaatttacaagcttgttggggttattgattgaccacatggataattgggctgttttttgtatctcttatgtgcaagatgcttatacagttgacccttgaataacatgggggttagggctactgactctctctatgcagttgaaaatccacatacaacttttggttgggcatggtggttcatgcctgtaaacccagcactttgggaggctgaggctggcagatcatttgaggc

SEQ ID NO: 99954 - DNA, 1441 bp, Homo sapiens
atgccaggtgggcaagggcatccttggatttaggaagagtaggaggctgccttttgcattagagctgcctctggcattcccagggttttgtctggctgggcccaagggctagaaggactggaggagtcctagctgtgcctatcactggccattgcccctctgcagcagagtagtcagtatgcagcacagcatctgcctggcacttaagatgtgcatctctgtgggacacctgtggcttctagcgaggacagtggagggagagtggcccacactagtctctggactcttatactttaggccccctacttctagctcagtgatttaaggagaacaccaagttgtacataattttcaaagggaggggagttgccttctttagataaacctatgccaaaaggaaatctttaaaaataattcccatcagctcttattatttctgggtggtatttttttgtacattttccaaagcagtgaccctaaccacaatgaggacagtcatttggagcttttgcaagctactcattcaaagaaaagtgcaaagaagggtgcctctaggtttggttacaaaactctaccggggagtgggaggtgagagtgggaaaccggtgaatatgcctcctggccccaactttttaaaatgtatcctttgaggtgtattctatttggtgcattttcccagattttgaatgttgccccaggacaactgtcttaagttcgttttggcatcaggacaaatgagaggatgtttcctgtttgcctgactcttgccccaacttctttctctgttctgttaagctcttggctaaattctttcctcttgtattccacattttaactgacattagggcaccaagtgcaaaaatctgcaaacagttagctttcctgtttgagcattctggtcagattatgctgaagttaaagttcttgtagcacggaaggatcaccctctgtacaatgcattaagtatttaataactgtactaataattacaaacacttttaatgggccacttgggagccttaatgtggttaaaaaatgtatttcttctctgtcaagttaacttgtgtcaaattgagagaaattcttctaagcagctttgaaaggtttgagcttcataagcctaggagcaagtagcatattgtgaaagtagtttttatgtaagaagagacaacagaaatagggtgagtattaatgtagtgctttgtacatttcctttatagttttgtattttttaggtggagaagtgtcccaccaccctgttgcatccgctgtatgtcaggttaagcaatttttagtaggattggcagcaaaaccaactttggaacacaggactctctggcttcaagatctcttctttgggaatgtggacaatttggatttggccatttttgaagtattttagaaaataggacactcttgaggggcagaattgaaggtcgat

SEQ ID NO: 99955 - DNA, 1815 bp, Homo sapiens
gaaggcttgcctgtgctgcctgccccagagtaaggcggtgcagtctcagacgtactggttggagatttgaagcacagtaatacactggctggtcctttcatttgttggttattctttgtgtttctggtatgagtttgtacgtttagataatccagtgaatctttgagctttttctttgtgaggtctgtttacacatttggaaatatcagtgaatatagttccattggtgttttgcggctttcagcttttgagttccctctgaagctactgccatgacgttaacctttgatgaagttaagagcatcagagggtagaagaaaatgattaccagtggttaacgatgtcccgatttgttaggagtttgggaaaagtgcacatttccatggagtctgcgtgctcacttggtgagaagctccctgaccacacgtaaattgagaaatagattgcaaaatcagttttgattaaaatgggaatttgagcctgccactgagaagcaaccatcttgctataaattatttatggcatgagcataggctttagtatagaggctgtaagcctttttccatcttgctttaaaaattgatttgattataaaaagaaaattaattttgctattgaaacaaatctttaaaaagggattttaaagtgactctaaggtagaaaaaaaaaattaccaagactcttccaaaaaaccaacttcgtagctggattctacaaaaaaagcataaatgctgaaccctgattaacacactttatcatattatatacatgagatatttcttacagagagtaccacagtggtgtaaggagcatatttttgtgaagtcctcagctttacaaacatatttagatttattcctgtgctaactaggttatatcatatctcccagtttagactgcacatggatagtccactgagcaatgtgacatgaagatggatgggcctagtagacagataccaggccgctgccaggcttgcagcattgactcctcttctgggatcatcacatgcccacttctccccacccatctcagctgttaagtcttgctgtgggatcagaccctcaccccacctcctacctgccgtgacttgacagggaagttcatttgggagattaaaaatgtagatggacagatacagtttcatgaatgattggaaacatggtatattctctgctttcattgcatagggtttgaggtatatcttgtggaccaacattatctattatatgtcctctatggtcttatttgtctttgcctccttgatctgacatggcctgaaagaagtgagctcagtcttctatgactcttgtgtttctctttgctgtttttaaaaattgtacctgttcaataaatgtttattccttatttcccatgtgccaggaatggttctcagctgtggggacccaattttgaataagaccgacaaagtccttggtctcatggagatggcatttcagtcaggggttagacagacactgcacaaagaaagaaacaagacaatttcagataccgagacgtgtgacaaagaaaataaaagatggtaacttggtggctagtgactggaggtggttcctgcttaaataggatggtcagagagacttgaactttcaaggtgaactctgagtgaaaagagagagacacctcctagcgtctggaggaagtggttctagcagagagaacagcaggtaccaagcctttgagacagaagcaaacatggtgtatcagaggagcaagttttacagtcttttccctgcacatgtatgctgttggattctcaggatagttttcatttctttatagcttttattctcc

SEQ ID NO: 99956 - DNA, 1032 bp, Homo sapiens
ctggcgtctggggtatgctcaataaattaaaaacgagtgcatgaacagaggccagcagggctggagcagagcacaggggacagtgggttggcatggtgctggagaagctggcaggggccagacctcacagaggcttgtaggttatcatgtacttgtaggagaccacataggttaccatgaaaggagaccacataggttgttatgaaaatcaagataatttttagagcagaagggggagctattaataattacgcctggatagaaaggcgtaaaatgcaactgacttgggtgtaccgggatatggtcaacctcttaccagcttcctaggattttagtctttattctgagaggagtggaaggcccctccaaaggtttttagctgggatgaggtttggggtgtggaggcagggcatggcatgatcgctctggcaacagactggtaatagattgaaagtgagttgttgcaggagagagaccagggaagacggttgcagaaggccaggctggagcaggtgatggcttggcctggaggcatggaaggggttagaagtgatgaattgcaaatggctgctgaggaagggaagtgttgaggtctcagaattggataagtcctagtgccactggctgagtcaaaacaggaggagggagcaggtttggaaagaacgtgcaggttttgtttgtttttttgaggcagagtcttgctctgttgcccaagctggagtgtagtggtgtgattttggctcactgaaacctccgcctcctgggttcaagcagttctcctgcctcagccttccaagtagctgggattacaggtgcgtgccaccatgcccagctaatttttgtatttttagtagagatggggtttcgccgtgttggccaggctgatctcgaactcctgagctcaggtgatccacctcctcggcctcccaaagtactgggattacaggcatgagctactgcgcccggcccaagaacatgtagttttgtctagggtaagagtcaaggtatgaacttaagaggtttcatccttag

SEQ ID NO: 99957 - DNA, 1120 bp, Homo sapiens
tatggcgaagaaactattgacagtggtgaaaaaacaaaaagccacccttttctgtgataattgcttttaattagcttttggagctcactagaaaaaagatccccaccccccaaaaaagattttataggataatacattttcattcaaaggataatattatcaagactttgctgtcattattttgcaaagaatacctggtgacctaaagctgagaaaaggaaggcacaaggttctgtatggtgggatttatcattcaggtaaataactgtggactcttctcttcaggacttttaaatatttagcaagtcaatcaacatctcctactgccacttaccttcatataattccactcctagcttactaacgcatgttgctgtgattcaaaactgttcactcgtttccccaaagtgaccaatagtcacccaaggggacctcaccccaaaatcttctgacttgacttaaattaacaatgttatggaatccaccattccaggcctgttctccattccctttcggctttgccaccttagacctttatcggccttagacctttcttgttaatattgagtccgttttgcccaagattcagttaatttggaatgctttagaataaagccctgggtgtgtgaatcacctcatagccaaagcgtgaggctaggtttttgtttttttaggagccacatgcagctgcgtggatgctcatagtacctacttgagggcagcagggcatgacttagcaaagctgtgcagtgcatgacaggacctgcagagcagtgctgcactggcagctgcaaggggcaggtcgctgtagcaggctgagcttgcctctcaaaaccaaatggtcggtttgctgctgcttctttaatttgcccttttaaaatgtatattggccaggtgcagtgacacacacctgtaatcccagcactttgggagcccaaggcaggcggattgcctgagtctaggagttcaagaccagcctgggcaacatggtgaacccccatctctataaaaagtataaaaattagccagatgtggtggcttgtgtctggaatcccagctactctggaggctgaggtggggggatcacttgagcccaggaggttaaggctgcagtgagagt

SEQ ID NO: 99958 - DNA, 1090 bp, Homo sapiens
gattacaggcgcctgccaccacgctgagctaatttttgtatttttagtagagacaggttttcgccatgttggtcaggctggtctggaactcctgacctcaagtgacccacccgccttggccttccaaagtgctgggattacaggcgtgagccaccacgcccagccacatgcacacttgttttttgagacagggtcttgctctgttgcccaggccagagtgcagtggaacagtcgtggctcatggcagcctcaaccacctgggttcaagtgattctcccacctcagcctcccgagtagctgggaccacaggtgtgtatcaccatatctggctatttttttaaaaaaattttgcagagatggagtctcacgatgttggccagactggtctagaactcctgggcttaagtgatcctcctgcctcagcctccgaaagtgttgggattacagacgtgagcctccatgcctggcctgcatcacccttttttattgggcagcataaaagtgaccttgtggagttgggggtggcaaacatttgagtcccaggttcgggcaccgagcagtctggctgcttaggagtatgctggacaagccagttgcccaggacctggaggcttttgcagtcttccagctagacctgcagtcggctgagttcaggaggatcctctctccccagggactaggagtcattattcccagatggccttggccagcaaacccagagagtgcccatggtcattgatcagcttgtcactctcccctaactccatccccagagtgtgctgctgtctcaccctgggcttctgcacacactgcttctgctcccctgtgtgtgccctcctcatcctccagcctgtgctcaggtatcacctcctccaaggagccttatctgattctgtgtagcttctctctcaagagcacttcccttcctctctccctgctcaccctctggtgtagcagcactcattgttccagttgcttccctgcctcacagataggcttcagtttcattgaggacaggagtcttgtcctgttcagcacccactgcagagcctgtcagagcacaagtgttgggagaaataaatgaattgtt

SEQ ID NO: 99959 - DNA, 1093 bp, Homo sapiens
agacttttttttaatgagttgttccagttagctcagagccctgccctctcattagctccatgaagactgatgacttattactacatattccaaagacaggtccccactggggtcaggtagaactggttggcattcctgccccactaggagtaggaggaaaagtaataggaaggaaaatcacttgcccttaaattgatgtggggtgagattaaaaacatttcttttggtgatctgttcggtcacagtatttctaacgatgacaactggatgggaggcctgtagttccattttacccagcagaagagaacagtcctgacccagtgaaagtcatttattccagcatgttgggaacatagtacctggggcactggttttatattgtctgaacggtttagctgccacatagcattgggtaataatgtattggggtgagggctggggcatacagggagacagtgagacccctacaaggctgtactttcctttgacacattccaggtgaagtcttagaaggcagcaacttctcctgtgtttgacagataataataatcaggaaagctctccctaccccccacccccaatataacagtggctgcttctcataggagtaacatacatatttttaatatgtaggatgacaaggtatagtgggaactgtttaccttagcatgtactgtttgtttctcaagaatttcaggtccattacaccttagcaatgaaaagccttctcttatctaggaagtacttgtagcattcaccagcttgtctgttccttttaattttttttttttcctttggccaggacctcccatcataatgcccggattttcaaatttctagtaattgagtttcacattcctaatattaacacccataaggaagctggaaggagaaaatggatactagttatcttaccgactaaatatcagtaagagccctttgattttgaagtgtttgaaggatgagtgaagaggccttgtttaggatagtacactgtggtctaacacattgggaccgtgatttgctacctgaatatcttgggaatttgggggattctaacccaagtgttgattaaaaacaagagagctttcat

SEQ ID NO: 99960 - DNA, 1034 bp, Homo sapiens
tcagacagagtctctctctgtcgcccaggctggagtgcagtggtgtgatctcggctcgctgcaacctccgcctcccaggttcaaccgattctccacctcagcctcctgagtagctgggattaaggcatccgccaccatgcccagctaatttttgtatttttagtggagatggggtttcaccatgttggccaagctggtctcgaactcctgacctcatgtgatccacccgccttgacctcccaaagtgttgggattacaggcgtgagccaccgtgcctggcctcaattctgtttctacatgtgtttccatatgccaatactgcactgtcttgattactgtagctttatagtaaatttgaaattgtcttctcattcttttaatggaactattttttttttcttcccagcagggtcaaagctggcatttactagttaggatcaagaatcttttttaacctagccagtgcaaacatgattttaaattgttataaatatctgaattttaatgaattaataaagtaccattgattttgccagtggtcttctccagagatttagattaaattaaacctttcacaaatttcttgactctaattgttccattttaaccaaatcaatgaagataaaagttatcctcattatagtcaaggtcttcataggcagaaaaactgtggtgagtcaccagtatttgcaaggtatgactgagggcactcatgggtctttaattctcattcagaatcctttccctcaggttctaaagttgaggccaggttaaaatctaacctcctttgttcacccttccaggcttgtcccccatctctctctattattctatgcattctgaactctaggcgtcagtctaccctaccagggttgccaggagccaaaaggacttgtctgagtttttgcacagatatgaatgcagtgccctccgcttctcagtcccagcagaatgctcctgatgctttaatcctctgcttgaatgtttcccatccttgaggatctccctcctcccaatttggtttgttactcccc

SEQ ID NO: 99961 - DNA, 1006 bp, Homo sapiens
ccctttcccctttcctttcctttcctttccttttttttctttctttctttctttctttttttgagacggagtctcactctgtcacccaggctggatggagcgcagtggcatgatcttggctcattgcaacctccgtcacctgggttcaagcaattctcctgcctcagcctccctcctgagtagctgggactacagttgcacaccaccacacccagctaatttttatatttttagtagagacagggtttcaccatattggtcaggctggtctcgaactcctaacctcaggtgatccacctgcctcggcctcccaaaatgctggaattacaggcatgagccaccgtgcccagccactgcacaccttatttctattggctttccaaacagcttcacccagaaatctcattgatcctcatctctaaagcttggtttatcttaccaagcctacctaccctctctataccttaggaagctaccactcatgtagtcaacaaagttaaaaaaaattgtcattgtcatcagtcttctctgaacacgtttcattgacaaccaagcctgtctctgattttcatctctaaagtgtcccttgaatatctctctctcttgttagtcctatggctactgatgatccttgccttctcccacttgactttgttaaaagaaaaactttagacaaaataaatataacagtttatttgagcaaataacaattcatgaatcaggcaacactcaaatccacaagagattctgagagctccgttccagcagtatgggcagggggctttcataggctgaatgtggaggcaaagtaaagaaattacttgattggttatagctaggcatttgccttatttggatatggttcaatagaaagtccctagttaatataacgaatttgctagttggttatctgcgattggctgaagctccattcaaaattaatcagtcacaaggaatgcctctaagttaagttttggtttgcttatttatgtaagggttcctagta

SEQ ID NO: 99962 - DNA, 2584 bp, Homo sapiens
agacagatgagaaaaggaaagatccagatgtcattaccatcttgccttcctttcattgaatgccgaggagtccagttcagtgatttattcagtctttcccaatgagaagtcaatggttttgttttaagaagcagcaataatagattactatgagtatggtgtaattttaccatctttattgtatatttaaccattttcttaatagttggatcattaattcctaagaaaagctgctgttttcccagcctgcttcagattagtagtttgccctccagggtcggggagctctctaagactagctaaccaaggagatgataagtaaagtaactaggaaaaacattgataggtcacatttttagattttatctaatattcttcctcttcctctaaagtgttacatgctcattttgaaaacattgatcctattttctaaataggagttctaatcagaaaacagctgactgacacagaggggaggctacagaggttctgcctgggggtttcctgtaatgtaatggtcccggggcgcaggtggaccaatttgcagcctcatcagctctccctagagctttgcgctcaccctgccctattgacggcaaacaccgaaaggatgggaggagagaagagacgtatgttttatatggatgtgcatattgcagtaacttaaaatgaacaaaaatctggaacaaccattctgtgtttatagttttttgacacctttaaacttgtttttcttcattttatacagaactctgtgtattccctgacagatttgtggtttgtgtcagtcagcttgcattcagtcgtgatcttttagcaagtcagaatgaagatttggtgagtatgaaaaaattctataaacaaataagtctgcttaaatgctgagttactgtaaaaaatagaaaacaagaattgtctgctgttgtcattcagctgatgagcacccaacgcatgttttaagggaacaagaagccctacctgttttacgtggtaatatcaactaattcgtgtattgttcttcttttcctcaagaccattttaatcagcagtaccttttccatatcaactgtaaatgagaaagcaacacatcacaaaagctgtgatggtgcttatgatagtgtttaaatgaaataaagaaaagtctttaagtgaaatgaagcaaaatccacatgtttccactggaggctttcattggggtcagtggcttttaaattttattccatggtgaatcaccgacattttcatgagaaccagtacttttccccagtgtattatttcatagctgatagggttcattttctccctctctctctctctctctctctgtctctctgtctctctgtctctctgtctccttctctgtctcccttttctcatgctaagtcttgagttccagcagggcctgcttctgttttattggagttgtctcttcagacaaatagataaaactgactcagaattgcagctgactgctttgtcttttaagctgaacatgtacacttgagaatctccttgttgcacgtgtgtgtgtttcctgcagccacagtccagtctgcctgacttctacacagactttttttcatatttttggacgtatgacttgaatctttaagaaacagggacatatgacttgaatctttaacaaacagaaaaaaaatccaacagacattaaccgggccatgaagtgtgacatgattattatgcttctaaaataatttatgggaatattagattacccttgatgtttattattttttaatccgtatgaaatctgaaatttggcccacatcatctaaaaccagcttcttatctcatcttaaataaatacataagaagagtgtttcagaggctacaagggtgaatagagacccaggaaaagtaaagagcagagaacttatatttaaatttagatgtctgcgtttggtgcagaggaaccctttgcaacagccagtgtggttcatatttcctcttcttcatccatcagtcaaactcttaagaatacacattaaatgaatgaggcaaatttggtgaaaagtattaagtttgtcctttgaaatatttccaggatgttgagttatcttcgtaaactaataaatactaaagtggcaatgccattggcatacatctaaaatataatatagcttaactgattcagagcaaggaagaaattgatctatgggtttaagaaaacaacaattaactgttccagaaagtattattactttcaaatgaaatacaggagaaattagatcttctatctgatatgtaatattaatacttagtatcttaaattattaaggagggattaaaacatctcaatacaaatgaaatattatcccccttaggggccttggtatttatacagatgtaagttttctataccggctgtcatataaatcctataatctggaggacttcctaaacattgagaattttcattctgaaactctcaccggtctaagccttttacatgagtgagttcagtttctttatctttaagatgttctgataaccagtgataacatgaccagagttaaccacattaacttatgaggaaaatgccatttccatcatgaggctcgtt

SEQ ID NO: 99963 - DNA, 1023 bp, Homo sapiens
gccttcccatctgtttttaccatcacattttaacataatttgctaagtcccagctctatactgggaactctggtaggcaccaggaaaacaaagaaaagtaagaaagtgtgttggccctcaaggagcttacagtttggcagatcaaggctgctgaaggatatcctggtgacctaaaaatgtcattcaaatagggcctccatttttcctaaatatttttccactctgcacctgtatctttaagggttccattggatctcttctgccgttcctcagaaggaaagtccaaaatcccccagccctactttttttacttttaaaccgaagctctcaaagtctgtgatccttttggaaattaaaaaatgatttgtagtgctagtactgcctacaagtggacatatacattaagatatttgagttatctgccttatactctttatttgagttgtggttcaagttgtgaaaatagctgttaagactctgcagacgtaggccagccatacaaggctaggtcctcactgtagcatcatctaagtagaaggattaccgggacatcctgacaagaaacaatattgaagcactaactcagctgcttctcttaaggcacactactgtttagtggtaaagaaatgtccttctagtttttgaatacaaaattgaagtgaaaatgagtttagactcattttcacttcaaataaactattgaaggctgagttatttttagcttggctgttatagtcctcagctgtgcataatccagccctttgtgggccatagccctcctctcattcaagggggagggtatcaaattatctcaaaaatcttttctcacatgggatttctattggaggaagcaaataaaactgtagctaaataaaaactacaaaataattttgcacaaagaagaaattttcttgcagattaaaaaattatgattagaaaaacttccagggtagttatatttgatcttaagaaagatgtaaatagaaattataagctaacattataggccttatgtttttagaa

SEQ ID NO: 99964 - DNA, 1128 bp, Homo sapiens
actaaaaatacaggaaaaaaaaaaaggtagccggatgtggtggcaggcgcctgtagtcccagctactcaggaggctgaggtgggagaatggtgtgaacccaggaggcggagcttgcagtgagccgagattgcaccactgcactccagcctgggtgacagagcaatactctgtctcaaaaaaaaaaaaaaaaaaaaggtcatagaaagtctaaggcacttatacagtattaatttttatcaacatcatttcctttcttctctgaagaagtcttcatttaaatgcaattaacgccacattaacagactgctgtacaatcttctccttcctgcttgaaaggagaaaaatacctgacactatcattctgcttatattattaatattttcccaagaaactcgactccctaattattttctccacttgccagctcaactttattttgcagctataaaaactaaagtaccaaagagttaagtgataaacccccatttagccagccagtcagtgctggagaaagagacacgctaaaggcaaaaacttgtgaccttcagtgggagttctgttaaccaacatccagaggaggaagaggaggaggagaaggagcagcgaccacccagctcaacaccttcgatttccagtagctgccagcagactcacattgagatacggctttggaggaaaaacccagtcacctctctaaagtacgtaggaatcaagagacagcagacttctcaggcttgaattcctaaaagcccatcttcatcagaacacccacagtgatagcacagagagttcattagttagcagatgatttagaattcaatactcattttcccaaggatacagtgtcataacgggatgaggttcccagactagttcacaaaagctgttactatcatgagctctgagtcttggaaagaggaggccttagtatctgtatctcagggaaatggcaagagctattccttccacatccctgggcagaaggccagctcagagcagaattttgaaatgagacaatcatctgtggtgtgttctctctagctcttagacccttttcccatcagtgcccagggctactgtgggctctctcctggttagccctactccctgcgcagctggacttcat

SEQ ID NO: 99965 - DNA, 1050 bp, Homo sapiens
gctttaggtacagcttgatcagagacacaaagaatatcattaagactccatttctcaccatctttggctccagattccactgtgttggcttcactctcagcttatgtgtggtggttggtcccggcagcctcaggtccatatccttccagcagggggaggtgaggcctcttgccaggacagctgtggctgatgcatctctttgaggcttgttagttcagtagtttgattggcctgagccacaggccagtttctggagtcaggtagggaaacaaggtctcttgaaatgcatggacatggatgggggttgaagatgtgattttccaggacaaaatctgagcattgcttccaggaactgaatgagtatccaccatagaggcattattatcatctctctttttatagatgaagaaactggtgctcagagaatatgtcagttgtccaaatatcacagtcaggtagtgaccaagagaggactggagccaaagtgctcttctctttctataagtccatatctaaccatgatggcaaatgatactgtggccattgggcaaagtgaagagagtactactgcacagggagcaggcctcctagactcatttctgcccctgactacatgcacggcctcagtctttgtgggtctcattcttctcatccatcacatagtgacaatacctgccctgatgaatactccttggggaccagatgagatgttgggaaaaggactttgggaatcatatgagttcttcatgaatacaaggcactcttgccttctctccagccccacatggtttgtgaaggcatcacatttgaaaatgtgttcaacactctccagtttccaaagttgcttcctacacctcactgcatttaaatttcccaaacagtcctgtaaggtagatgagaaaccaaccatcaaggggttgagaagctggccctgggacaagccaacaatgaacatgagaccttagactccactccgtttcacctctgtgctgggactcgtgtgccaggagcctcagcctgattcgatcaactctgggtgtatcattctca

SEQ ID NO: 99966 - DNA, 1032 bp, Homo sapiens
cctcagacccttggtgttcactcttccccctacccaaaatgctcttccccgtctgcttttgtggcttgtccttcactcaggtctcagtgtaaagcccaccttgttacctaccacagcctttcctgaccaccatatctaacatagcaccccatggccctttagatgtttatttctcctcataacatcataaccacctgacatacgtttatttgtttgtttgttgtcttctccattgagataggggctctgtgaaaccaaggtcctttccctcaagggcctcaagcattgccaggtacagaggtcaatattgcctgattggattactctgtcggattctgctcagttatcaattctgtgtgcctttagggcagaagttcaataattctgctgggtatcagaatcactgaggggcttgcccaaaatatacatgccctgaccccacttcctagagatccaaattctgaggtggaacctagaacatttttaaacacacttcccacatgattttgatgcatgggataaatggaccacactttgcaaaaggctgtctcactgtaccagtttgtgtttgtttatctgctgctctgccttgctgagtgttgttttatgtatatcggcagtttttgaatcacctgggaacctaaatatagatgccctcgccccatcccagatcttgtgaatcagaacttccagggatgggtcttgggaatctccattttcaaaaggctccctctgtgcctctgatgcagccagtcttcccactggcctgcgggagcccctcctgtgctttacagacttcgtgaggaggttggaagctcaagagcaggtgttttctctgccgttttaggccaacttctctccctatctcccattaatccaacagtgttctgttcaaaaccagtttttagtaagtcactgtggggtgactccttggtttatccacagtttcaatgtgcctttgggacttaaacattgcccagtatttattttttctttctttctttccttcttttttctttctttctttttttt

SEQ ID NO: 99967 - DNA, 1766 bp, Homo sapiens
ccacctcagcctgctgagtagctgggactataagtgcacaccaccacgcctggctaattttttgtagagatgaggtctcactatgttgcctaggctggtctcgaactcctgagctcaagctatcctcctaccttggcctcccaaagtgctgggattacaagcatgaaccactgcgcctggcccagtatttctaactgcatctcaaatcagcctgttctctgattagaggcaagaaggatatcttaggcacctagctcatcctggtggggactctctttgcagtcctttctatcctggaatttaaaatgtgtttcccaggtcagcccatacaggaatagggtaatatcacccattgtcatactcaaacattcatctgttcagccttccccttggttctgtactgggacatgtgcattgactgtcttcatccttggggtactggtctccagagtacccccaaagatcgagaaaagtcctgatcccttgccttgtggcctgcctaggctgcttaggttgctgagggagggtatctccctagaggccagggctttgccctatttctgtttggttttgccctagaactgtgtactgacattctttatagagagaaacttttgaaccaaaaatcttaaaagtataaccaaaaagtaaaacaaaataggaggtagggtggacatgaggcagatggctggaaatggagtataccaaggaatgatatttgtagaattttattccttggcccaagtgtaagagctaccttccaggttgtaaggaatcatttatgaaggccctggaagatcctgttggttaatctaattttttaatacctgagtctccatggactcagaatgtcccattctggactttggatggccagctctttggtagcctctttgaatatgttgggtttatcttcattctttacaagacatgatgggatcattattcatggcagaatctgaaaagtagtagggttgtcccgtaagcccagaaggcacttgcaaccctcttagcacacattatatatctgcaccttggcgttgtgcctccggataagcctcagattgcattttgatgccagatgtgagaagcctttagtaatcaggatgactccctttaggaaatcctgttcccaggtgatagctgcttcctaaggaatacttgtttgggggcttgggggttgggggggcgggggaggggagcagcaccagaggctctgatttagagacaaaggggagttaattgaccctagaaatgttagagtaagagatttctaatgagacctgacagctcaggggctgaagagggagtctaatcttttttttcctgcccacccagtcttcatacaaatgtaaatatgcctccttcaacaaattgccaaatgtggttttaatttgtaagcgggagaccccgccttgcttttctctttctttttttctttttcttttctttttttttcttttttttttttttttgaaaactaagtcacagattttacactttttgaacaggacatttcctcctgtcactcttatcaccttttctgttgtcctttttcttccaaggacattttcccccattgttgtcagaggaatttgggatgagagccgactgctctgcttcttaaaggagtttttgaagttcccataggaaatgcatagtgctctttaaactgaattttaaaaataaataaataaaggcagtgattgaatttaatacgagatttgaaagagtgtcactatcacagcatcatactttatgtggca

SEQ ID NO: 99968 - DNA, 1050 bp, Homo sapiens
tccagatttgctggggaagcgagagggcaggtagtgcctgcctcctttttcaggtgtaggaaatgtggtagagggaatctggaggaaacagtgcagtgacagctttacaaaccataaaatcatttttgtttgtttcagtgtgaaaagaactgaaacaaaaagcagtgtcacgagcaaatcgcagaccagaagagacactgtggaaacatctagtgactcagtgattgcagagatagcaaggaggaggaatgatggtcaggcttcctccagtcccccatcagaatccatgggacaagcaaaggattccataaaggcagctgagagccactgggggcttcctgttcaaaagctggaaaaagttaatcagacccagccagaagacactagtggccagcaaaaacctcatcctggggagcggttaaagacagggcttctaagcaggagccccgtctgtagctgtgagtcagcatcaccatgtccaaaacaaagtccacgagtggccaaaacccaacagaaacgcaggaactgcagctctgcggaagacttcgaccaccacgggagagtttctcttggaagtgatcgattagtcccgagagaaataatagtggaaaaaagcaaagctgtcagggttttgccagcttcagagttgtcagatccagggttacttttgaaacaagatttggcaaaaaccacgtctaaggaagagttgcatgttttggaaagtctctcctccagacatcttatgaaaaataacccagggcaggcacagcaaaccggcttagccacaaacactgaaagattatctacaattcagaacagcccaaccaagaaaagaaagaaatacgaaagaggccattaacaccgaagaggtttgtaccgttggagttgaggacatagtggccaaacctgtgacaagagagctgcgaatatagatgccgggattttaaaggaattaattagaatgactaatttaaataggaagtgtgttatctgtgttatggctatggtttgttttcaaagcatttcaaaccgggaggctatatgcttgtt

SEQ ID NO: 99969 - DNA, 1035 bp, Homo sapiens
gcacttgtaggcagcagagctttctatgccagaggtgtcagggatctgggttgctattggggttcttgttttgatgccaataagcatcttcaccggaaagaaccttctagatgtcaccaaaatctttacacaggctcaaagacaaggagtctctgcatccatctgtgaattttctacagcaaattttccctgttttcccttgaagatagcatttcctggtaccagtttatcaaatctcatgttcttctgggccccagttgtagaaacaactttggctcttgttttgcatgtctgtcaagtctaattccaggtcctaataatgttgttttagaaaagctcactgaacttaagagaaaccttaattttctgctaccagcaatgcaagtctgcctaggccacctgccttgccctccatgcaagggcactcctagcagagagatggtgggagagaaagtttggcttcacatttagccccttctcagtgccaaagaaatggccactgtgcagtgacgacggccaagcagggaacttccttgtagggaaggcctctgaggaagccggaggtgggaatacaaagtatttctgaaatgcccaacccactgaaaacctccagaaaatggaagtcaaaacagtatctcgtttcataaggagagaaaactatctcaagacttgagtgtcctggagtcctccaaggccaggtatctgagcttacctcatttggcacacattttataaaataggggtttggagggatatagaagaaaaaaactgtgttctattctcattattcgcaggctgtagacagctgtcgacactcacagaccacacactgttgtagacttcaattaggcaccaagttttgtacagtcctatagttcattcttgtcttaaatgagcttttctttctcctgcaccggaagccggctctgaattgatcagggaaaaagctaacaacgatttgtatagtcacaaccaaatacgacacctacaagtgacatagctggtacgatcctttttagaagaagcctatgttag

SEQ ID NO: 99970 - DNA, 1027 bp, Homo sapiens
ctttgggagccatcgtggagtcctgcctacgaccagatccaacagcacttagctcttctctgacaggcccagtttaatggtgtaacggtgagaaagtagactgtcagttggaatctagctgaattccttaatcttttaatggttacttagagcaaatactgaaagcagtgttctttcctttacctgtagcccttttcatgaatattaactatagtggcacacatttattgtcaccatgacagatgaggaaactgaggcacaaagaattttggaaactttcccaagttagtaaatggcagtgcctagaatctgggtctggcaaacctcaaagcccagaaactgtgttgttagagcacacaggtggaaaatttcaaaccaggagctggaaggaagagctgcagttggaatcaaagaagtttcactccagaatgcatgctcttgaccactaagcacacagcctggctttgcacaccaagagggtgaaagtaacagtccagtgaaggaagggtcaggcccacgtggaggctgaatgctctgcaggagatgttcaggacctcttttgtaactgcactgcagccaacactgtccgactgagagctcacaggaagcacggaaatgacagggcgtggaggtggagaaagccagagattgtggtccctcccggccccttcccactccctttactttactagaggcacttttttcttagtttgttgcaaacctgtaggacatgtcacgtttgcgctcttcctttctgctttatgccttgaattctttaaaaattcttctaaagtaacatcactgcaaagccagagagagcccctgagggtatctgattgttcatgtcctgaacttggagggtttatgtttctgtcttggggatggggtttttccaagtcactcagtgtgggtgcctgggcgcagaggaaacttctacatagaatgtacttctggcctaccctgacacgacaaacaggttgtggaggagtagccttttggggatgtcaggtggaggaagcagagctgc

SEQ ID NO: 99971 - DNA, 2635 bp, Homo sapiens
aagtcaaagagcctgtaggagctgccgctccacccagtctctccagggataagagtatcaaggtctacaggggcctgatcccagcatttgcttatcaagttgtgaagtgaccatatgcaatgatgaaaagggacttgtccctgtggcccccctcttagggataaagggcaggagaaccactgttggtattcttttgttcctgcgatgatgcttttttctttctttcttggagagttaattggttttgtgcctgccttacagatttccttgttcccttgctgagctctgtcttaactgtggcttggatctgttgcttggtgacggccttctactggtgcctgcggaagcggcggaagccgggcagccacacacactcagcctctgaggacaacaccaccaacaacgtgcgggagcagctgaaccagatcaaaaaccccattgagaaacatggggccaacacggtccccatcaaggattatgagaacaagaactccaaaatgtctaaaataaggacacacaattctgaagtagaagaggacgacatggacaaacaccagcagaaagcccggtttgccaagcagccggcgtacacgctggtagacagagaagagaagccccccaacggcacgccgacaaaacacccaaactggacaaacaaacaggacaacagagacttggaaagtgcccagagcttaaaccgaatggagtacatcgtatagcagaccgcgggcactgccgccgctaggtagagtctgagggcttgtagttctttaaactgtcgtgtcatactcgagtctgaggccgttgctgacttagaatccctgtgttaatttaagttttgacaagctggcttacactggcaatggtagtttctgtggttggctgggaaatcgagtgccgcatctcacagctatgcaaaaagctagtcaacagtaccctggttgtgtgtccccttgcagccgacacggtctcggatcaggctcccaggagcctgcccagccccctggtctttgagctcccacttctgccagatgtcctaatggtgatgcagtcttagatcatagttttatttatatttattgactcttgagttgtttttgtatattggttttatgatgacgtacaagtagttctgtatttgaaagtgcctttgcagctcagaaccacagcaacgatcacaaatgactttattatttattttttttaattgtatttttgttgttgggggaggggagactttgatgtcagcagttgctggtaaaatgaagaatttaaagaaaaaaatgtcaaaagtagaactttgtatagttatgtaaataattcttttttattaatcactgtgtatatttgatttattaacttaataatcaagagccttaaaacatcattcctttttatttatatgtatgtgtttagaattgaaggtttttgatagcattgtaagcgtatggctttatttttttgaactcttctcattacttgttgcctataagccaaaattaaggtgtttgaaaatagtttattttaaaacaataggatgggcttctgtgcccagaatactgatggaatttttttgtacgacgtcagatgtttaaaacaccttctatagcatcacttaaaacacgttttaaggactgactgaggcagtttgaggattagtttagaacaggtttttttgtttgtttgttttttgtttttctgctttagacttgaaaagagacaggcaggtgatctgctgcagagcagtaagggaacaagttgagctatgacttaacatagccaaaatgtgagtggttgaatatgattaaaaatatcaaattaattgtgtgaacttggaagcacaccaatcttactttgtaaattctgatttcttttcaccattcgtacataatactgaaccacttgtagatttgatttttttttttaatctactgcatttagggagtattctaataagctagttgaatacttgaaccataaaatgtccagtaagatcactgtttagatttgccatagagtacactgcctgccttaagtgaggaaatcaaagtgctattacgaagttcaagatcaaaaaggcttataaaacagagtaatcttgttggttcaccattgagaccgtgaagatactttgtattgtcctattagtgttatatgaacatacaaatgcatctttgatgtgttgttcttggcaataaattttgaaaagtaatatttattaaatttttttgtatgaaaacatggaacagtgtggcctcttctgagcttacgtagttctaccggctttgccatgtgcttctgccaccctgctgagtctgttctggtaatcggggtataataggctctgcctgacagagggatggaggaagaactgaaaggcttttcaaccacaaaactcatctggagttctcaaagacctggggctgctgtgaagctggaactgcgggagccccatctaggggagccttgattcccttgttattcaacagcaagtgtgaatactgcttgaataaacaccactggattaatggcctgtagtgtcgaggtgaattgtttgtgagcaatcaggggaactggccacagcactgaaagggttttaaagggtttggaattggtgttgggaaacgagcaggga

SEQ ID NO: 99972 - DNA, 1047 bp, Homo sapiens
tgtggccctcgaccttgcctgctccacaaagggcacagcgagtgccccagcgggcagagctgcatccccatcctggacgaccagtgcttcgtccacccctgcactggtgtgggcgagtgtcggtcttccagtctccagccggtgaagacaaagtgcacctctgactcctattaccaggataactgtgcgaacatcacatttacctttaacaaggagatgatgtcaccagtatgtaacaacctttgttttttttttgaatggtggatgtctgcttgcttgctttaaaggaggaatgccatgagctaggatctacttctccctagcttacattcctgttttataataaagtaagcttgaacttagccagcctcaaagagaacatctcagccttttgttcttcctctcaatcttacacgtgtgtgggtttttaaaaatcgttttagggtcttactacggagcacatttgcagtgaattgaggaatttgaatattttgaagaatgtttccgctgaatattcaatctacatcgcttgcgagccttccccttcagcgaacaatgaaatacatgtggccattgtaagtataagacccattcacacctcattattcgatggcaaggcagttcggttaaccagtgtctgaatggagcaaattcactgacaaaaagctttgcagacacagattgtcgagtaattttgaagaaaggctgctttgagtattcctctgactctcaagtctgacaattgtttttccagtctgctgaagatatacgggatgatgggaacccgatcaaggaaatcactgacaaaataatcgatcttgttagtaaacgtgatggaaacagctcgctgattgctgccgttgcagaagtaagagttcagaggcggcctctgaagaacagaacaggtaggtgtcaagtgggactagtttgtgtgatgatagtagatgatctcattatactattcaataaagccatcaggtcgagggattatctggcagtgccctaccctcgcaggagctcccaatttaactgagaactgagggcagc

SEQ ID NO: 99973 - DNA, 1191 bp, Homo sapiens
agtaaggctggggagactggttgagacttatccttacatctgggatctaagactgaggtcgtgttcaatttaccagatcactctgcctcggagcctccatatctatgttggaacattctggaatgttgctaggttgggtgattcctcttttctgtaggagtttcttccccactttcacctagtaccggtgactaaatgcccatgtgagggcattaagtgggtaaggcactctctggaagcttctgcttgataagccgcctgtctaatttgagaaacagccctgatggagggtagcaggtggaggtgccaggtgcattgtgtcaggagggagccatgaaaactgctgaacagtgcttgtctatggcttcacaagtccttcagttctttttttgctttactttgtttcatagatattaatgactgtgagagcaacccttgtagaaacggtggcacttgcatcgatggtgtcaactcctacaagtgcatctgtagtgacggctgggagggggcctactgtgaaaccagtgagtctgccactctttggggagctctgggatgtatgggtcatgttggagggatcccacttcaacgtgggaaaactttctttgtactggaaatctctggaagcaagaccgcagtgatttctgcactgggacagtatcacttgtgtctcatttgcatttatgagtcctgatgatagcttatggggaggagcttctgctgaggacctatagaattagactgtgtaataaatattcctgcttgcaaggaaagtcatatttctactttcatttccatgggacttccagaggcccaccccacatcttgcctaacttgtggcattcaaagtaacccagttgggagctcctttattcctggaaaagcctgattgtgttaaagtactacgactgtggctgttctcagaataggatgttggatgtaagcagtaggaaaggcttggctctcgcctgtcgtgaatggtcctggatctcgtcttcagccgattgtctcccctttgattctagatattaatgactgcagccagaacccctgccacaatgggggcacgtgtcgcgacctggtcaatgacttctactgtgactgtaaaaatgggtggaaaggaaagacctgccactcacgtaagtggtagttggccttggatgctatctctgggacccttccctctgtctt

SEQ ID NO: 99974 - DNA, 1030 bp, Homo sapiens
ggagaggtacctaggcttgtccagtgtgaatgtctcggtgagagaggggcgggtgcaggcctaagtctggtaagcagtctggtggcttgtgtgtttggaagtctcccagcacccccatcctgtcccactaaggtagcgcatgtatctgttcttggaaggaacgtcctcgtggaatcgcttgttcctttgcatctgcttcctggagctggccaccttccaattgtggttattcttcttgcagccatggagaggctgccttcaggggaggttgtcacttactactggattctgtcatagggccagggggccccagagaagaacctggcctgcagagttcctttggctgtgagacagggctgtatatcagaatcacctgggctgctttacagtgtaaatctctgggtcccccagattccctccagaatcggggagtccatggtctttgataaacttctggaattctgcagtgcagccaggtctgagaaccgctgtcatcagcaccccaggtgtggttatggatgtggatttctggggtcagattgcctgtgctggtcctaggcccccacctgtcacttgcggaactccagcaggccacagaagctccccgggccctctttaaatggcacagtagcaattcccatctccgaggttgtcataaagacacaaaagtgaatacttcataaattgttaggagttgtctctggtcagagcagaagtggagaatgcagcctctaggtgtgctattttgggcaaactctgtaagcaaatgagaggaataaggttttccacctgtaaagaactatttttcctgacttcttagctacttctgagccatgatgaaacttttctttaaaaataaagattaggcagatagagatgtcctgtgttcctcctgggcggatgctccgtcagtatccagctgtctttctcccccactgcttaggttggggattacatgaactggggcagtgggggatttaaagctaaaatcaaggcttcggccttatcgtcaccgtcccacttgtcctgc

SEQ ID NO: 99975 - DNA, 1017 bp, Homo sapiens
ggagaaagtcccaatggcagtgctattagtgattccaagcctgctgcctgctcagatggatatcagcggaggccgactgtgatttgtgctgctgtcatcagaacacacatacagctatacaggggagggccctcccagccagaacaacaggctttgtttccagaatttagccctttctctttcgaagtcccacctccctctccctgcccagacacgcactgatggccttatttacttaaggtgcgactttcccacacatcatttgcatagtctcccagcccagttttccctccctaccttgaaagaaagtcaaaacagaaccttcacgctgaggaagttcaggttgtgtcctgctgcagaaatagttgaatggcaagttacctgcaagttgtcttttggattatgtattacacaggttattttttttttcacccccacatgagaaaatttactggtttttgttgttcccaagtagactgagtccctttccctgggtatacatgcttgcttattgcaagcctgccaataatatcaaacttaattatgaatcatcatctgaggaaagtcacttcaatttctcatgagaatcttaatcatatattattaaactgggataacttggttggtgcctcttttagggtcagtatttttatttgttttcttttgaagtcatccatggcctcttgtggttgcttttttatgcttggggattgaggtctctttaattaggtgaggttgggtcctcagctgcctctccttgcctttatgaggcaacttgaagagggctagtgatcctgaatttggaagagaataagggaagacggtgagaatattgccatttcgtaatcagttccctcttactatctttcaggctaagaatatcagccttgacagaatggctacacccttacctcccactaacgtgggtgtccgcttttgagaaattatttagattgtaattttgttcttatcttactcctttagtcacttgtcacgttgacattccattttacataa

SEQ ID NO: 99976 - DNA, 1050 bp, Homo sapiens
acacaggcagatacgttcaaggaatgctcactgtggctttgtttaatagtaagaagcccaaacgactcacatgcacacatgtcagggactaggtaaattatttattggtgtttccagacaatgaaatactgtgtacccattaaagaaggtaaacaagtggtaacaggttgtctctgggtaggggcataaacttttcatttctttgccttttttacaacagatagaattttgtagcaggtgcatatgtttttattttaaaaagccaaaatggtcagggaagaaggctgcaatgtgaatattaacatgattcatcactttgtctctagaacctgacagtattattgaaaaggcttctcactcgggcatgatcaaccccagccggcagtggcagacgctgaagcagaacacgggcgttgcccactttgagtatcagatccgcgtgacctgtgatgactactactatggctttggctgcaataagttctgccgccccagagatgacttctttggacactatgcctgtgaccagaatggcaacaaaacttgcatggaaggctggatgggccccgaatgtaacagaggtatgtgtgtgtgtgtgcatgtgcacgtgtgcctgttgcttttagtgtccatttatcaccccaccagcaggcaggtggcatgcggctatctcaggtggggtgggattttggctgttattctgggcctgcagtatgaagatgcggagtgtagaagatgctgttggtgccccatccagatcccctttactggcatccccatcccccaggtgctgtgttggctgccaacagctcacagctgctccttctcaggagactcgtccttggccaaaccagtgcatgccccattcctccagctcacagtcagtgattgacagacatagggctacaaagcccagcttcctttgccttaaaacagtagtacaatttgcactctagagcttaccctgggattaggctgaaatcagactccagttgagaccatgttcttgctcagctctttcccctaccccatctgcttccctcaattcct

SEQ ID NO: 99977 - DNA, 1029 bp, Homo sapiens
ggttgagtgcctcctaataggaaccttggagggaatcctttttctctgtagggctgggcaggaggaatcctcctgccccaggagaccctaatcccctccctgaaacagacaggaaaaaaagtccaggctttgttgccgtcactgtagctccctgccctcaccctgtctctgcctctgagaaagaagggcagttcatggaaaatcacagagccaggcacgtagggctgtgtgcaattcttttctctccaggtggggtgatgtcggtcagcaacttctgaggttttcccagttctggcgaggatgagcctggtagactgcttggtcgtccaagttcttgtgcaagacctaaggatgctttcctctttgagtattaaactgagttagtactgccatgccagctcagtcccggcaccttcccttgcagtggggtttgtgggtattatgtgtttagcgcttgtgcaagtctgtcaaaactcctggtatcaatgcatttaatcagaggattaattacaacaatactgttgaagtggaggacgtgggcctcaacgtgaccagcaaatgaagggcttaattatacagaatcagccacacatctggcctcattttgactgtgctcttacctcaaatcagtagagaaatataatttcttgctgctcttagggaagagtcctgtaatttgcaggaagtcctaagaaacttaaagaggcagtaaataaggtataactttcgctaataaaatagtaacaacagcaatgaatttggacctgtggccactaacaggagagggctgggtatgtgccctggcttgcccggttttgcttgcttttctgagcattttcccacagttatcagtgaacgaaatggaatcctactctgctttgagtatgaaacatatttcggctgaattccaaggcagggtctatcacaagatatttttatattcagagatgacctgctgtgtcactctgagagcgctaagctggccttgagttatgaatgaaactcccttttaccctccctttttctctt

SEQ ID NO: 99978 - DNA, 1121 bp, Homo sapiens
aatagaagcatgtatggaccagggcagttgtttcacctggttgaacaggcttcttggtatagacaaaggcaaagcactcaagaagacatctgtctgctgctgaggtagtgggacagacagggcataggggactcttttttacttattttgcctcaaatgctataaccctgcaaggagaaataaaagctagcattcgtggagtacttactatgcggtaggatttattttcagccctttatatgtaatatctaatttaaacctcatagcaacctggaaaagcaggcactattatttttccgaagaggaaactaaaatacaaagtgtttgagtgccttgcctaaattcacgtagctagcaaaagatggagccaggcagtcagattccataggctgagaccccttatcagaaaattggactccttgggagcaggtttcttgtgccagaaactgcagggaaaaaaaggtacagaatctctaacagaaagttagtttctgatagaatttagatgattttgttagtttgtctataggcatggaatcatttgatatagggggagggtgcatggtcatatttgatgagcacacacatttcttcaaatttccccaaatttgctcagagtttggaaacttcagtccatgaagctcttgtaggtagttttgttcttttagaaaaactcattctccagagctggcaaagcagagccctggagctccccggggacagtgggaaaattttttctcttaagtcaattgagctaaagcaccagcaaagtggcattttatagaagagccttgatcaaagtcagtaaagctgagtatatttccttaaacatatctttaggtaaacagggaggatgcaataagattttaaaataacacagttcagtcagtgaaacaattgaagatacccatctgatttaaactgaattcagcaactgcaacaatactatctgatgaaggagattttgtgtcacatgttcaaagctggctttaagtcttaagaggtatcaaaataatcaaagtgttttctttgcccttagccatcaatgagaaagaattataaatggttgaaatatttatgttaatcagaaaccgcagttgggaagtgaaaagaaaggctgt

SEQ ID NO: 99979 - DNA, 1020 bp, Homo sapiens
atgattatctcccttcaactgcaccaaggtcttatccttttgccactggaggaataaaagaaagagagattcctgattagaggatccaactccaactagatgtcccctaaatgattctaaatgtttctaaaggaatctccagttcttcctttggctccttggcagctgctttcagaaacatagcatgaccatttaaaaaatctcaacaccttggccactcctatgttgatccccctaccttaaccactggagtaacattcatgtgcttaaaaaattaacatagaaggaggcctcattgggaagaatacgtccgtcttgaaggaagaattgttaaccaagaacaaagctacaggagggtttctgttgtgttttcgtccaagctctttggaatttttggtcttggacagacagatcaacacagcacatcgctcccaagtttccaaccccaaaatatttttcttaattttaaatctttgaagaagaaatgctacatttgcttcatgattttttactattgaacatgatggaaagagaatgctagcttctgtctcttgtcccccagtggaagtggggccaatggaaaaagctgagatgttgcatttttctgcccatctattgagattttcaaagtacaccactaagaaaatattcctatttaaaaagaagttcatccctgttacttatggctttgatgattaaatttgaaaaagacttataattctaaaataaatgaaccctcaccccttccaagattccagatcctaaatatccccagacacttcctcttagaggaactggcaggataaatttgtatttgccattctccgaaaatgctgatcaccaaaccgagctgctttgaataggcctttcaaactccgatgcatctcataatattttgcatgaaactttccacccatagtattaaaactctgtttattctgcttttctctcttccattttgttctaattttgcatgttctgcattttattccataccttgtgacttgttcctcttccttc

SEQ ID NO: 99980 - DNA, 1764 bp, Homo sapiens
cttagcttttaagttgttttgttcctagaaagtactctgccaacattctttacaaaatgttaaactgcttgtaatgttatactttaacaaaggaaaggcacaattagtctacacattctcctacttccctgcccaaacacatgcatccaaagatcaatttgaaaaaatgttcatttttttttttaatgctcaaaacaggtatgctatagacatctaattccattttgccttgcaaggaactgttaaaactcttctgaacaaaatagtacagaaataggtcatttaacatacttgtttttaattgtgttttttaaaaaatattttaaactttgtaagttatcagactttagtcaattccaaaatacctttaggattccagtgatttttgagtttgtgttgggagttgaaatggttttctcttactaaaatctattttatgtgctgtttaaatttctgttaactgagctatcaagcaaatcctgtaaggtgaatttttcccatttactgtgagaaaggaatactggtggaaacccctatcatgtgatggaccttgtagttccagcagtgatgctgggctgctaaaataataatctttcacttaatcttcccttctttcatcacacatttaaaaattacctttaagccttttcaatttagtatctctttcagcatagttgtccagtctcaaattccttgaaggtgtgcattaatgtacatttatcgacatgtcctttgtttattcaaattaagcaaatacagttgagaatttgttgttgctttgtttcttttaaaaaattaaataaaaaaatatttcctgttgggagacattttgggaatcactgaaaaaaattaagaaagtaaaaatcaccgtcatatcatctaaaaagaaacaactggtaattagatgatgtgcttccattttactctgtttgtctgcatagacatacttttgaacaaaattggcctttaattttatctgtagttttaaatattgcacttttatttaatatgaagtaaatattagagacgtttcctttttctgtaaaccctttgaaaataagatttttaatgatgaatacacccaagtttattgaactagttttctgttgttttacgtattatttttagttttagtggcttgagaatacagtattaaaccctttggttgccaatcctagcacggccacttcctaagtgaccttaattacctctttaatcgcatttccttggaataagggtcatggtgcctgcaccatagagttttggtgagatggaatgaactaagtagaggaaggccagcagggtcgaccaaatgacgtaggctcagtacgtaagagtggacacacaggtggagctgagaaaaatgcccttgtctgaaagtttaaatatttcggatttactcaggttagatttatagcagtggaaatcctggggcagaggtgaactcttttatgactcttgtggcttgttgccaaattgcttatgccataacattcccttacagagtgtatggtctacctgtagtgtgtcagcactccagtgttcatcatctttcctgatttttctataaaaatatgatcttttaatttattttttggtagctattgaaattgatcatctgttttttttcttttgttttcctttttgggagctctctcttctggtactttgcctactttaaagtggtgatttaaaaaaattaaatacccgttttatctaaagaagattgagtgtttatcatgtttttagttttcttttttttct

SEQ ID NO: 99981 - DNA, 1022 bp, Homo sapiens
aagaccacttattttacaataaggcttttagactttaaagctgtatgcatatattaaatttaataatctttatctgaaaggtgagataaacaacattttggaaatatgttagatctttttacatttaattctataattgtacatggatatgaagcgctcctataccgccgctgcctcctcttccttttccctagttagcgagttctaccaccatttgttaaatagttcctcctttcttctttgctttgtggtctttattgttttttaagatcttgactaactttgaggtctgcttcagttttaggtcttgcttctctgtgtgttgatcctctagtcttaatcaatgccacatctttttaatcatagatttagaatatttagaaatacctggcagagcaagtcacactatccttttaacattacaattctatgcccttgtcctttcagataaagattattgtatttaatacatgcacagttttaaaagtctaggaggcttattgtaaaatagatggtctttcatctgcctcttcttccccccatcccttactctccctccccagtggcagctactttggattgtttactgtttctcctgcgtttttcactggggccatttgtagggtcttcttgggctggtcagagagtggtcttccagtaaagttttgcactgaggaaagagtgtaggttccagtgttcatggaggaatctggctggggtttcagcattctctgtgtagagtcatgttggagaaggttcaccatacagacttacctgtttacctactcttccaagaacaaatctctagtcttgctaggttctaggattgtctgccaatggtctacagtgaggaggtggggaaggcatcttggaattttagagcttctcatgcagcttttactgaccttattttaacctgtcacccttttaccctcagtctttgagcagactggagtgagtacttctcggcttttctcactgttggtatagcattccctctctcaagttggctgagacagttg

SEQ ID NO: 99982 - DNA, 1322 bp, Homo sapiens
tataacatattcaatgcatgagcatattgtcttggttggggtggtataggagatgtcactagggatttttcacaagcaaatattccaagttatagctgacactcaagtcacatctttacctgttggcagtatttgatgtaatttgttattcctccttttttaatattcttccttcatttgattcttgaggacaccacacactgttgccttcccttctataccgctggccttctggtttcttttcagttgtttttaaatttgtgttggttttctcttctcaccagcctatgaatttagaatgtgccaaggctcagttctcacccgcctgttgtcacaaatagtcacagggctttaataaaatactgtgtagctacttaagactcctaaatgtatatttccacctcagacatctccaactacttttttgacttcttaacgtgaatatgtgaaagacgcttcagcctaaatatggccagaacaaaatttctgatctttctctgcaaacctgctccatctgcagcctgccccattttattaggttggtgcaaaagtaattgtggttttttgcattaatggcaaattacttttgcaccaacctagtgggtgttagctccatttttttcatgttatttaagcaaaaaaaaaaaaaaaaaaaaaaaaagaacatggaatcctcctgactcttctctttctctccaactctgtttccaggttgtcagcaaatcctgctgttctgtcttcaaaatgtatccagaatcagtttaactacttttcccatccgtactaccagcatctttgtccaagtctcctgcatttcttgcctggagtattgccgtggcccatggcctcctaacagatcactggtctccttttccttccctggcttctctttgattttccatctgcttaacatcagagtgatcttttaaaaacataagtcaaattgtgcttaaaaccctccagtggcttccatgtcactcagaataaaggccagtgttcttatgattcataaaaccttacatgatctgggccgggcatggtggttcacgcctgtaatccagcactttggtaggctggggtgggcagatcacttgaggtcagcagttgaagaccagcccggccaacatggtgaaaccttatgtctactaaaaatacaaaaattagccagacgtgatggcatgcacctgtaattccaggtacttgggaggctgaggcaggagaatctcttgaacctggaaggcggaggttgcatgcagtgagccgagatcgtgccattgcattccagcctgggggacagagtgagattctgtctacaaataaat

SEQ ID NO: 99983 - DNA, 1020 bp, Homo sapiens
agttgacattttttaattccttatttttcctgccgaaatcatcactgtcattatcttttaaaataattggggctggcgcttcctttccagagaatatcttggtccctctcagttggctgtctgcacacctcaatcctagaatttgacatttggggcctaatcagaagaatttcagaacaagatgtgaggggttgttaagtttttaatgtccaaactaaattaaattattttgagttattttcaattcacttaatagttgaatgcaacatatggcaccagatgttggtactggatcattgggaagacatctagtagtcagtagttatctatgtgaagtttttttcaaccttgaatactgtatgaaatgcagattctgatccagagtctggctgagattctgggtgactaataggctccctgtagatgctgctgctgatccttcaactacattttcagtagcaagaacctgcattacttgccttattaccgtggtaagaaaaagtagccgtcagataatttttctgtcttgattttaaacagccatgctcatcagtccttacatacattggagtaataatgcccttctttgtagcactcttgtagatgattcagatttagcgctacttcatttaactagtattgtcagaattttctacaaaacttatttttctaaataactgatatctgtaattttagaaaacatgttctacaatattgcatacttctctttctcaaactgttacatccactttactttttttctttaacttagtggtgtaagagccatgtgttttggagacttcttggtgatgggtattgagccatatgcaaaatgagtaaagatcacaaacccttctaagttcttgtatctgtgttttatgttttttctattttgtctccatccagctaccaattaatagtatgtctgcctaaaagcagctggtttccctttccattctaattgattacttctgacctgaaaagccagatactagatttgttagaaatatttatgagatt

SEQ ID NO: 99984 - DNA, 1033 bp, Homo sapiens
attacaggggaaatcttagaaagatatggatagtctcgtacagtttcatgtggatttatacagaagaactttcattggtaatacagaagtatgaaacttaaagatacgttatatatttataaaaaagatagttttctgtctggtgggtcttctgcaggcaccagtatgtgttaaacaggttatagaatcagcttctttatcatgtacggtactagacagtgtggtagttcaccaagtgatcataatctaattattattctaagtagtatttatatgatttttcctaatctttattctagcacagcaaagtgtattactttaaggttatctgttgctctagggatttcagttcattggaataagtaaaatgtttgttgaaaaaagtattcagtgggtcaacaagttggacagtactcctacatatagttaaaatgttgccatacattgtttactgtcttctgaaaaataagtactgtagttagttctagaacttaaaagtatttaattcattattcatcttacagttttgaaatataattgtcactgacaagaccttcacagtaggggatagggaaattaaaggcaagtgagcatgtgaagtaccaaaatgtaaactaatctgctacttttaacctttgtaatcttttggagatatatgtacagaaaccagttttacctgcaagtatccccactgcatgaagtcagctttgtattttttatagtgttttctgttgctgaggagattgctagcactagttcagcattttgtcttcactgcagtcaagtaggatgttgtatcattcctgatatatacataattaggaaacatgaacaagaatggcagagaattacatctcacctaagtcatttgatgaatcatttgacaagtatcttttcccacagatgcattgcctatagcagatattgataaagctttataaaattatacatgcagtccacaaaatgtggtaagatcagaaatgagtcaggtgccatttgctctagtgctgtagttgtgaaagcggtggcctgc

SEQ ID NO: 99985 - DNA, 1955 bp, Homo sapiens
gtgccaagattgaacttaagcggcagggcgttgtcctggggcagaacttgagcaagtacttctcagatgggtccagcaatacctttcccgtatggtttgaatacccagtgcagatcgagccagacaccttctacacagccagtgtgatactggatggcaatgaactcagctactttggacaagaaggcatgacagaagttcagtgtggcaaagtgactgtccagtttcagtgctcctcagatagcaccaatggcactggggtacagggagggcagatccctgaacttatattctatgcttgaaaactcacttcctgaagcagcttgagctccaaagtgcacatctggttccaacttgcctgatgcttagctcatctgcaaatatgtgatcagtgccggtaatttgtaatgaatgaagcggtaggcaggttctaatttcttttaaccttttaattatgtacaggcaaaaatgcagcattccgcttttaactatctgcttaaaagagctaacgttcttattaaggctttgtggtttttagagttgcatctatgaacctggggagattatgtgctttcccaagcgttccaccaccctctcagttttgtccctctgaagataattttggatcaccttgaatttccttttggacgttatttgatgaacagaaataaagtgataacaagagttatttttaaacagaactcctcttaccccccaaaacagataaacctcagtgtacaattttgaaagaagttttgccttgtaatgagtaataatttagaaagtagacagtggttgtgtttggctctcgttttattccttttacatttgttgcttctgggatttaaaaaattactaaattcataagatagttaggtattaaacacttcagaatatcaatgtaaaattggaaaataaggaactgggggcatttgtttaggccatgacttctacaagcagatttcttttcttttagtttagaagacaaaaaatttcaatacagatacttcttttagaagtaaatttttagattttattgtcagtagaaaaaagttaaactcctactaatttaaactaagacagtttaaaaaggaagcctgaaaaagactcatactacaaataatttaattgatggcatataagaatatgcagtttgaaaaagccaaactcttctctccacttagcttttgatccccactgtttgcttatttgtataagtcatactgtgtagaatttctattttctttttccccattaaaagaggaccaaacaattctttatacaaatggagtagcaactagttttgtagcactacatttaatgtaatgagatacctttgttcatttttttaaatttgaaatatactttacctgatccactttgattgtatactatattctttgttaattttaattttgtcctgttcctagactgctagaatctggcccctggccatcttaaagtgccaacatatgcctgcagggtttataaaaaatggcctggagtgacacattttattatacctaatattcactgcatcagtatcacatctagctcccttacttgtccacagataatgtaaacaaaggagggaaaaacttattaaattctccttcgctgctggcttgtgctggtttagtgcctgtgtccctggcagtgtccagtgtgttcacttccagttgaagtatccatgtgtttctgggcagcttttctgctcagtgtgatcctgagatggcttccccgccgccacccagagtgtggtccttggccgcctcctgctcctgctctgcaagcctgaaactggcttgtctggagccaggagttagtcctggggtgtgtgtgtgcctgcgcacccatgcgcatgcaagtgtgtttgccagctcaggagctgtctcctctctacctggctagtaagaggtgggacagtaatggtcctcctgctggccccagcaagg

SEQ ID NO: 99986 - DNA, 1073 bp, Homo sapiens
cctcgatcactgccttcaatggccccctcctgcctctgctgtcccacgaactcctgtaccctccctgccccaagcttctggcaggggcagtgcttttccaaggagtagcatgaaggcagttctccaagttccctttatccaggaaaccagagcaaggcttgtgaagaaaatggaatttttcattaaccaagaacgaaaatctcaatctatgcacttaattaggtcagatacccattttcctctgagtcttagttctttgaagtcagaggaagccctgagcattggagacgggaaaagaaaaaatggaaagagaattgggaggaaagctcctacatatacacacactcacgaaaaaaaaaaacaaaaccaatccatcaatccttgttaagggttgaatgcagataaagttagctatcaaccttatcaacactgaaaaaaaaagcttaaaataaaaactagggcaatcccctgaaggaagaaagccttggcatcagtctggagacttcacctaccttgttaagagctgcattccctactctcttatgaaaatactgaacatgtttgcagtcaattccatgactccttggtgatttagatattttagttaaagcagaagactaaaaatatagatttgaaattttcaaaggcaatgtgaggggtagcctccgaagagccagatgccgttggggaggcagcgttggagcggtggtccagaggtctgggctctaatttcagctctgacaccggcctgcatggtggctccagaacggcactgtccagcacacctgcgagagatggtgggaatgttctgtgactgtgtttcctggacactggccactagccctgtgtgactagtaaacactcgaaatacatctagtgtgactgaggaactgaattttcacttttatttaatttcaatttattgagtttgcatttacatagacacatgtggctgcaggctaccatgttggacagcttggcgccaggccttaaccctccatcgacttgatttttaaaactgtacctgaaaaatgagacagatatgtgtctcatccctttgttgtacagatgaa

SEQ ID NO: 99987 - DNA, 1006 bp, Homo sapiens
gatctcacaaacaagctgctctctgctcagtctgaaaacacgtgggttagaccatctttctgcaagccgaccctgagacaagggtgcgggagccaatgatctattaaggaggcgctcccaggagggagtgaggaaggcaagacaggggaggggaagaggctgagcaaaggtgcagtttcaggcaagttcccagcctcagcctcaacctgtgggaggttctggagcatccattacaccttagaatttatctccatcaaagtaagagagctgggtttttctattcttggctacatgtcaccgggggatatcactctcagcaacttctggttctccatgatggtgaggatttcaggactcatcaccccttagcagcaaagcactgctgaacagggacatagacacaggaaccagcaaaagggaccctgggggtctgggcagggtgcccacagtgtttgccataccatctttatgagtttctccaaaagctgaggtctatgtaggcagctgtggtccacagaaagggagcccatcctagactagagagacaggagccgcagccacacgtcaggcccagcacagagctgcagaaccacagatgaggcccacagaattgttagcttaatggttgttgtcttaagccattaaatgttggcatattttgtctgcagcaacagccatctgatatggagggaaggaaattacctgatccctgagtctaatttccaacccaaaaatatatttgggtagaatctgaatatggggtcagtcctggaattagaattgacctccatccaatttttattttactccatcttacagtggcaaagaacttcacgaggcactagacagttctgcctggaaggaggcaataagaataatgtctctccagttattactgaattaatattagacaaatgacctcttctttcaagtcatcctcagtattttaagtgactactaggttttaatctactgcctcatagtccttgaggtcactgctacaata

SEQ ID NO: 99988 - DNA, 1169 bp, Homo sapiens
attctgttataaaagcacaaaacaaagacaagggtctattgggaacatattctcagtgttattcatagagtcaatgagctaatataatgttctggcatatccatctaccttaaagccacctgcggattttaaccagggagactggacatttccaagtctattggtttagctagcagtggaagctacacatcagaacggcctgggagaattttcaggactcaccccagacagattaaataagaattctgggggaacactagtgtttttgtaattattcccaggtaactatagtgtgcatcctggaccaagacccaccaagctaggctattgcttctcaaactttaatgagcacacaaatatcctgggtttctggtaaaaactcagattttgcttcagtaggtctggggcaaagcctgagattgcagttctaacaagttccagtaaatgctgattctgttggtccatggaccagacactgagtaccaataagaactaggaagtaagaactagtaagtcttacttcctagttcttagggataggaatatgttttgcctcaaggctgggacagctaaataattttcccaagccctggtggctctctcttttctggaatgaaagctttaggcaagtggactgcattgaaatggactacatatttttcctcatctattttctcatatcacaaagccagcatgggatcatagagaatttagagtttcaggcatggaagatccttaataattgttggatgaactgagattcctgctggatggttgaagatgctgaggtgttactggaggctgctgaggtagcatccctgctgagatgctactggaggctcagatgccataggatgttacaagttatgtcttgaagatgctgtcaacctttagtggagcttaacaacagagggatcacttaggtctctgaagacagtgcatctcaaatttaatatgcataggctgtgggtagagtggggttggggtggcttatttcaacagatccctacccccgagtttctgatcagtaggtttgggtggggtccccaacatttgcattctaactagcttccaggtgatattgctggtctcaatgataccttgggaagaatcctttctcaaagccagcaaggggccaggtgtggtggctcatgcctgtaatcccagca

SEQ ID NO: 99989 - DNA, 1048 bp, Homo sapiens
cccacagttttttatccatttcgtctggggtcgaatcctagaatgaacatttcttaaattcccagttgactcttatgctgctagttcaggaaccatattttgacaatcattgaactaagggcttgtaaaatagtgtgacgtgggtcagaatgcttgatttcctggcccatggcaggcgctattggctaaccaacaaaacacccattcctgacccactttttcttcacctttcaccaatatagaagctaagaaaaggtaaatggccactttctcagactactttgcagttaggagtgagcctgtgacactgtaacagatttctagttaacggtactaagcagaagtctgcaagggatgagaatcagttctgggaaggttattgctctacctaatcacaaatcaagcaccatatcctccccttctttggctttgagcacagatatgatccctggaactaaagcagccttcttggggccatagcatacatacataaaggaagagaccaacaaaataaagttggcatgtggccagtgaggaacaccagatcattgccaatagccctctacttccagatgctgcattttgtgggataaaaatctttattggttaagccacagtgaattgaactttctgttacttacagccaaaattactcctaactgacaacaaaccatatgttttatgtatgtgtgtatttatctatttattggagacagagtcttgctctatcccccaggctggagtgcagtggcacaatctcagctcactgcaacctctgcctcccaggttcacacaattctcatgcctcagactcccgagtagctgggattacaggcgtgcaccaccatgcccagctaatttttgtatttttagtagagacagggttttgccatgttggccaggctggtctcgaactcctggcctgaggtgatatgcctgcctcggcttcccaaactgctgggtttacaggtgtgagccattatgcctggtccccatatgtataatttaaacaatatatatagaggccaacctaaacctcccagacttc

SEQ ID NO: 99990 - DNA, 1052 bp, Homo sapiens
gggcacgcccaacctcatcagcaccgagttctccgcggagctccactacaaggtggacgtcctgccctggattatctgcaagggtgactggagcaggtataacgaggcccggcctcccaacaacggacagaagtgcacagagagcccctcggacgaggactacatcaagcagttccaagaggccagggaatattaaagagactgggatgaggtggaggacgctgcctctggttctggagcacacacgtgctgcactgacgtgccgactggcgccgagaccttcatagctgcggtcgtgtatatttgtatataccacatgagtatttctcatacattacgctaggggcgtgtgccacgcccaggggactgccttgtgaagccgccctcgccatctgcagagctccttgaaagtgcccctggggagcgatgtgggcagaaggatggggacaacttggaagccagaagaagaacctggaagccacagtgggtgcgactcaattcacacccggatccagagtttcaaagagaggcaaagggggaaagagactgaggttgtaaacgttataagcagtttttatatataacttatttaatacaaatgtgacttaattaagcgtaaccttttctctggagttgtggtgaaactaatcacgtctgtgagagatcagaaagaaagagacttagggaagtggaagagaaagggaattttggaatttatttctttaaaaataatgcaatggaaatatatcaaaacatgtaaacgcccaccttaaaccaaatgttatttggtcatgaggcaccttgctggagtctcagattccaaaagtctcttcttcagactgggtagggaatatgatattttagggacaaagctgaggactggttttaaataggctttaaaataaaagatcaatattatcataatgctatcattctgctaaacggccccaaaacagtagaatttctgctcatgtcctagcaggttcagaagactgcagccaagttcagatgtaaaaacaagaagtagcacttttccaaaggaaaacaacaaa

SEQ ID NO: 99991 - DNA, 1040 bp, Homo sapiens
gcaagatgcaagttgaacttagtacatgattgaatgctcaatatggaagtccctaaaatttctcttgcaatttgataaaaataacaaagagaaagaataagaacactttgctttgaaaaattgtagtggcagctaaaagctcgatagtttcagttgataaattacttctaagtgttatattcagggattctggagccacataagaaaaccaagattttccttttgattttttcttttttttttatgtaagaagtggttatcaagaagatactaaagatagacttgctcagggggaggaagtgccctgcaccatgtaatcatggctctgggcggtaactgataaatcccagataaaattatacacttgacatcaatgtatggccaaattataaaggaaagacaaccaaaatatagtgggtgtaaatatgaataatttgagagttgctgatttgtattcctggtacaggcaattacatttgtcttgctgtgctctcatagacaggttggtgccgtggtatctgtttctcattcttaatgaggctgagaacttagtgagagatgggctggctggtggggagcctttggcttcaaaagcttttgaagacctgttacctgttggcagagatttttcaggaactggattggatcacataaaactatcaggacactttggagtctgaaaatcgtctgaccagtttcaccaggaatgccacttctttcatctccttttgccctttttccatttatatttaaacatttgagcttgttaaggaccccttttattaagagttcaaaaactggccagtataaaagagcacagcgtctccaagaacagtttgtcaagactttactcttcaattttctacattttttttttaaggaatattgtgaagccaagagggggaacatagtgatattcagaatcatggaggcaaaaatgtaacaggtaatataagttccttccttatcagatcggatattaaagatcagctactggaaccagagaatactgagagatgtaaaatcaacttcatttcaca

SEQ ID NO: 99992 - DNA, 1045 bp, Homo sapiens
cattagtgaaatgcagatgacaaccacaagtagataccacttcacatccaacaagatggctatgataaaaattgtgaatattaacaagtcttggtgaggatgtggagaaattggaaccctcatatatcactgataggaatgtaaaaatggtgctgctactttggacaacagtttggcagttcctcaaaaagttaaacatagagttaccatgtgacccagcaattccatttctaggtatatgcccaagaaaatgaaaagataggtccacatgaaaacttgtgcatagatacttatagcagcattattcataacagcaaaaaaagaagaaacaatccaaatgcccatcaactgatgaatggatcagcaaaatgtgaaatattcatacaatggaatattttcagctgtaaaaaggaatgaagtgcagatatatactgtagcttggatgaaccttgaaaacattattctaggtaaaagaagccagacactaatggccacatagtgtatgattttgtttatatgaaatgtccagaataggaaaatccatagagataaggtagattagtggtagaggtaagggaatggggagtgagtgctaatgggcacagggtttcttttagtggtgacgaaaattttctggaattagaacattgcacattttgcaaatatattaaaaactactgaattgaaaagttatttaagtggatgaattttctgatatatgaattatatctcagtaaagctgttaaaaatgttaattgatataatttactctgttaccaaaataaaggagaaaacccatatgttcctcttgattccatatgatcatctcaacttgcatgaatgataaaaacctcaaaatagccgggcacggtggctaatgcctgtaatcccagcactttgggaggccaaggcgggcagatcaccaggtcaggagctcgagaccatcctggctaacatagtgaaaccctgtctctactaaaaatacaaaaaattagccaggcatggtggcgggcgcctgtagtcccagctactcgggaggctgagg

SEQ ID NO: 99993 - DNA, 1044 bp, Homo sapiens
acgtcagcactgaagccagtctgatggggtatgattatgttattaagtcccttgtgtggaaattttttgttatccttgctggtggcccgtgaaagacaccttactatttaatgtgaaatataggtaggaaagagtgtagagtcctgctatgagcccgaagatatttggcctccagttatattgcttgacatctggtagacatggttttcttattgctggtaaattctccagctggtagtcaattgggccagcagatacagctggtcctcttgcctctcttgtaaattatgtttttgaccttccttgaggagagttaatccctcttccttcctttctcctttgagcctgtgactacaaatactttcaaggaaaaaaaaaaaaaaaaagaaaaccccaaaacaaaaacactaatgatttggctgcggaattttattgatcaaaaagaaaaattatctcttttgttataaatgctagaatttttttgtattgcaagtaagacaaagttatagatgagaggctgagctcaaaagagaaaaggggctataacaatgtttgtattctgtttaagctttggaccttcctctccctctggtttcctgacttctataaaagaatagttgaactaactagtggcatacctgttcagcatcatgactggtttccgaaacatgttcctccataatgttgagagccgtggtagcgaaatgagtaagaaggcatcttaaaatatttaaaatttaaaaactatttttaaaagttaaaacacttgtgcccttgttttcaaaaattgtcttccttctgcttgttaccaaactcagaaactgaggccacctggccatttgaacatatatgagctagttgtgtttaatcccaagttaaagccttgaattaaagcttagctaaaaatcatattgcgtagaaaaggctggataataatcagtatcattgtaaccagaatgcatgtataatttgaataaatagaggtaggttcttttacaagtcttttttttttaaagaatgttcttgcaattaaatcatttaatt

SEQ ID NO: 99994 - DNA, 1100 bp, Homo sapiens
atggaaagtggggaactgagtgtgttaaatataaagctatctttaactgttctattaaaaagcaaagatttattttccatctgtgatctgaatgtgcctatttgtgttctcttttatggcagtggaatttctgtggagccacacgacggagagcatgtgtgtcggatatatgtcagcccaggatgggaaagccaaggtaagtgggaaaaaacggtcataacctgaaaaccttgtagccatcgcataaacctctaaccagctaagttgatgtggatgaattttttcagctttttttgggcagtagctttgtggtcttcataagcatccgaataagaacagttaacaatgctaacagctccagagaaaaccagcatatctattttgcttttggtgacacagcaggggagcattaggaggagcctgcccactttcccccacagcccccagcttgttcctttttgcccattgtgaataagtagagaagaggaaactggggtttgggaagagaaaatgggagtgaagctgatgagctgacatagatggatgtttctgcaagaagtgttggaataaaggaaactgagtcaaacaagctttaaccctagaaagcatcctgcatgtttgatggcacaggtggctgacatgcttgcaaatatgacctgtctcacctttcagtgtgttctgtcatgccctgacctggtgtcttcatgggcagaattaaaggtctctgtccatgtcccacatgcctgtggcactcgtcgctcagtgagttgcaataatcacataggcatccacatactatctccggagttgctttgcttccctggactcatgatggttgagcctgggaataagcaacatgatttgtggattttattttatattggcctcatgttcttcttgttcataaattttttagaaacagctgtggcctgtgatgtttacttggcattaaagtacctcagttataaagctgtgaagttgtgcagcattgtttttaaaagaaatgatttattttgcacattttgacatataaaataggaaaacttctgatatgagcagtctgttacagattgaatcataaaggataaatataataaaga

SEQ ID NO: 99995 - DNA, 1057 bp, Homo sapiens
taactagcttagagatataaacagatggatggcctgggggacagggtttagtgttgagcaatgcagttttattatcagggacttttgaaatttttattggagtacattacaactttaaaaatgccttcgaaaactcagaattttgatgctgtgtactggaatgtgacagagctttgtgggcatccctggatgtttgcagttttctttttgtaactttttatttagatataattttatacatacagaaaagttgcaagaatagtgcaagggacaaccatgattccttttcccagattcaaccagtgttttcctttccttccatttgctttcccatcctcatgccctcctccctctacatgcacacgagcatgcacatgcacacacacatacacacaaacaaataagtgcatttttttccctgaactatttgagagtgaattggagacatcaggctcctttattcctaatactttggtgagtatttcttaagaacaaggccattctactaaataatcacagtacagttatcaaagtcatggcttttagtattgatacaacactactgtctaacccagagtcccttttccaactttatcaattgtttccataatgtcctttataacatctctccccaccaccaagtccagggtacaatccagaatgacacattgtgttcagttgtcatgtattctttaaacaggaagtttctcaactttgtgttttctgactttggcatttttgaagagttcaaaccagttatttagtagagtgttgctatttcaagtctgtttgatgtttcctcattcaattctggttatgcatttttgtcaggaataccaaataccacagaagtgttgtgtctcaaggtatcttatcaaaaggcacatggtactgatttgtgccttaattggtggtgttagctttgttcatggagttaagttggagtccatcaagtgtttccacagtgaacaaacagtttttcctgttataagaattttttggagagatactttgaagctatgtaaatagcccatccttcttcaaatttccacctact

SEQ ID NO: 99996 - DNA, 1031 bp, Homo sapiens
agtgagtcagtgagtcagtgaccctttctccctaaaaaaattaagttttctataattgaatttaatctaagtatattttttcattaattaacagcttttaaaaagggttttctcaagtcatctgcctattgcaagcctcttaactatattttaaccagcaagttattaaagttctaaaactacattcagtggtaaatattttgtcttgtgaggaatataaaactattaaagctaagccatttagtttttcaaatgaggaagctgaagcatagatgtcataagtgactcatttcaggttctacagccagagctggttctcctcatatgtgatccttctctctgatggaacaggaatccagatagaagattgacaagagcatcaactgaacattacaaacagtgttgcttcttttatggctactttcctaatgaagttctcaggtgtggataaatctaatgcttatacatatactctgtttcccagataaatacaatatagtgatacaatcttagcagcaccaccatagataagaataccacttttactggtgatggttgcctctgattttttttcctccttccctgggttcatttgtccctgatgctctaattagagtgttataatttaggtaactaaatttaaataatttagaacagaaagcaaggttctgctttatctcctgtattaacactcaaaatgaatattgggtaaatttctacattgagatgtgtattagggttctccagagggacagaacttataggatatttatgtatatgaaagggagtttattagggagaactggcttacctgattacaaggtgaagtcccaggatagaccatctgcaagctggggaagaaagaatccagtagtggctcagtctgagtccgaaagcctcaaaaccagggaagctgacagtgcacccttcagtctgtggccaaaggcccaagagcccccagcaaaccaatggtgtaagtgcaggaatccaaaggctgaagaacctgaagtatgatgtccaagggcaggagg

SEQ ID NO: 99997 - DNA, 1624 bp, Homo sapiens
tttccaaatttttactgcaattttcatgttagcctctaggcgatgatagtatcactgtagttcatgggtccagcagcagtattaaaaatcaaaatcagaccgggcgcagtggctcactcctgtaatcccagcactttgggaggccaaggcgggtggatcacctgaggtcaggagtttgagaccagcctggccaacatggcaaaaccctgtctctactaaaaaatacaaaaattaaccaggtgtggtggcaggcacctgtaatcccagctcctcaggaggctgaggcaggagaatggcttgaacccgggaagcagaggttgcagtgagctgagatcgcactagggcactccagcctgggtgacagagcaagactctgtttcaaggaagaaaaaaaaaatcaaaatcaaattgaaaccttagcctacaggtttaaaaccatacgcttatagatttttaaataaaattatagccatgtggtttcttaatttgggatttgtagaccctatggaatctatgtattggtttttatggggcattctgtgaatttcctgagactatatgaaacattttagtccaagatatatctttttctcatgacctgagagagattgggaagcacagtcttaggtaattttgaataaaactgtaagttaacttgctggctaaaataaattaaataaataaatttaacaagtaatacaagttgatgtagttccttcttttcctgttattatttcttagtaatagtgtcaaatgaaaaccttgaagagtcccaaattgtatattgtctatttgtcttttgttacctaactcatttgaggtggccttcctgtattttgcccctttcttcttttatctgctactttcatctgataatttttctagttggtggtaagacagcttttggacaatttctgtattgatattccttaaattctacccagatgtagagaataaaatatgaatactattttctccttcctccttcagagcagtgtgtctttccctgccctcaaaacttcccttgatactgtattgaatagagaaagggataagcaatgactggtgagcagatttaagacttttttctatggtactttatttggcctctaaatactgaatgttgtttttaaactttgcgtacagctttaaagctgatgaaatgatttatattgcctctcctttgtacagaggaatttattgagaaataacattggctcaaacttccttttcagcttttaaagagatcaaaatgaccccaataaattacttctaaattttaagtcattaagaaaattattaattaaatatttaatatatgtggctggctcagtagttataggttagatttatggtgtagtataactgtcttgcttatgttctttctgtttgtggactttataccacatatataatcaatatgtatagtgaaatattttacatgacatctgcatatttgtagatgtttataactgcattttggctttggttttttttttctggctcatgaaatgcacaccatggcttagaggcaaaataaaatctttaattttattttgttgggatgtgcttggtgacttactatttataggactttctggttaaaattggagactatctacag

SEQ ID NO: 99998 - DNA, 1047 bp, Homo sapiens
aaccttcttgccaatataggaatatgttgacatattagctatagcaaaaggcttatattagcaccgaatgaggctctgctgcatccattcacctagggaatatgcactgtggcgcttcccaaaggatcacttgcaggtacctcagtgtacctgatggcttgactgttgttgcagccattagtacatctcccttcttgccacctttctctccccaaatctcaacaaaaccagttgtttttaatcttaacactacccatcaccctcctacactcactgaaatgtcttcagcccctaacctctagaagagctgaggacatcatggaaggaaggtaagtctttctctgaaagagattgtagacctgggatataatggataaagtgatccccaagatgcacttttgatgttttaatttctcagattttttttgctagatacttactttgcattgctttgttgttgttttgtgaaagaacagacttctaattttaaaacacaaggtgaagaaatgttaaaaaaaaaaaaaaaaaaaaacaaaggcgtaagatcaagtgatgagttaaaatgccagttctgccatccttgatgtagttctccctttgattgttctcacttgaaagaatgccttttccttcccattgtggagtactacctgctgtcagttggagagggggtaagttgagcaacctgtcaaagactttctaagctcccttcatatggttcacagaaacagggctggattttcatttcttctttcattcaacaggagtctctttcatgtttgaaaattggaaacgtgtgtttttcagtgtggagcgaggatgtgtgtgccctctggcacacctgtttctaatttcctgacttgaaagcataactcatcaaaaggaggagaaaaacaatttctttgtgacatgctgcttcatggcccttgctggactcaaggccttcgtgggtttgccaccttggttccctctgtagaaggttcttgtgaaatgcagaattcactaaatacaactagtgccttttatggcacagggctgtttttggta

SEQ ID NO: 99999 - DNA, 1001 bp, Homo sapiens
aagtatttatagagtgtaagagtgtaatagtagctctatatagtaacagtcattgtatgttttttaacctttctaagatttcattcctgtacaaacgagctctgtgaaattattatggccaaaataccaatgtttgtctttcacctaatttatctgcacttcataaaaatgcttaaatattacttcatcatccttaaatttgctttgcagtatgtgaagcctatgaactaattcttgaatatttatgaagtaattctgattttttttaggtgttacaggctcttaggaatatttagcttaatttggaacaggattctttattatttgcatgacttttcagttttgaaaacgaagttacagtaaatccatgtatgtataatccagttatactgacatcagtttttgtatctttctacaggagtttggttaggtataacagttctcatggttcacaatatcctgattgaaatgctaggaaaattactttacagataatgcatagcattgtgtatacgttacttattccctctataaaattctgttttacagaatgcatgggtagtatcagcagttggagtttataaaaaagagctaatgaaaaatacccttaagagagtagattgtaagcattctcgccagaaataaatgattatgtgaggtaatgtatatgttaattagcttgatttctgccattctacaatctatgcctatatcaaaacatcatgctatataccataaatatatataatatttattaattaaaataactgaaatgtaaaaaagagacataaccctccctcaaaggttagacagtgaaataggatgaaagtcacaatttgattatttaccagaagcaatcatccttatctggtaggactgatgaagacagtcactttacattatgccttacttgggctagggaaaaaagtgtgtaaaaatttccagaattttatagcaaagaataagggcaaaaagtactggcatatgtctgtcaataaaaa

SEQ ID NO: 100000 - DNA, 1065 bp, Homo sapiens
gttagaaaacatcgtcctttgctatctttgagggtttggaatttttaagtaatcttttttatggtatgaatttaattcctctaacccagatatgttaaatccccttaaaagcatggttcaaacacgttatttttattttaacctgaaaatgcttctgttaatttttgtcaagtgatttaggaaataaatagtataaagattttattgtttatttttttgcttgtttagagatagtgtcttactctgttgtcctgactggagtgcagtggtgtgacgattgctcactatagccttgcactcctgggcacaggggatcttccagcctcagcctcctgagtagctcagactacaggtgtgtgccaccatgcctggctgggttttttattttttgtagaggcagggtctgctatgttgaccactctgtttagatttttatatggtatacatttttttcctcttgctctataaatatatttggtaccaatttgtatagtgttgcaaagccatttaattcatacctattaaacaaagaaaataaaagattacttaagaatagacatcttgactatagtttataagaaacatcgttaatagtattgggcatcagaagatgattttctaaagagggaagataatatcattgagtgttcctatgttcagatttttgctggtttcatgcagtccacataggtgagagtagataattctagctaaattattattatttttgagacagagtctcactgtgtcacccaggctggagtgcagtggcgtgatctcggctcactgcaacctccacctcctgggttcaagcgattctcccatcccagcctctgagtagctgggactacaggtgcacaccaccatgcctagctaatttttttttttgtatttgtagtagagacagggtttcaccatgttggccaggctagtcttgaactcctggcctcaggagatccacccaccttggcgtcccaaagtgctgggattacaggcgtgagccacccagcccggcctagctagattatactttgtttacacatagttgataaactgtagcccaca

SEQ ID NO: 100001 - DNA, 1030 bp, Homo sapiens
gttatataaatggaatcatacagaatgtactcttttctgtttggcttctttcacagaaagcttttattagacattgtatcaccgatttattcttttttattactgattaatatttcctaatataaatacacattaatttgtttatccgttttcctgttgatggacatttgattttttttccagttttttactattacgaataaagctgctgtgaaattctcataccattctttttgtggagatcaggttaggatttttatatataggagtttcactgcatctcatggagaatatcttcagctggaattactcaagtagttcagttttccattcaggaaatgggactgaactgggtagtaagaaaataatggtgaacaagatggaggaagctcatgctctaatgagaccttacattttaggagaaagagacatattagcatataattaagatagttattcttgtaactgttatgaaggaaaaaaagaagaacaaaatgatgtgatatagagtaacttggatgtgagagtctgaatgaagactttgttaaataggatggtcaacggagacccctatgaggagataacatttgaggtgacatctaaaaaatgagtggcttttatgaagactcagtggaagagtgttccaggcagaatgagctgcatgtgcagaggccctgtgggagtttggcacattacaggaatggagagagagagtcagtgtgccaaatcagtgagcaaggggagaatagtatgagatgaagctggagcagttggtatgggctagctcctttaggacctggtagatcatggcaaggagtttgaattttattcaataattttattcaagaattttatttattttattcttgaattttattcaagaataatggctagccattgaagagtttaaagtagggaaacagtgctttcttattcacattttgcaaagttctccatgggctactatgtgaataatcagtccaagggggaggtaagagtagaagttgggagactagttacaaagtcattg

SEQ ID NO: 100002 - DNA, 1753 bp, Homo sapiens
ttttctggtttaaaaaatgttttatttactttttattattttttggtgcctggtggcttttttctcatttgcccattcactgggaatatcaaccattgagactttctcctttctttgtggataatctccagtgtgttttctcatactgcattgtgcccaagtttcgtctcttacctcctttgcgcagagacctttaaaacgacagttggaggaggcttgcatcaacagatgccctgagggtagtatctgccttcaggactcctttgtttctctgggttggaccattttcttaattttaaaatcttaatttatttctcttattctcctactatccctgtatacattgaaaagactttttaaacccttaatttaacatactgaaggattttcttctgggaaggctcttcagatatcttatttgacccattgccctaatatttcttaaatgttatatttaatgttttttatttttattttataggattcagtttagctgcatttaaaagaaacaagaggaaactagagctggcagaaagggtggacacagattttatgcaactaaagaaaagaagacaatcaagtgagaaggtcaggtggtgtttgaaatattcaaattaatgtatcagatgatatatcttctgcatttagatacaagctttaggacgatacaattcagtagaaatagaatgtgtgtcacatatgtactttaaagtttttcagtagctacattaaaaatatgttcataatattaggctcataaaagagaaaaagaaagtagaaagaaacaagggaaattaattttaatatattttatttaaaccagtggatctaaaatataactttgaaatatgatcagggaaaaattattaatgagctattttacattatcgtttttagtattaagtcttcagaaccagtttgagttttccacatctcaattataacactaaatttttattagatatatttgatctgtatttatatttcataaaaatttactgtgaaatagtaaatttacataccaagttattacaggtatacttaaatcttcctaatagtttaatatattagaaaattaaaattttataaaattaaaaattcagctttccatttgtccttgactcattttaatttctgaatagctacatttggctcgtggctactgttttggttcttacagctcctgatagtgattcttaacatgactgtttagggagtagagtgtaagtataagaaaatatacatattgtattcaggcgtttttagggatagaaagaaattgaaaactacaacattcttgctcagcctgtggcttaggggtttcttagcatacagctcatgatgggtgtcccaggtcacatagtcatgtgatgtaccttagcattcatcaatattctttattgtttagttcttctgtaatggcttagatactgttttgtcctttgtgtcatagttttatatggtttacctatgtatgaatgcacaatacatcatcttttgtagtgatagatattttcttggtgtgttgccacgagataatcagtttggtacaaacctttttaattttctgccggcaaaggataagaatttagaaggcagatgaacaaattaataagtagatcttgatatgatggtggatagtctatttcttgggtttctgcatcggatgtgatgtgtgggtgaatgaatttaggacttttttgcctttttaaaaattcatgataggccaggtgcagtggctcatgcctgtaaa

SEQ ID NO: 100003 - DNA, 1059 bp, Homo sapiens
cccgtggtttagatcaaggattggccaactatggccagaaagccaaatctggccagatgcctggttttgaatggcctgcaaactaagaatgattttcacttttttaaatggttgaaacaaaatcaaaagaagaataatatttcatgacaccagagaagtatatgaaattcatatctcagtatccataaatgaagttttattggaacacagccatgcttattcatttgtgtattttctattgctgcttttgtgctacagtggcagagctcagtagttgtagcattgtctatgtggcccacgaggcctgaactagttaatatatcttgccctttacagaaaagatttgcctggtacaatggtgtccaataaatatttgttgaattaatgactcttaacctgtgctaccacagaggaatctaaattggaaatcttttaaccatccaattcttgaaaatttgagcttaattggcaactaaacaaaaaaaaattccccaaatgattttttcagtcagtaatacagtttcattggcttccattcatcctgtaaatgaaaactgatgttgggataccagaaaattagtaattcttagaatagtgctagctaagataggcatattgtacaagttttactagtgttagtttgaaaaagagtataatgacatggagtacatatcctgtttttgtaactcttttaaaaagatgcaagaaagttcatttcgaaagctttttccccacctttctcagctttagaaggttaaaggtatctgcttatcaatgaagttagtaattaaaatgatttttctttttttttgagacagagtcttgctctgtcgcccagctggagtacgcagtggtacagtcttggctcactaaagcctttgcctcccaggttcaaggttcaagtgattctcctgcttcagccttctgagtagctgagattacaggcacctgccatcacgcctggctaatttttgtatttttagtggaaatggcatttcatcatgttggccgggctggtcacaaactcaattaaaatgattttgataggacattcaattt

SEQ ID NO: 100004 - DNA, 1013 bp, Homo sapiens
ttcaaagctttcttgtgtgtatagtatacatatggaaaactatacacatttattttaaggggacagcttcatgaatttttttcagagtgaacatggccggccttgtgtcactagcacccagatcagcaaacggaacatttctgccctccagaaggccccttgtgcccccttcagtcacctcagggtaacactggtcctgacctctattgccatatattagtcttgcctgttctagaacttcatgtaaatggaatcatatattatgtattcttttgtgtctgcctttttaaattgaagtgaaattcttagaatacaaaatgaagcattttaaaatgcataatcccatggcattaaaatgctcacagtgttgtgcaactaccactttcagttccaaacatttttatctccccaaaggaaacctcatactcatcaagcagttgctcttcattcttttatcctttcccccttgtggaccacccatctgctttctgtccatggatttacctcttctggatattttatattgatagaatcatgccatttatgtggcctttgctgtctggcttttttcgcttagaataatgtttttaaagtttgttcacagtgtagcatgtatcagtacttcattttttggaggagcagtattcaacattattcatgtatctatcacagtttgtttcattccaaatccattcattcattgatggacatatgggttgtttctaccttttggctattgtgcatagtgttgctatgaatactcttgtataggtatttgagtaacttttttcagttcttttgggtatatacctagaagtgaaattgctgggtcatatggtaattaattctatgtttaacttttttttttttttttttttttgagacagagttttgcgcttgttgcccaggctggagcaatggcgccgtctcagctcactgcaacctccgcctcccaggttcaagctattctcctgcctcagcctccccagtagctgggattataggcgcccacc

SEQ ID NO: 100005 - DNA, 1094 bp, Homo sapiens
atggaaaggtcagtttatagatcatattttaatgatttattggtaaatcgattcattcctgttgtttcatatagcttttttgagattatcttaataactgatgagaaagtgaattctgttcactggatggtacaactctggtttcactcacagcagagaagattaatattgtgaaagaatttggtcttcatatttgggactatacatttggatgacagttgcttttttggctgcctttgaaatagttttggatcaagtagtgacgtggatttaagattctggaccataattttgcatatttcacatggtgtaacttgtgatgtgaatttcttttttgagaaaattggatatagaactgggtgagtcatgatgctaccattttcttaggattgtttctaaagtagaaagtgtttcatggattctgatagaaaatgaactatttataaaatactgcctgaagctcattttgcacattggtgtttttcttataaagtatgaagacctggtttaaaaaagtctaatgagtaataataggtgaaatatgaacgacagacttttggaaggtaatttataatcttttgtgagaaaactgatgaatttggcagaggttttgaagatcttgttgtaacctttgagaaagtttggttaattcattctgaaaactgattattttggtaggtagaatactgtgtattaagaatagtgataggggccgggcacggtggctcatgcctgtaatcccagcactttgggaggccgaagtggacggatctttgggaggccgaagcggatggatcatgaggtcaggagttcaagaccagcctggccaatatggtgaaaccccgtctctaataaaaatacaaaatttagctgggcattgtggcgcgttcctgtaatcccagctagttgggaggctgaggcaggagaattacttgaaccaggacccaggaggcagaggttggcagtgagccgagactgtgccactgcactccagcctgggctacggagtgagactctgtctaaaaaaaaaaaaagaatagtgataggaatagcttttacattttatatagtaaaaggcaaattatacaggttcc

SEQ ID NO: 100006 - DNA, 1022 bp, Homo sapiens
ttttaagtagagacagggtttcaccatgttgaccagggtggtcttgaactcttgagctcaggtgatccacccacctcggcctcccaaagtgctgcgattacaggcatgagccaccgtgcctggcctcaacttgtaattattaaatttgtggaagaatttcaattaattatctaacaattaacttttctatggactctttgaatgaaatatatgttaatagtttaaggttaagcttacactaattggaagaattttcctaaatcttaagaagtatgttggaaatcatgcttatacttccccctgcagtttctctcaccttgaataattgtgattcattaccttaaaacaggataggttttcagatggagttcagttggggtagtattgtaatagcttgggtcaatggaaagatgtaagaagattggattctagtatttgctgtacttagagaaatataagtagcagtattgagtcctttcagaatactgaaaagtgctgagaaaaattctggagagctgtattaacaatgtgttatatttaatttgagaataaacacttatctttagttttggtcagtctattcagttaagtcatgtctggattattgaacagatgcaaacagtcattgttcttttctctttagactttgggatatactttttgatttaaaaaatgatgttcttgccactgagcttaaggaaacaatacataaacatattttaaaaacttgcccgttatattattacttaggcagatattgaaattgatgtgaattccttaaatactaattgtggattgaaatgactgaaatgttctaatggtctttattgcctagaaagtgtatctggctgtatatttaaaaaatgtgataatttgtattttcccaaatagtgaaaagtacaccgttcttaactccatgcatggggaagaggaagagacaaggcaaaagaaatatgtgtatatgtatgtgtgtgtgtgtgtgtgtgtgtgtgtgtgtgtgtaaataccacagagacacacac

SEQ ID NO: 100007 - DNA, 1034 bp, Homo sapiens
ggaaccttgatgaatttgtgcaggggatattgaggtcttcagaagatcgacttgctgctcaaacttggagaagatagatttgtgtcaatcagttgagaggattattgtgaaaaatatttttctggttgagaatactacttagggaatcaagtaagacatgatgacaaaaacaatgatgagtttgagggaggagatgataaagtcgacatttccaggttgactgggttgtggcccttgtatttaggctctcataccaaggcacttaccctttcatgcctttccttgtgaaaattgcccaggtgtttaccattagtcctagccgtgttttctgtatattctcatgcttaattgtggacctgagctttctgtatattctcttgcttaattgtggacctgagcttttgatcatgctttgtagattttaatttctcagattggtcctaatgtagtcaaggaaggtgaaagtatatggtgggcacctagttctattgaatctgacatggggatgtgtgatgccctcctgatatgactgatacatttcataccagctctaccagtcattagccatgtgtccgtgggtgtggcacagtctgtccttgactcagtttccctatttatgaggatagtaattcccacttcatggagttgtgaagataaactgagttagtatatgcctaatacatgacagtctcttagaacagtgtgtggtacgtagtaagcaccccataactgttagcaattattacagttatgaggtgctttggaaatggtatgtatgagatgaatatttatggcaactattaatgacaagttttacagcatcaaagaaaggttaattatatgttgaggataagaggagaaaaatgacataagaaagaagatagatgtatttaccaccaaatgttacctttactcaaaacagacacacaaagagggcttcatctaacttaactagttcaattgttagttgaaaattactttcatggagtcactgtaggtctgggaaagaaggttaatgagtatctggagaatat

SEQ ID NO: 100008 - DNA, 1043 bp, Homo sapiens
tggacatgcgagatgtaagacacctcaacttcaaatgttattcagaagcgattcagctttctgaattactcttatgaattctggatttgaaacagtaacttcccaaatggcaggggctttctgacagtcagcagagaggaacccggagggaccctgtccccgacaccttctgggttattagctgcagatcaaaagaactcctgattttggaaagaggttcttgaaaagaagaggggaggggaccttggtgaagcctctttggggacatgagctatttttagggcttttggcaggaaaagagcttttgaaaacggagataaggcatggtattaaaaaggcttacactggagtaagaagtcataaaacgccatacagttagggcaatagttttgttttttactaggacagcatcagtttatatggagtatttatataacataagcaaggtctcttgatattttaataattaactggattttattttctactttaggtgcaggttatcattctgaatccaaagccaaggagtataaacatgtatgcaaacgagcttgtcagaaggtatgaacacaatgtgtatgatctgtgcattgcagttttgaacagaaagcagttttaccttgaaattcaacatttaaaagtttcatttctaggacagtcttccagtttggactacaaaattattttgcttgtttttgtaggggatcgttttgtgttgttttgtgtttttctccacatgttgcttagctctttccccactttcccagattaaagtctgtatttttgtaattgtgggcacacaatcatatctcttttaatctttgcaacgatgttgaacttctgtagacagaaggatagagaaaacagcttaaaggcagtcaatgtgtttttccatgaagggaaaaaaataaataaaaaaattaaaatgggtactttcctatactttttcattctgtttttcatcatgtagtttgtatcatagcaagttcattgtcattccagagttcagttttgcccttgtactcagttgtgcttttttccca

SEQ ID NO: 100009 - DNA, 1020 bp, Homo sapiens
agtagattcttgatttttcccactgcctatactgttttatctaatattcaaacaactaaacgctttttaatcttaacatttgaaaaatgaagtttatggttacttaaatgaaatagcagtatcacttgccataaagagaaaataactttaaacacagtgcaaacaaaacactgtaattgaagtttaactagatcctatttgtcagtggcttggatcctgagcctgcctttccattgttaaacagggaaattagcaagtgttaaccaggaattaaagatgtacggggtggggggggggctctgctgagacttttattatttcaaaaggatttacatgttaaggctattaaatgcccttgtcccttacactgaagtcatctttttggaatagtatcccatgctttaggaaatgctgctgaaagattgtggcctctgagatctaagacagccaacttgagatcacctgttcttagagaaccatgaagagaggcctattaaatattggcacaggctctgtgaatgttcagagttctcttgagaaacaggtttaggatttgggtgtattgtggattctggtggcttgggcatctctgctttcctggctccttgtacgacagtttcgtgggtgagtgctttctctaccttgaggaaaggtaggttaggtttgtgtcagagtctgcagacctgtaggaatcctaaggcctagagatgtagcttttctgtttttgtcttttttaaaatggaaaacatgtgtttgtttgtttgttttttggagtcaaagtctcactctgttgcgtaggctggagtgcagtggcatgatcttggttcactgcaacctctgcctcccaggttcaagctattcccgtgccccagccccctgagtagctgggattacaggcatgtgccaccatgcttggctactttttttgtatttttaggagagatggggtttctccatgttggccaggctggtctcaaacacctggcctcaagtgatcctcccgcctcagcctcccaaagt

SEQ ID NO: 100010 - DNA, 1139 bp, Homo sapiens
cctcagcctcctgcgtagctgggattacaggtgtgtgccaccacaccagctaaattttttgtatttttagtagagatgaggtttcaccatgttggtcaggctggtctcgaactcctgacctcaggtgatccacccgcctcagcctcccaaagtgctgggattacaggtgtaagccactgcgctcgcccctaagcaggtactatcagtggacagagagatttaaattctaacctttttatattacccaattaaataattttatccgacttcaatgggaataagaaaaaataattttaataaatagctttgataccttttttgtattgctcaattaaataacttaaaaataggatttttgaacattatctttgcatgaatttgtgtaagtaacttatgtgttggtggaaagaaatgtataccatctttgcctgttttcctttagggtaattcctctcctgcaattacttttggatggaagtatgcccctttctcagtagaagatggtaatcttggagaatgaccatggagaaggggatgagttctggagaagggctgccttccagatcatctcaggtttcggctggtaaaataacagccaaagagttggaaacaaagcagtcctataaagagaaacgaggaggctttgtgttggtgcatgcaggtaagctttgtggatggcttggaagatgccaataatgttgatttttctttttctgccttgaagtacactgagaatcacatttcacacttggaggaggcaaaactgccagagaggaattggaagcaaagcgattgtttgacttggatatagtgaggacctccctctttactccccagttagaagatcttagaatggcagctcttcctaggttttcacttccctaacctattatttactttaactctatgtaatagatgtatttaggttaggtagtattaaaaccagacaaagtaatttttgaactctggtttatgttttttaaaaataatgttgctgtgggaggctgaggcaggagaattgcttgaacccaggaggtggaggttgcagtgagccgacatcatgccactgcgctccagcctgggcaacaaaccgagacaccatctcaataaaataaaataaaatattgctgaaaaaattg

SEQ ID NO: 100011 - DNA, 1324 bp, Homo sapiens
atgtactcagagttcagggcctccagcagatgttctgattggcttatttatgctggtaagaaattgattttgtgctgtaagcatgggaaagccctgcctcacaaaccactgctacagtcattttgtctaagtggtcgttgtagttaccggccataatatgtatatgtatggcccactataattccctttgaaatacattgtccttgcatgataagaacagggtgccccacaagttgtggtccaaaggtaggccataaagagctatggaaaaacagtttcctaatgaatcagtacaaacactcaggtttgtattttatataatcaactcaccaactttcgaaatttggccccatttctggccttttgctttagtaattttgtttaattaatttattaattttttttttttttggatttgcaggtaaatgttaacgatgcacggtttcaggcaatgtacacttcccacttgttcaatttggacccctcagatcccaatttcaagaaaacaaaagctatggaaaaaatccttgaggagaaggcccggcaaagagaacggaaagaacaagaacttactcaggcaataaagaaaaaagagagtgagattgaaaaggaatcacaaaggaagtccattgatcctgctttgtcaatgttgattaaatctataaaaaccaaaacagagcagtttcaagcaagaaaaaagcaaaaagtcaaataactggatgttacttatttttgaactgaatacatcttttcctaaaatgtacaaaaataataggagggaatatttattgggaacaaagctatctttcaagaacatgaataaaatctttttctggacatagtaaaatttttctccataaataattgtacttaattgtggatgactgacaaatttttattgtatattcctacagatcagtcataattaaattacctgcattatagggtttataaaatttttatattttacaatgttcagttctaactagtggaaagttactctagctttttaaaaggctgtttacaattctgtgtaaaaatagagcagtatctactcaagtttgtgtaaatgttagggataatttgaaaaatatatatatttaatacattaatttctctggaagcaggaggcatgtttaaataactattaaaataatttatttttctagccataaaggatggaagtcaagaactttttgttgtttagtcatgttaagtatagtttatgaaattaacttgtaaataaaagtgtaaaatattttcattattttgtatagcactgatttattccattttatgcatctcaaagtactctctggaaaaa

SEQ ID NO: 100012 - DNA, 1076 bp, Homo sapiens
aaggccaaaaaaaaaaaagcaaaaaaaaaacttacttgttaaaagttacacatttagaaagtataatttgcatcacaaaataaacatttgctagatttagcatcattgcgcaaaaagaacaaagtgaaaatgagaactttttatttgagggtagttggggactcttgttcctgcagcctactaatgagtcacactaagtgaaatggggcctggtttttaactacaaggttttacctctcctgctctcagtaatgttgcttccagagattctaccttattgctatacaaagatctctttgttttggtaatccacagtcagtttacagacaacaggtggtaccccagagttctagtgattgagtcttcctttctagaagagatatcttctgccctatactcctttttgggggtggaaaaaaaagcactgttgtacatttgaacttttttttgctctctacaggctgaaatggctttgcttatgatggatgaggacgaggacagtaagaaacacttcaattacaacaagattgtggagcaccagaatctgagcaaaaagaagaaaaagcagctcatgaaaaagaaggaattaatagaggatgactttgaggtaaccatagacaccaggcatagcctcttaaagctggaattgaatctaaagtcagctctgcagatagaaattgagcatagtcaaagttacccttgaaaatgtcttaggggcccggtgcagtggctcacgcctataatcccaacacttttttggaggccgaggcatgaggatcacttgagtccaggagttggagaccagcctgggcaacatagtgggaccctcatctctatgaaaaataaaaaaaattagctggctgggcgtggtggctcatgcctgtaatctcagcactttgggaggctgatgtgggcagatcacgaggtcaggaggtcaagaccatcctggctaacacggtgaaaccccatctctactaaaaatacaaaaaattagccaggcgtggtggcgggcacctgtagtcacagctactcaggaggctgaggcaggagaatggcgtgaacccaggaggcggagc

SEQ ID NO: 100013 - DNA, 1553 bp, Homo sapiens
gggagccttgtttccacctcatatgcactactcattctttctttcctccattatgtggaggaaatgcgtatgtgtaaatgtgtttggtaaggttcaggccatacttggtaagtcagtacagaaatcactgtaaggatttaccatttgttctcatgcattttgccttccccgatcattataccacacacaagaaccccaaaaggcttgctcctggagcaactccacgctggcattgtaaagagaaggagtttatgaagtttccctgtttttttcccttgtgactagtgggccagaatagttctcaacaggaaagtcagaattgctcaaaattacttcctgattgttacagctttttagtactgacattttattgatgagaaggagattaagataaataaagtctattatagaatgtgagattcttgggaattggacagagaagtggaaacttagcatattctgctttttatcatacctgagtggtcatttctagaagatgatggattttagccttatcctctggtttcaggaaaccaactttataatggagaaatgctaagcattatagtttccttgttctctatccaaaatgtttcctttggcatgtgaagtctggtcaaattgcagaactcagaataggattcaaagaataagttaaatggtttgatggcttggggtagccagttttttggaatcaacacatttaaattgagagtaagctttctgtaaagttattatcagaagttccaaagaaaaaaggtatagataaaatttgcttgcttataatttacttttgatttcagagtgttcccagagggtaattgtttctatctgggcttttctgtttttgtgtgtgtgttttgcagtgggttttgttttgttttgttttgttttgttttgttttgaaaaagcaaaacagcaaggccagaattttttacataaaatttaggacaaaaagctagtgtcttgccatgtttgtttattcattctgtaataactgttttgattgcctaccaggtgctgagctctctgctaggctagagatacagtagtgataatacaaacaggattgcatccctcatggagtctggtttaaagaaagacatgttagacagataaatagtatgagggtatggtaaatgttttcaaggaaagaaatagaagatataactggatagaagtaggagatatgggagtttacattgggtaggcaaagaaggcttctctgagatgatggcattagagctgagacctgtggaatgaggagtcaggcatgaagagctgggggaagagcattgcaaatgaggggagagtgggtagaaagactccaaggtgagaatgcactgtgtggtgttaagaattgaaagacatcagtgtggctggagcattgtcggagagggaattggtatgaggacaggctggagactcagtggaaactacccctgtagggctttgttgtcctgacaacaaatttagattttactttactgatagtggaaagcccaaacagtctttaagcaaagatgagacataatctggtatagattaacata

SEQ ID NO: 100014 - DNA, 1929 bp, Homo sapiens
tgtttcaaactgttggttgaagctcaaggcccaaaagcagtgtttttagttgttttatatatttttacttttaccaaatgttttgagggggggaaatcagtgcacgtgggaggaaagggttgcatacttctgatctaaaccattcattttgcagataaggaaccagaggcccaaagttttagattttattcttgggccatatatttcttcattctgtaggtcaaactagcattttagatgtatctgataatagaagagaggatgaccaggaattcaaaatttagctgtgcagcttcctacctccatgttcttagacaaattgctaaatgttctcagtctgtatatactcatcaacaaaagagaactgtatttagtatcgtttctactttcttagaatttagaatgtatctgagaagatgatctggtttgatgatgtctctttttttaatgaattttgtgtcatctaaatatttaaagatccacccaactatgtcctctaaacactactacaaaataaaaaacatctttattatcaaaggggacagcacagtatttacatttcctttactttggcaataatgagggtctttgtaaatggatagatcagccttagggctttttctcccaccttgttaccccctctagttattgcataagatacctagaaacgtgaatcgggaacagcagactataggaagaaagaccttttgagatgaaatataagagcaaatagcagcattgaaagagctaaaccatatgatgaaatggaatctgaacttggtggtccttctgatcttttctatgaggcctcacagaatgcttgagaaaagattgagaatcctttgctcatgggatatttcaacagggattccttactaaacaatttttgttcaaaacctgtagtttgcagagaacataggctttcacttggatgacagaagcaagtggggataattaaagacaagaaaagccacttgtcttttgctacaaaaattaattagtatcctgagaagaattagttcagaagttttcttagcatctcaaaacagaaaagtttagagaaatgaaggctgagcctaaatacagtatttttctttagtggcttgaccatgtatcaagttgctaggtttgtttgttggtttgttttgattttgtttggttaggttattgttgtttgttattaggaaataacttttatagaagttggtcctatgtcactgtatgatattggggtattacagatatttaccattgcatgttatctttgttactctattaaatatgcataaattatatttgtctttataaattatatgtttaagtgattgccagacaataagacattttaagctaaactatttggatttttcctcaggtcttaaagaaagtgcagaagagatggtcaaaaacaaattggaaggaaaggataaactgaccccttgggaacaatttttagagaagaagaaagagaaaaaaagactgaaaaggaaacagaaggtatcattgataattatgaccaaatgtttgttgaataccaaccatatatcagatggtaccaggtgcttggaatccattatctcaaaatgtaaccactcactgaagtaggccttgttatcatcccaattttaagaaagaggaaagtgagaatgcagaaagttttttcatcatggccacataatggtgtacaaagcctggtcacagtccagagccacttcaactgctgcattctgacattttacatttacatgccacctacgtaaaacacatagttaatatctagatataagcagtatgattctgttctgtgtttctgagcaaaagaggtacatacagacatttttccttgaggatatatgcacatagaggtttttaacatgagtgaaattatgccatactttccatctgtcaacctgcattttcaccttacag

SEQ ID NO: 100015 - DNA, 1059 bp, Homo sapiens
attgagtgttacagagtcaggtttaaataaagagtgctggtttcagcctatatcagaaatgtttaaatatacattttgtttttataaccaaagccgattatagtacctagtggagttattttaagttgttcatctcctgccctttgaagacttttcagatatttcaaatgaataaggtaggcagaatgtatactcttatttttgtgtgttttgcaaggatatttaaaaatatttttatatgtatgcaaactgccagaataattctgaatggattgtgcttaaattattattgtcataattgagtcatctatgtttgtggttggctgtgaaagatgtttttgccccttatttgtaggattattgatgttatttttaactaattcagaagtccttggatatgcacttaaaattttttaaacaaatttgtgcaaaactaaaagcagttacaatgaagttgtttttcagtcacatagtggctgctctcagaggctaaaactgtctctgaagaatgttctcgtacttatgccaagaggcttctgggatgggcatatttttaagaacttagaacataaacagctgtgatctgtggcaagagatttaaatgacctcatgatgacaacaagaacaaagcattttttaagttatcatggtggtgtgtgaattcattgcaatgtgtttcttatgctgctatttgggtgtattaagtgagagccaggcaaaaaaaaattacagactgtattaaactgaagatactgtttctttattgttgtaaacaaagtaccagaaaaatattatttcctaagaataaacatttcacgaattattttagagttataggtccttttcttttttgtttttaaccacatgaaccacttgaggatcaaggccatttatttcgatcctaaagttttgattcattttctgttagagagaatatgttccaaacatgaaagatcaaacagatggcttgaaataagaatccctcctttaagacagatcaattaagtgtttattaagtatttactatgtgtctggcactatgctaaatattatgaaata

SEQ ID NO: 100016 - DNA, 1104 bp, Homo sapiens
gcggccgggaagaggcgctcctcacttcctagataggatgacggccgggcagagacgctcctcactttccagactgggcagccaggcagaggggctcctcacatcccagacgatgggcggccaggcagagacgctcctcacttcccagagagggtgaaaatgccatcttcattatcttgcagcttataggaaaaagaagcccaaagatgttatgtaactgcagaattattatccaatataaattttaataaaaaggggcattcccaagcatactgctatgacagtgcaaatttatattgcaactgatttttattctacatgagaccctaagtctttcatttaatattcagaaatttaagtctgattttgatatcctgtggtctaacagcatcttttaaaagagagtgaccataagatctgaacacgagttagaaatgaattgtttctgtgtattaagtgaatttttttttcattaggtgatgatggagtcaatgtagaagaagatgggaaaacaaagaaaagtcagaaggatgatgaagaacaaattgctaaatacaggcagctcttgcaggttattcaagaaaaagaaaagaaaggcaaagaaaatgatatggaaatggaaattaaatgggttccaggtaagaattagatactaaatgttttctctttttcgaatttcagcatgttgagtaccttttaaatatgaaggagccggaaatgttttggtgaggaccttaacatcatatttgcatacaccatttaactaacttaatgactagcattttagactcttaccaacttatttttaattggtttctttgatttactaactataaatttttcctgtccatttatcagagtagcttttcctaggtttgagcctgtattctcaagatatagaaacttgaatccaggcaccacgtgttctaaagttattacacttcttttgaatgtttaattcttaagtgaccttttcttccataacccccactagtccttaattcatgaggtttcactaacacaaaatatgtattacatagtcttcgattttcaatcttgctgcgaatagtcaaagaaatatagcatagtagagtaaaatagtac

SEQ ID NO: 100017 - DNA, 1140 bp, Homo sapiens
ttaattaaatcctaaaatgcttctttagtatgaccataatgccatttaacttttgagttttcgagatcccatgattggcctatcattgtttcttttagactcctgaagacactgcttcatttttctaagcttttcataaaatactactccttaacagtatggaaaatcatgtttaatcattctggtttctttgttcagacatctcatattaatacaaccacataattgcttaagtatttaatactctttgaaaatgtgtatttgcaatgggagttaagttgggtgcaaagggcctcacatttttttaaaggccttagtggctgatgcttgttaattcttttggcattccaaataactagatgaccattttattttttattgttcacagaacagctgagtccttttttcaattttcctctatctgtgtcttttcccctcacacatgtggagaaagacgtaatgatttatcagtatttcttttttatttgtatgcctatatgggcatttagaacttttctgaaaattctggatagtgtttcttcactatcagctgtaagataaaggaaaaaagataactttttatgtacacttgtgaagattggatacaagttgttcaaatagatttctgttttgggagaactgaactaaattttaaaatgacattttttggcattagggtagctaatattgtgaataaataagcattaatttgttaatacattcttgttaagagcttgggctctgctagtttcaaatcctaacttcaccatacatagattaggtttactaaaccccctatatctttcttccatagctgtgaaatgaggatctaataataccaggcttatggttggaaatactgaaatgatgtaccttgtatcttgtatttttatttcttaaaactttaataaataggccgggcacggcagctcacgcctgtaatcccagcactttgggaggctgaggcaggcagatcatgaggtcgggagatcaagaccatcctggctaacacggtgaaaccccgtctctactaaaaacacaaaaaaattagccgggcgtagtggcgggcgcctgtagtcccagctactctggaggctgaggcaggagaatggcatgaacccgggaggcagagcttgcagt

SEQ ID NO: 100018 - DNA, 1293 bp, Homo sapiens
tgcttttagagttttctgtttctttttgtctttctgcagttttactatggtaagtataagagtagatttctttttgtttgtggagcttgaggtttgttgttgggttccatttatttgtggagtggtatctttcatcagttttggaatattcttagccattatgttttcagatgttttttctttatccttttaggacatcagctaaatacatgttagatctcgtcattatatcttgcctatctctactcttaaatttttaatctgttgtctctgtactgcattctggatattttcttctgacctatcttccagatcactaattgtcttttcagcagtgttaaatctgctgatagacctctccattcagtcttaatcttggttattatattttttacttatggaggttgtatttggctatttctcaagtcagaaataccactttttatattttttactcatagtctctgttttaatatttcatgtattttcaggttggtgtcttattttacaaggtatttctctcttgtttatttgtgtgcctagttaattttgtgtgttactttgacatttgaagttagggtatctttgatcagagaagactttaatttactttggttggtttagaaccacatttctccaaatgttaaggcttaggttccctggcttctgcagatgattaaagtctgcatgagggctggtttacttcagattgaccatttccctgggagtatatccctctgggtggctgcttaatgtcagggtactaattgaaattccctcttttttttggtctttaacttttgtcttcttggtcctgaaagcctgctaaaaccacaattgactttcatagctctttgttctgtggatcaggaaacaggaaatgatctcagagcaaaacaggtctttaccctggagtcatccctctaatattcccttcttggttttgaaatagtaagtcttctctaacttgacagttctttgaaacttttctttcttttcttaacctctttgaagctttataaaataatatttaatccaacttaattccaacttaatatcttcagtgaaagggttagtctgaagtacctagcttgctgttaagaagttcctcaaattatctttatctttattcaagttgtttttgttttttgagatggagtactgctctgtcacccaggctggagtgtagtggtacaatctgggctcactgtaacctcttcctcctgggttcaaacgattctcatggctcagcctcccaagtagctgggactgcgggtgcccaccaccatgccc

SEQ ID NO: 100019 - DNA, 1088 bp, Homo sapiens
gtataaggttgtcgtcagttctgttctatttctttaaaagaaagcactggataaatggtatgacagagataagttggttattacaaaattgatcttcattatatgtttatttttctgtatttcatgtaaactaattcagtcatttttcatgtgtgtgtttttattcacatttccttgagcttagcatcttgttttgcttttaatttttcgtttggatctcggaaccatcttgtcccaggtggtatgtggaggagatactcttatttttgtttccaagcctcgtatcttgttagtctctagccaaagtgatctatttttaaataaaatttctcaagatgctctagcttcctatagtggatttggaagtgagtcacccttactgttttcattgagtcaagttgtgacttttagagttcctgacttcgacaggtctagatatttgtgtaaaggaatgtacaaattacattgatcctatttttttctgtttagatatatccttcagaatttggaaaggagaggatgaaggaagagcaagttcaaggaccagtagagctattaagtattcctgaagatgccccagaaaaagactggtattaaatcactatagaacataaaactaaacctcataaattcatgtcattagttcagaattctggtcaccttaatagttaaaactaaagtttatacttgtgccattcgtggttaaaacaggttgcaaaacagatttaaagtctgttaaaagtggtacattattccaagaagatttttgttcgtgtatatttctatttctgtattcatgaaagtaattattgcagtttttgaaaaacatttcatgattaaactgatttggagttcttttgaattctttcagcctcgttgctctgaattagtacgttttgcttttttttttgagacatcattgaagctctgtttgccttcaaattatataattttttcttatttgagaatcaaatagaaaagtgaaagaatgataaaacttttttttttatcatcatggtgcaatatagaaaataatttaagatagtttttaagccactaggtggagctatatttgcacttaataaaaa

SEQ ID NO: 100020 - DNA, 1985 bp, Homo sapiens
tgattttatttgatatccatgtattcttttcactcagctagaagtttcactgagagcactgtttgcttctcttttaccaactgttgtatattgagcacttagcacgtagcaggcacactgttaagtattgaatgaatgtctggatctacttgcgtgatgtgagcatgtgttaggatttccattaaataacttggttaagtgtattttcctttactctgtttcatagaagttatggttaggatttctatcataaaaattgactaagcatttactgaatatatatttgtctttactgtgtttcatagaaattatatttttactggagttgatgtcaagataatttggattcagtttaattcagcatatatcttttcttaatttctttcccctttaacattttgcagtggttcaactcataatgacaagagacagtgatggttatgaaaactcaacagatggtgaaatgtgtgacaaagatgctctggaggaagattcagaaagcgttagtgaaataggaagtgatgaggaatctgaaaatgaaattacaagtgttggtagagcttcaggtgatgacgatggaagtgaagatgatgaagaggaggatgaagatgaagaggaggatgaagatgaggatagtgaggatgatgataaaagtgacagtggccctgatcttgcaaggggtaaaggaaatatagaaactagttctgaagatgaagatgatacggcagatttgtttccagaagaatctggttttgagcatgcttggagagaattagataaagatgctcctcgtgctgatgaggtaaccttttgaataaacaagattatttgtgaaaaacacagtacaagcagcttttatggctggtagaactgatgtcattaagtgggaaaagcttattggtaatagtattctttatgattctgattaaaatttgatatggaatataattatatgaactagaagacgtccaagcagataagaagaggctctacataaataattaaaagttgcatgaaatttttaatacttgttttagctagtagtttgtatttctgtttgtacggcacccaaaagaaatgttgcagggtaacatactcaacttccttactcatgcatgcatggcaaaatagctgaacaaacttggtggttaaaaaatcagctcatgatcatgttctgatttaagaattaagaaccaagtaagagaaagtacttacctgttatggttttactattgtttggctcatttgaagttctcttttatatactgaattacgcttagataactcctgtactattaatttcagagcataggggacagaaggcattacatttttagaatctttatttttcaagtattgagaatgatatggattatgtactatttaattcttctcatttctcagattacacgtcgattagcagtttgtaacatggactgggatagattaaaggcaaaagatttgctggctctgttcaattcatttaaacccaaaggaggtgtaatattttccgtcaaggtgagaattgatttcattttgaaataaatatttctaggcattttaagttaaatctgatttttttttttttttttggccatagttttcctttttaggaaaatactgtggaagttgtccaatccaattgagtgtgaaacttatgtaacaggtataaatgttagaaaggaagaggtgaaattattattattgataggttatatgattgtttacacattaaaaatccaaagaaataaaagctcagtaaagggacagcatataagaagtgtttttaacaataaattgcattccttattgctaacactggccaattaaggaaaaaatctaattatactagaaacaaaaccacataaagttcttggaaattaccttaataaacacaaatgacctatgtgaagtaaactgtaacacttgataaatttgaaaaacttacataaattttgaggataccatatttcaagccaacctaa

SEQ ID NO: 100021 - DNA, 1036 bp, Homo sapiens
tcaaataatagagtttttcttaagtgaccacttacatactcatctacaataaaccccaactaactaatttttcactttgtgtacctcatgctaatatccgtggacagtaatgtgcctgttgtgttccttttgcttttcatccttgtgatcttatgtcacatggaatgtaaaggccacatatatatatgtgtgtgtgtgtgtgtgtatatgtatatttttaagaatatttagtctggatttcatgaaattgacttctgaaataatttgcctcaattttgtttcctggtggtttgagaagaaagttcctgtggtgaaattgaaaaggggataaagggaagtacttattttaaaacataagtaacttgtggattgttgaatactggaaaaagagtgttacttccccgttaacctacgcctcgtgtaatccttcaggttggaagtcggatcgcagaccgtgtatatgacatacccaggtaagtggtggtgatcataatacaataccatcaacttttgagtggaaattcaggagattaaatgctgagaacttgctatctgaaatggcagaacctggaagaatttactcagactggtgatttaaatcactctgtaagtctcctttttcttgtctggagagcaaatgttttcttcattgttgcctgaaaaaagaaaagaatgtgtggaagcacaactcgtatctatctccaagcctgaatccacttgatttggccaaaagcaagtaatagaaagattgctccaaaaatggagatacttaacaacatgcgaatttttaacatccgaagcctctgtacctaactgtgccatattgcctgtgttcatcatcaagatatagggcattaggtaaataaggttatctaccaccagggattctccagctatgtactataattttgacaaagctttttaaaaacaaattgcaatggggctctttttgttccagtttttcaggaagaatgttcttagtagataaaattttaagttttcttattataggtttttttttttaaacctatggcct

SEQ ID NO: 100022 - DNA, 1031 bp, Homo sapiens
gacagcatggcatggaggataatagttccagctcaggattcagactgaccgaattcaagtgttgactgccccttgttagttgaggcacttggtttgacttacttagcttcagacacttagcacagtactttgaacctggtacgttttcagtaaaagtttaactgttacttaagttcttattttttagtttaacattaatacttaatggtatttcacatgatgatttctaagtattccactgcttcaagaagtctgagaaatagggataattattgataagtatgtcagttattttcaagttaatttacattagcttctttgcattctttatctggatgtattattgagttaaaatatcctcattaaatctgttcttcgagtccacatcatggagccacctggtggaaagctggctcatcacaaggtcctgtgaatagctagcagacagacttgccttgtactgtaggctctggtatatacagcttgtaaggtgaggctgaaaaggcagatgatgtaaccttctggaagttgtgtttactggaatgattttacctaagaaaaaataattcttaatttatagactgtgttatggacagagcataacctctgtgtctttttttttagaaatttcccccttgctttggatcttggttgtggaagaggttacattgcacaatatttgaataaggtatatttattcaatgacctaatttactttgaaaagtaacattggctaattttaaagaaagactttcctaatcagtttagcttgcaacatatttagattttaattatatcagaattgttaatttgtttttttttttaagtggtagaatcaatggtggttttctcccttctttagaatttttttcttaaagggtttttctctgaatccattatatattatgtttctaccgataatttatttgaatctatagaagatatatttctctttgttcacatttttttataattaccataaaaatcagattggcattcatacagaaaatgtgacttttagctagaaaaat

SEQ ID NO: 100023 - DNA, 1050 bp, Homo sapiens
tcgattaacccataacttacacagttcaaaaaagaacttcttatcattttaaagatagaaaactgtatgtgttcatggtttcatggcactctttctctccctttttttttctctttttaagggaaaagctctgattgacaatgtttagtttgtataacacatcttaattgacacaaggtaggaatgtataattttttactgttaccttaaaaagtagctcaaaaaatgtatcatagttaacaagacaaatttctaaacatacaactccattagaatcttcaaatctagtattaggtgtaaaaagggccttagagtattccagatgataggaagaaaaggggataagtaggggaacctgtaatattaccaccaataactacccccaaacagtgccatatgaagcagaaatgagagaatgtgtgttctcaaggcctagggtgagatcaaggctaaagaaggtaggacagggtgctgtactccattagggctagagaaatctcgaaagaagacccatgggcaatcagtgagtaataagcatgaagtcagcatggtacggtgacggggtaggacagtaggactttgttctccgacaggagtaacttggatccttaccctatttctttactagatagggaaatttgagtaacttacctttttgagcatttatttcttttaaaaatgcaaatgtgtggctgggtgcggtggctcacgcctgtaatcccagcactttgggaggccgaggcaagtggatcatctgagatcaggagtttgaaaccaacttggccaacgtagtgaaaccccgtctctactaaaaatacaaaaaatcagcgaattgtggtgatgcatgcctgtaatcccagctactctggaggctgaggcaggagaattgcttgaacccgggaggcggaggttgcagtgagctgagatcacgccattgcactccagcctgggcaacaagagtgaaattcccgtctcaaaaaaaaaaaaaaaaaaagcaaatgttactcacctcaccctttaaagagataaagggtgtgaagtaccaggacc

SEQ ID NO: 100024 - DNA, 1094 bp, Homo sapiens
accctggtgagagctcttttgttagagtgaggagagtagaagaggagtaggttgaggagtaagtggaaagtgaggaactggagatagcagatatgtgctgttctttcaagaagtctggtggtgaagaagaggtgaaggatggaaaggttacaggtgtcagaagagaggagaggaatagaagttgagatgaggttgtttttttttttctaagacttgaatttatttaattgctgactagaagaatctaagtgctttcctagaagaggtgactctagaagagagagaaaagataattgatgatgacaggtgtctgagaaggtgggaagggtgcaatacaaaggccagtggaggggttgaccttggtaaggggagaggcaaagttatagcaggaagggagaagaggtagcaccaaaggatgtaggtgtttatgtttgaaaacaagaagttcccatcttgtgggtctattttttttgtcaaactggaagtaatatatgctaagaatgaaagggtcagagttttgagaagtgaatggaaccgtttgaaatagtcattatagggaatgagaaggtgaactgaccatcaacaggaggtggcagctcaggaccaggcacgaaaatcggatagttgaattagtttgggttgggggtttgctagttaaaagtgacaaaaagacaaaggtaaaagataattctaggagtataattgagataataggttaaagaatcttagctggaagaaaagggaagtgggaacaagaaagagtgagctgataaattgggaggaaaaagaggagctgagcacaggtggttccagtgtggtcagggatggtcacggttgaagttcctgaacacactggagggacaggagggtatggtcagaaaatgagatgtttgatgattttggaagtaaagcagttacaagtgataatggtctgggacgtgtctcaggtatcaaggcagaggtggtgtgatggagtggttgattagagatgagattttaaaatcttaacttgctgattattaacatgaagtcacccaggatggtggcagtactggagtgtagaggaaaactgagccaagtgccaaacctttcag

SEQ ID NO: 100025 - DNA, 1051 bp, Homo sapiens
tacatttgtggtgtattttttttcttaatggttgtggtgtgtctcatttaagctgctattattaattcacagaacaaaagtccagaatgttgacctaattttacaaaacaagctgcatatcagctgatgaatgcatgagaaattttcaaggctttcacagtggtcttaaggtaagttcagttatttttttaaacaatactcagtattgtttttagtaaactgtaataaattaggtttatttttgataagcagttgaacttcaccttaaaaacactgtgagagtcttaaacagttaacctactagccagatttttctgttatctcaaagcccagggcgagtcggaagtcccaaagtttcagtttttcccaggtggtcttcagtagaggtcccccatgatgcattaggaggtgttactcttttgtagatggcaaaactggaattcgatagaggttgaatgactttgccccaggttatataagagttaaaactgggagtgtgatcccaaagtccagattctttccaccaccctcacactgcttctgcaagaagggagtttcagtgtggcagtgtgagtggcttgtgagggaaggctggagtgctgcacagttacgccctgtgctctgcagtagtgctcttgaatttctgtatggctgatgtaggtcagaccttcagagagtgttatgcctactaatcttaattagtatatcctaatactgattgttagaaggcattttagaatttctagtgcatcacatgtttatgtctaaaaaattaaatctcttttctactggtgttgtccataactaatgcataattaagccatagcagcgagaagttgagcagaaatgaaagcaccatacctgagccaacagactcttccaatgtgagacccagtttacctctggtcacttgatatggttaaaatgtgagcactagaagcctttacggagcatctagtctggtcactttaaagaccacagatgattggcccaaggttatccagctgcttcatgacactaagaatatgatccacctttttcttgatgataa

SEQ ID NO: 100026 - DNA, 1047 bp, Homo sapiens
ttttgactttgttctatcttagaggaaggacttttcttccttgtgtgtaagatgaatctttctgctgtgctctttatcccatatcttctttgagttcttgcaccatcatgtattctttcttgggtatgtttaatttcttggtgtcttcaggttcctctccattgcctgtaacagtgctcggatctcttccaccttagagtcacttttctttcatagggcttcacgtgaacttggagttgctgttctcactttccttcttttgctcagtccttcattgtcttctggatttccgttatattctaatgaaactaatgttcctgaagtcattcagtagtaacagtcatgatagtattcatgtaagaatagttaatatttaagccccatttgtatgctcagtactattcttagtagcttacatggattatctcatttaattctcacaacaaccctatgaggtaggaaactatatgaggcgaaatattgtgaggttaagagctttgaataccagttgcctgggtttgagtcctacttatactgcttaactagctgtggtactttaggtaagttatttgacgttgtttatagtttccttatctataagttgggaataatacctgcctacttacctcgaagggaaactgaaacataaagaggttaagtaacctacagatttgcaccatttagattacaactcaaacagctctgttaaccacttttcctctttattccatgctgttggtaaccacattgataaaagcaggttaatggctaagtaattttcactttttctgaccttcctgtagcagtctgtggtatttcccttagtgcacctgtagtcccagctactcaggaggctgaggcaggagaatcgcttgaacccaggaggcggaggttgcagtgagctgatatcgcgctactgcactccagcctggtgacagagcaagactctgtctcaagaaaaaaacaactctgttttctgaatgtttccttgtaccaggaacttgcacccatggtgacaactacgatttatttcattgttttcctatt

SEQ ID NO: 100027 - DNA, 1064 bp, Homo sapiens
ctgaaatataccacatttataatatggtactttttttacaggtccttttttattttttctattctgtaacagttcttggagcaaatgctattagagatttgctgctttggtggtgtggccctttgagtttgctttaagttcatttataatcgattatcttatgttatttttaggattggggatacagctgaaagagagagtatattaggaaaaatagaaaaaccaaagaacatttctcattattttagagaatatattttgtatgatgtgttattatgtctgtatgtaaagtatttgtatgacagaatttactctcaaagtctttatgatttggtgggaatctagattatgttagaatataaaggaagttttaaggattaaaaaggtacgtgaaaaagtttctaaaaacaacataatagatttaatggatgtttaatatgcttgtctttgaattaacactcgttggtattaatgatctggatgtgaagtttagacaaacggtgcttcttaaggtgcttaacagttgagaaagactttatgaaatggacttgaaacatgctaatttcaaaggttgtggtcttagatcgatggaactacaccgggtactatgggcccagaataaagactagcatggaattcctatggataaaatctgaagggaaagattaggccttggtgtctgtgaagagaacacattgacctgaggatttgggttttagacacaactttgtttttctagaaaggcaaagcatgtgggattagcagtgaaaagctgtgggttcttttagaccttacgtagcctggaaacgtgtgaccttgggcaagcggggtagcagctctaccccacgttctaatggggtcattggacaagctgattgggatgtgcacatctgacctgtctgcccagtgtcttctgtaaatgcaagttgttttaagaatggtctgattccaaactgataagattggccttaagaagcccctgcctgatcacgtgagcatcatggaacccaaagatgatttgctgcccaccaccccgtctcagaacagaagggtgggaagccaga

SEQ ID NO: 100028 - DNA, 1031 bp, Homo sapiens
ttaaatattttgaatatttttaatacaaatcttatttgtaactaacttgttgatgatctcttctttggttatgttaattggctatttaaccatttcacactctgatttatttctcaggcatgaagatgttaacaatgctgtgcgttttaattaagtagttaattaactggagctccctaagtcttaagttcctgatttttctctagaataccagaaacttaagtgccaagagctcagagaatggcttccaggacagctctagcctcactgcagcttaaaaaattgcaaacagatttttttttttgcaaaccatatgtcagggaatttctcagaggttttctaagaaattcttttatttgaagttttagaaacactatcttcagttgtattgctgataattcataattctgttgtcctttttaaatgataatataaaaagtatgcattagtatgtggggaagttgtttttgaaaacttacagcagttggaacttactcctgtaacaactctgttaagtggaagtaaacaaagataagtgagcataaaattggtcaaggtaaagtaagtgaaatgaaaccatataatagtagagtttttttttttcttttctgtttcagtgaaaataagtaatgttgctcttaagagagaattttgtattattttctcctcttcttttttttttttttttctagcttgggctctaggaaaagagccttttatcccaccttgtcttccagtccattttgaatcaagaaagactcattgaagactcctttgagaaaagtctgttttgaagaaggaaaaagaaatactgtttgagagaaggcaaacagacaaaaagggtgatagaaatatgtatttttgttgtatatgtaactctaagagaccttcctagagtgaatgaaggtagaaaactgaaaagggagtaaattaaggaatgattgaattttgtgggtcttgatggaaaaacgctggtcttcttttaatgtggaaaaacagctagtgcttcagtcctaggaattatgtctctg

SEQ ID NO: 100029 - DNA, 1014 bp, Homo sapiens
taagctttgtgaggaaatttagaaataaattattttaaatgcataagccagatttctcttatgattccctttgtgtttatccaattccttcttaaaatatttggatgctgctagcatttgatggtatgcccatggaggtgaactaaggtttatttattcattaatatttataaattaaatggaagaaattgttaatcctaattaattagtgaaataactactataatagataatcctgtgaatataattctatctttaggtatagaaaaattgctgatctcgaacatgttttaagcatttcatagcaacaaataatgaacagaagaaattatttccttaaagctcacaaatctatgtcttctgagtacttacaaattctctaattagtctgatttacagcccattattttatgtaaaagtatctgctaaagcaatttccttgacaataaggaagaaatgcgacttgcctctcacagctcacattctgactctgtttggaattcccaaggatgagtctaattaaatgggcttggcttaggacctggctgtagcttaaaataccttcaaaaccagaaacacattttctccactttttaaagacttgatttatagtgcatagaaagttaaattgaatattgatccttgaaaagcaaatgtgtcctgtaaaaaatgacaacaaaagaatacaataaaagatgacagagtgattgattgtccaaagcctatagatagtagcctcccccttttatgtcatcttctctaggcatctgtagctctgagagggtgatagggatgaagtgttagaggaggattagttgcaccctgacatgaactgttacattttataagaagattgaggaaggtggtaacaaattatttctaagaaggaattttgagaaacgaggaacggggcacaagatcagtaagacctatgatataactccaggaagggacacgacggaatttcttataatttctcaaactctgaagcatcttcaaaaagaatttaagtca

SEQ ID NO: 100030 - DNA, 1012 bp, Homo sapiens
aacagtgaggaggcacacaaataacacagctctaactccactgaagacagggtaagtgacagcttcccctgagtcagatggagcggggataagtgtgccttgatgcgaagtgggaaaccagaggaggacctgactgagcaataaaactcttggctgagactaaaatgatttcaaagcagaacaagggtgggactgtttggtagtggaaaagaaagcttggtttgatgcctagagagagaattacatgatatgaagaaaggtcattatttattacctaatcaagcagtgtaaacataccaacaagcttgagacagtctttatctagcattattagatgtgcaattcaggtgagagaatattaccaaatctaacctgcttatcaacacttgtgtaatgagaacataaaagtgaatgaaaatgtatctagtctgcaatgaagtggtaatataagagactcagaagatccttttttcctactttgtgggattgagcctaaatttaacttgaattatttttagaagggacttcttatttagcctttttaaaagaagaatttatctattaataggaaatatgcattttattattaaaatgagttttattttggagtagttgggaaatgtggaaaggagaaaccagttgcaaaaagggatataaaaagaaagttgtcaaaaatgtttaaagatagagtatagcacaccaaaccccacagccatctgcccaggaaactctccttgttgccttgttttctctttcatttgtgtgggctgttctctgcttaggtgcttggaatgtccctctgatacagaaatggggaagggaagtgctgggaagggaagggcatggtccctttcaatgatacggaaggggagaagggtgtggtccctggctagggctccgcctccaggcctgtgcccacaggtctagttgaggacaggcatttttgttttcctgcccaaaacatttcctaagaccaccttggtctgccacgcccgcatcctgtgcctataaa

SEQ ID NO: 100031 - DNA, 1034 bp, Homo sapiens
gtgggtggggccagataagagaataaaagcaggctgccggagccagcagtggcaacaggctcgggtcccctttcacatggtggaagctttgttcttttgctctttgcaataaatcttggtactgttctctctttgggtccacgctacctttatgagatgtaacactcaccacaaaggtctgcagcttcactcctgaagccagcgagaccacgcacccaccgggaggaacgaacaactccagatgcgccgccttaagagctgtaacactcgccgccaaggtctgcagcttcactcctgagccagcgagaccatgcacccaccagaaggaagaaactccgaacgcatctgaacatcagaaggaacaaactccggacacgctgcctttaagaactgtaacaccgcgagggtccgcggcttcattcttgaagtcagtgagaccaaggacccaccaattccggatacactgggatttagatgccaactttactttttttagggtctgctgggctgagcctttaaaatttccctttgcttttagaaattaatttatggaccatacttgtatttgacccattatcccaagaaaattcttaaagcaaacataaaatacatggtccaggatttaatctagttgtcatatcattttaggttttcttaatctgtaacagctgttcagtctctctttgtctttcatgacaataccattttaaaaaattaatagactttatttttaagagcaattttaggtttacagtacaattgggcaagataatagtattatgtcaatgtaaattttctgattttgatagttatacatggttctgtaaaaaactggcttgtttttaagaaataaactgaagtgcttagggaaaagagcatcattctgcaatttactcttaaaaactatatatatagttttttctatgtatatatatagagagagagagagagagagagtgtgtgtgtgcgtgtgtagacaataaagcaagtgaagtaaaatgttaacaattagggaatctggaagtctgtgttct

SEQ ID NO: 100032 - DNA, 1033 bp, Homo sapiens
ttagcattcttcccacagtcttgaagtaattgacgtttttgcttgaggatgacctttcctgtttcctccatctctagaaactaccaacatttgattaaagtagggtaggggagaggtgtgggatgtaggtaggtaatctcaaaaatgttttctccaaacatgaaagatgtgactatgcttctgtcatcattattcaaaaacatttattctgaagtctgtattttatatatgcatcacctaatcccatcatcttctccatcctcttcatctctgggacatttccccatcttccttagagcctgaactacaaaccttaccttcataccaactcattccatctctctcagtgactttgttctcctagctagtgattcttgtaaaactgtagcttctcggtctttatttcaggcatcctagagccacagtcatggcttaggccgcacctcttgggcatctcaactttcttttctcctattaaatattcttcctgtcttcattgtagattcctctcactatactcccatcttcttcctcaggttgatatatctccctcctggtgttcacttcctttttttctatcttgttcctccccatgacccaacaagaccccttcaccctcttaacttcttgaaagagtagtcttaatcattgtttctgttttctttatctcccattatcctgtcagcaccctagaggcttttccctcattactctgcagacgctgctttcataatccccaagggtcacctcatttttcatattcagtggtgacctcttctatgtctttaccctgataacatttttgacatcctccttttttaatactttccttccttgactccataatattttctttctgtgattattttccctcctctgcaatccccccctttttgtttgttgtttctttgatgtggattcttcttcttcccctgctacaaagggtaagttctcctttggcacctcttttctctctgcttattttctgttgattatctcatccgccctctcaatgttaatactcacctcttag

SEQ ID NO: 100033 - DNA, 1050 bp, Homo sapiens
gaaaagcttttaaaatagtcttttcaactctaaattgtggattgtgtgactttgttaaatcatgttcagaaatgcctaaaaagttaccttggcatttctgtcaaaaatatttgttaatgtatttgctcacctctttgacatgtacttgttttcttctttttaaacattttatcattttatgcatatgatttaaaagtaaatttttaaagactggcttgaatttgaaagccatggtgtttaattcaaagtgacacaatcagataatagaaattatctgtttgatgacaatctcaactttggctcctactttatttgtataagaaaatgagaagtctaaaaacaaagaggtcaacctatcccttctgactaaccactatgatgaaagatgtgttattttaagacattgaaattaaatgtctaggaaatttctctagtatgttaaagttcattattaatagttcattaaaaccttttactttcacaggagatgctcagtcccagtatattttaaggaagagaaatataaaggaaatttagtatgcctccttttctttaaatgaagaatttagtttcctttacttcttaaaagagaatacctgttcttgtataacgtgactgcaccagacattctgaaaaatcagcaagaagcaaaagctggaaatagctatttcacagcaggtaatcatacctcaggatgtagctactgtacaaagtttatacttggataatcctggatgggaataaaggtagggggtaactgcctgaaaaacctattactatacaggccttagcatcatgaatgactttcttcatgaggatctgaagttactatctctgaccacattgcacagaagagccaataagaatttcaaagagggcaatttccactaagggaattaagctacacaaaaggaactttcacacagaaactctatcagaaagaaaaaaaaaatacataggaagccatgtgtcctacatagtaacaggaagcagaattgtttctgcccccactttaatgagcttgcccaccatgctgaactgcagctggaa

SEQ ID NO: 100034 - DNA, 1078 bp, Homo sapiens
tatgttttagaaaatgaaagtatgttttatgtacttctgctacgtgtttatattatttaaaatggattatttatatttaacgatcccccaataaaatgtttttaaaaaatttaatagaatattttcctttctaaatgtttttgctgatctgagcatgggtttagatataaacatcttaagaaaaaaatctttcagggtggtttgcctggattgaaattattttagtttaatttaggtacatgaataaacactggacaattgtaagacgtggagattataaatttctatgcctaattaacagaattatacttgtatttttaattatgatttttgtagactggtttctgctatttggtcaacaattgctttgtgcccgtaagttttccatcaaataagtgtatttcacttgttcatgttggtggtaagaacttagcttttatatttacctggaggaccgttgtcttaaactaatatctttatttgctctattcttagaggtgcatgaccttctcctttgtcctttctcaatttttccctgcatgtttatttctgaagaaggccagctaatagtctttcccaggactatttgattgtggtctcttcattagcttcatttagtttatctatttatatatttgtttgataacagtttgacctgagttcccttccaagaatgggtgatatcaaagtaggtgaacccttgataagaaatgtattgaccctattgttctatgattgcacttttgtgggcctcagaggacagacccattaaatctaggagttttagattctaatgtccattgaaaagccaatttctttgaactgctaggtagtacaattaaactgatatgcagcagctgaattttgggaggaaagggaggtggatatttttctgttactatgaaacaaagacatggattaaattattttattaaataattatttctagaagccattttcagataggagttggttctgtttaaaaaagaaaatttttgcctggtcaaattcctgtgggtttatagccatatttaatcagtttcgtcttcattcaggcaggccttaaacagaaaagaaa

SEQ ID NO: 100035 - DNA, 1049 bp, Homo sapiens
taacacttcacattgctataattttctttgtttaacttagtactttagtcattctcttgtctatctctagtgaagaagaacaaattatcttttgtattgttttcatatatttaaagtcaccagtattttcatttctaggggctgaataactttttcgccaccacatatatgcaattttcagttctttaatcttttctctgctttcataatgtcatgaataagcttgtcctatcttgttccagctttaaggattgtgatttttcaaaaagcctttcctgtgaaatccagacctcactcatatctgtgcttcctctcttaactgcataatttcatgtgaattatatcctatgagtgctgatataaacactttagtcttatctcccttgctgaatgtttcaccagggcataagccaggctttatatttttatataaaggtgccactctttccttcttgactttttctctctctgattctaggataccataaccttctctaacaaataagaagagaaaaatgatgtaattgtattaataaacacctaaaaggcatttagtaatattcagtagccatctgtaataaaactctacttaacatatggataggaagattcatcttaaagactatttatgaaagtccaacagcaaacaccaaatacaggacaacactgaaatgatttccattcacataaagaaaaaaataaagaaggctgctttatcatacttatttcaatattgcctttgaagttctatctaatgaaatgactctaaaaatgacataatttgtaaaaatattgtgaagaaaagacagtctttgtttccaatttaagaaagaagttgagttagttagataattaaatacagtagctggattcaaatatacatataaaaaagtcagcagcatttcaataatagcaataataatcaaataatagtggatattttaaaaagtcctacttacaaaagcaatataaattataaaacatgtaaaaattaatttcataatggaggtataatatctttatttttaaaagtgttaaatcatataaaa

SEQ ID NO: 100036 - DNA, 1009 bp, Homo sapiens
attcatgttcgtactttttatgtcccttcccctcccaagcataatataaaccgccaagagccaggaactctttttttaatttcatttttattaaaaaaaaataatgcccctctatgcctagcatggaactaatgcagaatgtacccatgtagtgtattgtcactgaatgaataatttagtctgagtaagtctatatccccaggactgattttgtggatgccagccatctcttcttggatttctttgccttttaattaacttcccattagacttgtggttcttagtgacctcctgagggcctgaaaatcagaaggttgcagactgggccatctattttatgggagtaatataaagacatactctctttggtcacgttttcagaaccttttgactaaatgggcagaagtaattgggaataaaaatgtgttgggaagtagaagttataatttcttatttttttctaataaggactttaattctaaattcattcatagctttgttttaaagttattgtcagtattttatgaagttaaagacaaattcaaacattaatgattctagatgttttgcttcaagtatctttgccactgtttcctcctgtgagatggagtctagattttctttccttctcttcctctctctctttttcttctcttcctctctctctttttcttctcttgtacagaataagcctgattttttttaattttgtgatattttaaaaattctcttttattttgattgatattgcatatgcttaaaaattggtagaagaggctgggtgcagtagcacatgcctgtaatcccagcgctttgagaggccaaggcgggtggatcatgaggtcaagagatcgataccatcctggccaacatgatgaaaccccgtctctactaaaaatacaaaaattagctgggtgtggtggcacacacctgtagtcccagctactgtggaggctgaggcaggagaatcacctgaacgcaggaggtggaggttgcagtgagcagagat

SEQ ID NO: 100037 - DNA, 1105 bp, Homo sapiens
tatatggacccataaagaaaagagcaaattttgagcctctctgggaactgtgaaaaaaaaagatctgtcctcatatcaacctttgacaattcaaagagcaaacagaagattgggttacttctgtgatcacactgataattccagcaggcaaatcttagtcacaacaagtccctggagtccagccaatctggctgctttgatgctaggctcagtagaactgaaccaaatgtgcgtgggaaagagaagaaccagatattgccatgactgctcatcagtcaggatttcagagactgaagaatgcagactgaacaaacctgaacccatacaggaaaaatgaacatagtaggagcaaaccatcgccctctcatacagcatagggagggattttctggagccaaagagtgggtttggggtttcgtagtccaaagtctggactcaagggaacctcagataaccagtaaaaatgatcatccatatcttgggtctcctaacaacttgacatgagtagtttaatatgttgaaacttcagtttccacccttgcaaaatgaaagttatattgttctcttccaaggctgttggtgaggttgaatgagataaggttgatgaaaggaacctcaatacagtgcctgatacacaataatgacaataattatatcataatcacagtcataatcacaataatgccctttctagccacatatggcagagacattggtgcagtggtcctcaaacatacgggtcagatttgtcgctcaagtctgtgatctaatgacatgatgaacccattagatgcctccctatcatctggatattgttccttgctttttccaagatctttttgaagatgacaatatattttcataatatttcactattttaaaagctttctgttgagcataatatacatattggaatgtgcaagtatcagttatactgcttgatgaaattttaccagctggatgtttttgtagccagtacccagttgagaaacagaacactttctccagtcactatcctcccgcaatgaagtgtaccttgggctaatagataagttttgcctattttccaaatttaaataaatagagccatatactctgtatatgt

SEQ ID NO: 100038 - DNA, 1052 bp, Homo sapiens
acctactcaagagccaagcagagggaacgagataacctatataagccacctgtatagctgctgtgcaaagaagctgttgaataaggagttggggctggaaactctgacctacctctttaagttttgtaataaaccttccagttctaactagtcaatgaatgacccattttgattctcagacctgccactgcttctacctatctgaaaaaaacaaaacaaaacaggaatttgaaaatctgttatagaagtacattttatgtttagctatttttttttccttcctctatgatctgtaggtatggggtgaaatgattatattgtggtcactttagaacgttcactctctttgggaattaagtaattacaatttcttgaactaactgccttatcctacagcctagtacagtgacagctccaatgtagattcttgggcatgcgttgttttcttgagaacctttggaattctagccatatcttgctaatgatactcacttagcctcatcaaagtctcactgatctcttttctgtacttgagatattaaatgaaactctcttttgagaatgtttgaactggaaggggagacttcagaattcatttagtctacttcattttataggccacaaactgttcattttaagtttggtgtgctcaagacctgatcatattttcctctctattcttatatcagagttaaaagaatgttggctatgcacttcgcgcttacacattaatatagagcccagactgtagggagaattggagacttgaagtggggaaagaagattggggagcagaattacagtgtgttatatagtactgcagcccctcaagggagctgtaattaatgtgtgcaaggaaaacactgcaaggaaactaatttaaagaacatactgaaacaattttctcccagcttttcaaaacaaataaagaaaaaaagaagtcaccatcaagttttgaggaagcatgaagaattccagcagaaaggaaatttgttgagagcccgagaaggggctgctggttagaatgtaaagcctcttttaaacttaggctt

SEQ ID NO: 100039 - DNA, 1085 bp, Homo sapiens
cagctactcagaaatataatttggatgtttaggagagttcatgtcccctgggaaccctcaatcaatgaggaattgaagtcattggataaatgcgcttctacttcctggacatcacatgggatgactctgaagtatgaagtatgtcttacccagtttccccaagggtccccaatagtattgacccccagcctctcactaatgttccctttattgggttccattttttcctttcacccatttctgtttcatgagatctcctcacacataagctatctgtacccacatccttgtctcagactctgctttgaaagaaaccttacttggtcaaagtcttatatccaaatctttctaagtctcttgacttgaatcattgattttccctggtatattcccactgcaccttgtagggagctcagagaagtaaaactcctcaactgagacacagggaggtggttgcaatgtgtgctcacaacatggcttacttcccttttgtggcattcatcaaaagtatatttttaactagtgatgtaattaagtgtttaacatctgtctttcccactagactttgaagtcttgacctttcctgtttactacaatatcttctgtgtctaaaaccatacttgtcaaatagtaggcattcattgaatatttggaatgagtgacataatgaattcatatatcagttaatattagtacctcatatttataaagctgtttacaaagcacgttaccataagtttccatcttattcttcaagaccatgagaatcagaatagacattgttattaaaatttctctagaatttatcaagcggctgttatgttccaagctctttgctaggggctggtatacagaggtgtacaagactatgcttctcaaatgtcaacaggcagtcaaatcacctgggaatcttgttaaagcgcaggttctaattcagtatggctgggatggaatctgcaagtctgtgggtctaacaagttctcagctgatgcttatttaagctgctggtctggagattacactttcagaagaaacgatctaacagcaaggttctcaaccgtgattacacattggaatttactggg

SEQ ID NO: 100040 - DNA, 1032 bp, Homo sapiens
gaagccgtgtgattttccattctcccatcagacatttcagcttccttggagactttctttgactgataaaatgcagcagaagtgaagtgtgcaagttctgaagggaggccttaagagatctgacggtttccacttttgccatctgggaatcctgagccaccatttaggtcatggtgaaaattatatttttggaatttctttctatggagggttcaatatttatttctatagccatttttgtatttaaaaaggaagccaagaacacattgtttttcacacttcttgatgatttacttatgttcatgaaaagttttcctagactgtgtgtgtgtgtgtctgtgtttatgtttctcacatgtaatgctgccatcccaaaaatgaggaccttacaattgacagaaagcctcagtattgttgatttaaacatattatttcaaagccctggatgaatctgtattttctgtatttccgactgagatccttattagaacatcttgtctccccaaaatctggtgataaatctcttttggaaatgccacataccatttttgtaaatgactgagtcatttgcaatgcataaaatgtaaaaaaaaaaaaaagtggaaaaattcagtttttaccttaatgaagaactcctactttatcacacattttaaagaaatttataatgttagcagtaaaagtttcctaaaatatgggatctttctggacaaacctaagtatcagttttcagcaatgcaaaaggaatcctaagaggtctcagctaaattctccaaaactaatacatgcaattaagcctggagttctgaacatggaaaagggattatccctagtacacagggaaacttactccatgggtcattgaagaaaggggcaccatcttcaaaagtccaccatggctgtccctggtcaaaaatatatcgtccctctctttttttttttgaaattaacaaaatatttcataatactgaagttttgtatacttattgcagtagagatatacttttatcccctaattttttcaaatcattt

SEQ ID NO: 100041 - DNA, 1057 bp, Homo sapiens
ctgagtacatcagtcatgggtgaggcaggaggtagaagtcacaccagttgttttcttaaagagaatttaaaataattacagttaactgaaaaggggaaaaaatacaagaactccaaattgtcatggaggttataactgggaagcagctgcctcccttagggctgggggagcatggaattattaatatgcagaaacatggaggaaaagcccccacagcactgaaactaggccaccctggaggaggggacatcagccgctggtgctggtgtctctgagctgaaggaggggtcttgtggggctgggaccacggcccctgaaggggtgtgctggcatctctgagggtcagggcacaatgaagcttgttggcaaatgttgagagagctgcaagttggacccagctactgctcctggcaggcacttgcactgcctgggggacgaagtgtgggtgaggtgatgctgacaagaacaggaagtgatctcctgaggaaaaggaagcaagcaggaagtgctgctggaggctgctcacaggaacagacaacaaatacaaaggagcaggtcctttctccctcctccagccctgcgctctcccttgagtgcctgtcttggcagagcctactagggagcatctggcaaagcaagaatcaggcttgcagttcccagccccagcatcccatagcagaggagagaaggatgggtttaaagctgggagataggagcttactaattggcaccctgagcttttgcttcagttgaaactgggactaatcctcatcagctctcagttgattccaggagacccatctggaagctgtaacactccaagccacaccacagttcatcactgggcattctcgagctactgcctatgctggttgctgggccagggacgcccaagcctgggagttcatctgcatggcctctgccctctgggagcttacccagcaagggcaaaatttgtcccaaacctttattaggtggcccaagagactggacacttttctcttgaagcagcagccatggccatgggtgcctgcacggtgcagtgtccctcctccca

SEQ ID NO: 100042 - DNA, 1499 bp, Homo sapiens
ctcgaaacataccatttgtgagttttcaccattcttcaagaaaggagtctttgactacagcagccacgggacggggtagagccaggggtgatggaggaaccaccacagcagtgccttctcgtcgaagcgggctccgatgcagggcagctcccccatgcgaggatccgggtctgcctcctcctgctgaagacagacatgcagcagcgggcccgggccacctcacgtttccatacctagtgcctgagtttggggatgggatgctctgcctgctgatgtggccctgacaggcagccgttaccgttccattgcggttgaacgtggccttttcccacagtgcttccttctcactgcgcagcaaagttcgtcccctgtggcaagatagatgtggttgggccatcgtgggttccctgagcccagccagcctgggacctcccaaagtgggtggcttaccagaccacccttaaatgactttcatctggtttcctctttcaccaaaatatactcgtattttttatatttcttccatgtggctggctatattccaagaaaagcattttaaattatttcattgtatttttttctttttttccctcatttgaatcagaacttttatataaaacccaaacactgatgtttacacagaatttcatattctgcaaaagggattttttgatccaatcatgactgtagtcttccatgcttgacaaattggatgtagacaacattacttaaaacttctataaatccctacaattaggatatttatttaaccttgaatattcaagaacattctcccaaatctaaatggctactgtgcattcttgagctttttctgctaagcacaaaatgaacgcaaagctaaatgcatatttttaagtattattcacattttttgttacagaatctattggatctttggctggaaaactagaatttatagcagtttattaatgataccttaaattactcaggacttaatgtagcattgcacttctgtgtacagtaaaactgctttgttttactaaagagaaaaatgtgagtggaaaaaatatgtatgtggtatatactcaaatgtatataattctatctatagatttatatatgtatacattctgtacagtagttccatcaaaatatgtaataattcacaccaattttattaaatgtatttgctttttcaaaatttaaattgagctgctatcaatattaaatgaagttatggcatctaccctgtagctcagcttattttaagtctgtaacatgatcattcatactagtctgtttaaacattgatctaatgttcttggaaatatgcataatgtataactcagcatttgtgttgcagaagatgcagtgatagtaatgattgaagtcgtaaatgaatggttaacagaacatgtttgcattccatcttctagagaatgccttcacaacaaagttctccaacctgaaaaatatgcataaacgtgcaattatccctataaggaggaaaactagta

SEQ ID NO: 100043 - DNA, 1001 bp, Homo sapiens
cttttgcagctgttccttttctccatcctacctgtactttattgtaaggatagctaccattattcttagtttttacttggagaggggtaagatgatagttgctaactaactttgtatgtcctggaatggacttctggggagctccagccccatcctgcttcctgctgttctccactgctctgctgaccctgggcaagggtgcaggtcctcagcagggtcccgttgacaactcttgttggaactgttgatgactgccttggagtggtatgttcatgtttctggttacatacacttaggaggaatcactctttttcatctttaccctagatccccaaagactttgcaacagtatctttcatgcactgcagacgctccttacagctttatcccgagaggcctggagtcagtcctgactttgcccccatgactctgagcctttccaagtcacttagctctgggcttgggtgtcttcaactctaaagtcagacagttagttgagtatcatggtcctgtgattataggcctgaaagtcacttagaattggccttttcctcctaaaatctgaacaacagtgttgcacataatttacacatagttatttcacaggctgaatattaatagcacagaatgcttcctccatctgggtctggagagggaacgccactgttgactagcaggagatgtgaatgcttgctccctccccgcttccactgcctaaagtccttttattgcacgacttctgattgagcatgtgagtgtgactataaatttcccctgacagaaaccacatcacctcatcagccacataagaaaatgacaaaacaaccaactgtgaaagcatgcttgccaagctttcagcaccacagcatcgggggaagcgggaggcacgtttgtactggaggagatggaagctggagggagccagaagatgagctcttcttgtacctgtcttctctgagctgcaacatggggggagtgtgtttgtgccactgagtccaggt

SEQ ID NO: 100044 - DNA, 1130 bp, Homo sapiens
atacttcaggagggtctagtatgttgcagactctggtctagggtcagaagagatgttcataaatattgtgtggtatgggcttaagttaccctatcaggagtctaaaggtagctcatcactcccttcataatccagctaggttgtcctgaagagttgctgctttatgcctttaacaaatcaaacttggaagagaattgcttatttgtttgtgagtatatttctcagtgacagctcttcttataaggccttgggagctgctattaatttggagtagtcagaaatgcttccatctagtcagatgtgagaattatggagccttttgatgagcttttattatttgcatttctcaaaagctagaatggcttaaatttacagccacaaacctttagggtgcagatgtttcaaaagctgctagttaccatgtaggtgggtttacttgcaaaagacaggttatagcagatttgaccaattcgagtgctatgttgtattttttcttctaatctttaaaaattgggtaaaagttagatagccaaatatcacaggagtaaagaaaatgactagtaaatgaggaatgacaacagagtacacttttatcaggtgttaacagaagtcaaatgttttccttttattagtaaagactccacaactttattagttctcaatttcctttcagtgatttataacccagttttagctgctcagttgttaaaaatcataaaagataggcaaggctttttattacccattttaatttcttttctatattttagggctgccattatttatatccaaagtaatagcgatgccatttatcaaaatggcttatactgtctgttgcctccaagaccacctgcacttaatacagggtctggctcaactaaaatgtgaactttgccaagagaaaaggctttcaaaaacaggaaacttttccattacatttttccattacatgtcttcttgatggcagcagactggctgacctatcttattataatgtaataaacattgaagtcaggatttgagcctgataactcttagaagaaaattgggctgtgtcagttcaccgggaatcagaaagagaaaaatcaacttatagatgaaaatttcactctgagatcattaagaaatat

SEQ ID NO: 100045 - DNA, 1121 bp, Homo sapiens
ttatttctaaaaacacagtagcctgtcattctagatctaaatcttatttcactcacaacagcattgtccatttaacatttttaagataaagcttaaaattaagttgaatatcagctgtctcttttcctgtaaagttctttttactcttatgcagctcagcttcacatagtcaatacttgctaagtatttgttgagacttgagatcaatgtttattacgtatttgtcaattattattgccctcattagtgcttatattattaccatctctgtaaataatgctaatctgctcctccaagtggactatttggcctgacaacatcctagaaatcacttgatttgctaaagacctaactctttcaggaaagccaaagggttgatacaaaaggatcctgaaaatttcctctcatgggtgactattttatagccaagtgggaacatattttatttacttcgctccttcaccagattgggctcattatttctgtggaagtagaagactattctggctctcttaattgcaagggtaacaaaatgtttgatgatagtatatttttaaatgacacatattaaatttacctagccatacaaggctccaaaattttaatcaagctaagaagtatcgaaaagcacactggaattcaaaatatacagaattaggaatatgcttgccaagatagactcttctgtcaccttaacactttagttttagttagcctatagtcttttggaactttgtctaaaatgatatcctgcccattcacatttcatctggagtttagccgtggtctcctgggggatatacttttaacagtttggtgtgacaggtctcttgatggagatttgttttcttttggtaatcttttttccccaataataaattacatgttcattataaaagattgacattattcaacaatatatacatggaatgtgaaagttcttcttaatctaaccctcagtaggaatgatttgcaacactcaccaggaagtcctcctgggtccagctatgcattcagactcacaactcccatagcccatgctcagcgtcagtttccctgggaaggacacaggacaagaatcactgcttgccagcagggcacaagggcttggagaagccccc

SEQ ID NO: 100046 - DNA, 1055 bp, Homo sapiens
tgcagctagattaatgttttcagttctagagaaattttacatgctaatcactttttttaaatttaatttttaaattcttttgaaaaattttagtgacttttgcttcttaatgcttattcattttggttttcctggttaatagattactgtcctagatgagacatggactgtattcaggcgttacagtcgttttcgagaaatgcataaaacattgaagttaaagtatgcagaggtaagttatgaaattattatctccgattaagagcattcattttataaagtaaatgagctgattgcattagcaatgttatctctctctctgtctctctctttcagatactagcttattagtgtcactaagtcttacttcaataacccatttatcaaagataactttaaattttttcttctttgttccatttctgttctacacaatttaaacattttcttaacagaagattttgaaagtgatattacaatgacagtaagtgaactccatccttctcataaattttatggtaaattttaaatacatattttaatcaatttataacttctcaattatgagacctattaaaattaaaataacttcttcatatagatttacacttttttctttaaaaaagaaagactacattcatgcttagtcttatacttaatgagaagtcaagtcataacagttattttgccattgaacgtagagggaaaggtagatagaaaatgcagaattatctagagaccagaaagcatttcatgcatcagatcaaatatccagagggtattaatacattagtcgtcttttcctttttgaacaaacacaggtttctcaagtaattttaagcaaagtattcctagaaggaatgtgtgttttccaagtaatgatgatgatgaagatgattttacttcaactaaaggaagcattatctaggtccagctttctgggaattttgtgttgaactgactgcagatcaatcaacagtcattgtctaactagcctgctttcaccaattattggttttgagcactatttttatggttttttatgacattttaaa

SEQ ID NO: 100047 - DNA, 1039 bp, Homo sapiens
taatatcctgtgctgtgtgttctaatcatggtgtgaaccaaatgctaagggatcatggaggggatggaataaatgattcttccagggagaaaggagtgggaatggggctgctgcccaaggaaaaatcatggtttggacactaccctgggggctgagcaggagctctccaggtacagaaaggggtgtgtggttgaggaggccgttcagaagacccttcagaagacctacgaatatactatatttctttattcacacgttgtctggggtgtgagatttttagttcactgagagctgggattgcctaggaaagtccctaaatgccgcactaagggctttggcctgggagggtagtgagacatctgattttgaagtgacaacatgaccagtggtttatagtcaggctgctcggaccttaacctgcatcacagttccctggagggttggtcagaacagactgctgggccccagcccagagtttctgatgaaggagctgtgggtgagacctcagaacatgcatttctaacaagtgccccagtgcagctgatgctgctaaccactggtttagacagtaaactgaaatatcgagggcagaagtcattgaggtctgtatgtgagtttattaaaatatcaagtaaggtaagaggcaaaaatcactacccagaatatgccagtaatgattttcattgttcatcatttttgagaccgtattatatacacagggttaatggttccagagagtcccctctctgtcattaatggtaggattcctggagtcaccagaagagtcacaaaaagactcctctgataccttcactgacctcactaagctcaattcagaggaatacagtaagtttataacatcattgttaggttcttggaaactgcaactttaagcaaaccaactatagcaggtcctcaaatgacatcatttcattcaacatcatttttttacagcgttgatgagaaaatgtggtttggctgtatgttgttttgcctaaagttagtttccaggaactattgccgatgttaagtgtggatt

SEQ ID NO: 100048 - DNA, 1035 bp, Homo sapiens
cctgtaatataatttttttaaagaccatagtagaagcatcaggataccaaggaacagaaaagatgaataactagttcatccattcaggagacaattaagtgtgggaagagaaacacgtgagaaaaattgagcagcatggagccaatgggctcatggaggcataatcggaggacgtcaaggcagatgtacatttttgcttgcttgagaccgatgggtggatttcagtgagtgcagacgagagaggaggtgttctgggcaatgggaacaacaaagacagaggcccaagggtagaaaaggacaagtgatgacttggtaataggaagcagtgcagaaggaggctaaccttggagaggggctctcctctcaggtagaagtgaatcaggaaaattaagtgaggatgaagaggttttgaaggaagggaaatgaatgtagcaacagcatcattttgaaatgtgctaaaaggatactcagggagttgatcttaggtgactctaatcatctcagtaaaccgagttcattataaggatggaaaaatctagaacattttgaaatactcatcgcagagaatggaatttggaaggatttccaagtaggagtgactgctgagctaaaatggcatacctgtagtgtaaattcattctaccctcctagggggctgtcttcagcgtgcaggacagcacccaggagagcaggctgacaccataggcactcagtttgggggactgttctgatgggacccacaagaaggcttagagagtcagggatttggaggtgctggtctcccagtgtcaggaggactaacctggagtccggcctctgtaattgatccaagagaaaggagataagctaggagaccacgaagaggtcacagtgaagatagccaggcagagtcagcacctatggggtgtgcatgcccacagaaatcagaaagcaccggcactgtctgtcctcagaaagatttggggatggcagaggcagatcacatcgaggagcaatcagatggcagcctgtgatctctctgggatattgatgtga

SEQ ID NO: 100049 - DNA, 1048 bp, Homo sapiens
cacacaaaccaactgatcttttatattgcccttccttggacagccatatttatcttcacaaagtaaatgcttcctgtgtaagaagtgactaagaagaaatgagattgagttacaagcacagaagaaaagcagttattattttatggtcatgccttcaatttccatttcactcaaattcctatttttttattataagattatattagtattcctccttccttggtttcagaattttgggagttttgcatctcttcctagaataaaatttgttttaaaatcacaaaatcgtttgaactttcccttttgcagttgctacccatggatacgcttacctttcagtaatgaataatataacgcctttttaagaacggagtcacagtgccaggagtcaccatctgttgagtgtccaagcactgtgtctagtctcttcgcattttttttagttcatctgcaggttaggaatcatgaatgcattttacagatgaagaaatcgggacctgaaagaattgagtaatttatccaaaatcacacgactaataagttgctgggctaaagtcaggatccaagtcagagttaattcagagcttttcattattttattatctcatgatgactggtggagactttacattccttggtttgcctctgaatatctgggtaatttaaaggaaaattgcttagactgtcattctcgcaatttcccaccgtgttaaagtagaataagtccccgtatacctcacctgcttcacagaggtgttggcagagggggaagcactttatcagtgacaatcttgtacttaaaggcccccatctcccagattctcagggccttcacacattttattaaatttaccttcaaactaccctgtgaggtaagtatactgaaataagcggtattacagcctgttttgaagatgctgaagttaaagcatcgggaagtcattatttctggttattgcaaaaggcaggatttgggccagcctgaaagccctgttggacttagtagcacttcatagctgcctcgagtgtgagtgtaatttgggagtca

SEQ ID NO: 100050 - DNA, 1128 bp, Homo sapiens
ctcagtcttgggcctctcatctgataaatagggtgaataatggttaatacctcgtaggggggattgtgaagattaattgagccaattcatgtaaactggttaatgtagtccttggcatataatgagtatccaataaatgctaactataattatgattctaattattttgttattgctattacttcaaaaacatatgttttctaaagcccccagcttaatgcaaacaataaggattgttcagagatttcttccgattcacacttaagacaacttcatttggaagatttatttttttcataatgcctcttcctcagaccccactagtcccccactgcccaggccataaatatttgtcagagccaagttgagtaatcaaatggggcctaaagaaaatacttgagatttgttttaattgtggtttaaagagctttccacactacactggcttataaaaatgcctaaaagttaaaaatgaagtaaatttgaataaaatctctagcttttgcagctttataagtatagctgtctgatagtgtgtgaagaaaaaagtttgtcagatggtcaagacttttcagaaggcaatctggtttacactgattttttttaagaagtcaggataatataatttgtccctgtttttacttgttcttataaattggaaggaacttcaaagccaaacacttcatagtgcttttgccctaactccttggaacggtatacctaaaataatggtctttttgttatgagagaggcttagcttttctctttcaaaggaaaccatcatttttctaaataaaccctactggtttgatgctcttttctctacttgaaacacattttctccctcctacccgagcaggatatttgcagtggagtgattctggtttctctttgttctccctgtctgacatgcctttgatagcggatggtttctcgctctttgggcgcaaatccagatgacctgaaggacccaattaaaattagtatcccacgctacgtcctctgcgggcaaggaaaggatgcacacttcgagtttgaggtcaaggtgagtgtcttcttgactcttctggagaatggaggttggagactatgcagtgctttatctgtctttattttttcaaaaggggg

SEQ ID NO: 100051 - DNA, 2042 bp, Homo sapiens
aatagaattttgacttttagaagatacatatttgtgacaagtctatactgaaataaagacaatgcatttctatcctgcaaattaagaaatgccctaaggagatcttgtttttaatattattcttagaattttaagattaggagtaagtgtttcagttctctgatggcagatggatcaatagagtcatgtttatcttggggatgtaaattatatagaagggttgtcattgttgaatgacaagtatgtttatttagatttccattcccataaatacttgtaatcgaatcagtcccccgccccgtgaacttgctataatttaatatagagggctttttcttttcttttcaggataatgagaaacttcacaatggcaccattcaacgtaaactaaaatatgaggtaggtaatgatttttcagattgatagggtcgccttaaattatggcatgctcatgtgattacattttcttaatgtctagttgcataattagaattttgaggtcccggcaagattaatggctaatagggaaggcaagctattatatggacttaaaattaaacggaatcctgtagtttgaaactgctttgactttatttgaatggcatgtagctgtggtggagctttgcccagtttttcatttgtaatagtatattttcccttggtctgcatttaaaaggcagaattatataatcagaatcagatatggggtttggaaatgaaactcagtactcctcctgtccattttatagactgtgagttggtagtagtataaaggaaatactcttgattgattaacttgtttctctggtggattgtcaaaccaaggtttatttgggcatgcaatttgtaaggtttcactggtattctcctccactgagaggcatgtctctcccatatattcctaaattttaaaaaatcaacccccaaaaaatagtaggtgatggaaattttccagatggtgtccatacattactgaacagacagcaagaggtggatgttcacagaggctgagctgactttggccgcagccacaccctcctgccagtcatccagtaatgatgtgatctttccctggatagccatttccctcctctacagagcaagacactggctttcatttctttgtgtccatagtacctggcacatagcaggtgcacagtagtccttccatggtgatgacttgtagataagagtaatgataattactgttaatgttcatgggaacatttgatccccatgaaacaaaccaaaaggagagagaaatgtaacctgggttagaacacttgggcatttcttttggccttgccatctgattttcattaagtttgccttgattgcattttggacatatgatcatggacttattttcataactaaatttgaccttctaaacattgaatcagagggcttggaatttattgtagggaaaatgaaatattagatcaagacgtgggtactgtggatcaaccccatacaaagtatttctatcaaaattctcagtgatttataatatatatataatatggaaaattgatgttctatgtatgaatcagataatcgattctttaatcatgtatcaatacaaatggcttagactttttatttaacctctgaattaatctacccaatgaaaccaatgacaagaatcatcatgtgcaaaagaatcacagaaagagataccacatccccatttcaactttttttgacaccttgaacagaaaaggcagttttgcccagcatggtatcttgacccgcttctgcccagagatgccactgacacttccagcctcattaaagaggagaggagggaggtggatcagaacgaccactgggatcatcccatgctgtggagcgtctcaggccctaaaacaacttcctcagcatcacaagagagaactcaccagcagagggatcagtcctcagtacccgaggtattccaggacagtgaaaacaaatatggtcatcctgagcatgctggccattttgaaccaaaatgttttaatctacctaaaatctcttttcttaacgaaagtaacaccgat

SEQ ID NO: 100052 - DNA, 1026 bp, Homo sapiens
tttttttagagatggggtttccctgtgttgcccagtctggtctcaaactcctaggttcaagcagttctcccacctgagcctcctaaagtgccgggattatagtcatgagccaccactccctgctcagttgagatcttaactgaagctcagattggagagatgaaaccttgccctctccgcagtactccccccacccacagcacctcctaagggggcttcaacagaagtccagtgtactggccaggagaccccaccttggcatttagctgatgcatggggctggttgctgataacaaggaagacctactcagaagtgttactgtagcttcacccatcacattgcctgaaaagttcaggacaacctccattcaaatgattggcttatgctatggattacatttaccatcgctgtctggtagttccctcaggcaaaacagcaacaaaataacaatcaaaaaccctaatgctgttatttcagagaaataggttggaggtttaaaaaaatgattgcaggtatgttatgtaaatgaaattgctagacaaagatccagccccaggaactttaaagtagtggagggcacactctcaatttgtagcctgtagtgtgcaataagaatgcagcatgagcttttagcttgatgtccttggcttttgtcacctggccatttagtattaatactgtataatagcagacacagtattgcagtttccacggaagtgattacacaatgggagtgttccttcagaagccaagtaaagggggctgttagcttcatgagttttgatgaaatagacttagctaagtcctaattcaggccgacggattccgggctctctgctctgactgcgatacccccgcagctttctatgggaatttctgttgtgcttcattttctcccagggttctcacggctaagccaggattcaccgtgcagcctgacttggcccctcgtaaaattccacaagtgtgaaatattaaattcatgtgggaccagactggacaacagtgtcctgaacttggctctc

SEQ ID NO: 100053 - DNA, 1023 bp, Homo sapiens
cacaagtcttcattaagaattaaaatgagaatctctctctgatttctgactcagtactttacagtactaccttcagaggccagagcaacagcctcaagcgcctgatcttgacaacttcccttaatacacgtacttccccttctccatcccaatcagacactctaaagtgaaggcttcgcctgaggaggacctatgatttcaccaatccagagactcttagatcctcctccaagctgctccagaccacccttcctctgcctgctggagcacttatgagcctcacttgggaccgctgcctgtcccactttttgcctttcgcactctttgactgtccgtacagttgccttctcctccccttccagacatttccttctaagcctttcatcattctaagtcgtgatgttatcttcagtgattctttgaaactaactcatcttgcaatctagttacttaaatagcactcccttcttcagcatggagactttctttgatttcttttcctgtaagccttgtcttgtcgccacttacttccctatccaattaagtccctcatctccagcacttgagccatccacttcccagatcatcagatgatccttctgttcttccacttatgtgagtctcattgattctagaaccattgagctatctccccaccctaagcctatacctagacatctaagctcagtgcaaccgagaaaaccacatcaacacagagatcagtgcccctgtaaattaatagtctctaagcttgaatgatgcccagccagccctttctgctcatttcctccatcagttctcttgcccaccggccccttcattattacaaataatgttcctgactcttttacttctaaccctgctattatttctcctcactcttatgaagaggagtcattaggcagaggagcttgttcctgactccatatagaacacaggagtcctaagagagcaacacctttgaatcccatgtctgctttgcattcatccttttcttcttcttcctgtcccaatgaaaaaact

SEQ ID NO: 100054 - DNA, 1004 bp, Homo sapiens
ttttcttgctcaccttgagcatggactttttatacatggagttggcagtatttatgttgctggtaacttggtagttagcctgtgttttagttgatggttatttactgtgtttatctctactggtttattttattgggccttaccatttttcaaaagtttagtttgctgcaaggctggtttcttctccagtttttggtctcagttgtcttgcgtttttatggaccatttactaactttacagttggctatagattgccttaaatagcttgttaagatacacaatcttggggaacatgtgatgaaagcaactgaaagaagtgggcttcttcctccattaactgagattagtgttaattggagacttgcttttttcctttttgtccgtgaatattattccactgtgagccactttaactgatgagcttcgggtgttttctgttttcaaagtaggtggggagatgagctcttaaattcaaagaacaatctgtctttattcagttacttcagattgtattgtctgagtggtgggatgcattttgcttcagccattttataaccacacaatctaaaactgaattgtcaaggtcagctgagcaaatgagactgttctggtgaaatgatgaatggcagttacaggcaatggtgggagaaagtaggtttcctcctagtcctacatggtagcatgattttccttggcagtaacatattaacttgattacgtgtcaccggctctgtaatttgttaactcatttgattagaacatgttgctaattcagtcaaggtttccagttgtacacattcatttttgcttctggatctttgcatatgctattctctccttctagaacacttgtccatttgtccaccggctcttcacatgaccaaatcctacattgtctccaaaatctccatgtaaatgtcacttcctcaaagaggatttaccaaactcagtccaaattttacctcctgggctacttattcatagcatcctctatcttttcttg

SEQ ID NO: 100055 - DNA, 1063 bp, Homo sapiens
caaatcctctctgaatgcctcctatgaaccagtcaggattctaggacgggggcaccattgccagtaatcctgagaaggtcagcttgcatgcttgttggaggagagacacagtcaacagataatttaaaaataaatccaggaagtgaaaatgaaatgaaatcaaatgtcttaggacagtgtttgatggagtgatcaggaatggcttcctgaagaagggatgtttggtctaagacttgtatggagagaaaatgacactcataaaacagaaagggggagaatggaaagcattgagactgaaggggaaagcaagtgtgatggcatcaaaatgagaagtgaagagagggccagagtagatgggatatagtaagcaagaagaagagtggtacaagtgagggaggggaggtcaagggccagctaatgtagggccgtgctggcaattggaaggggtttgactgttttttaagagagctggcaaaccactagaatgatttaagcaagagagtaacctgaagatgtacttaatacaaatatcaggatgtatgccatttggagaatgtggcatagaagcagaagaccatttagaaagctatttccttaatccaagtgaaaggtaatagtggcttggatctgcactttagccatagaagtggagcaaagtagaatcaaggaattaagagtaactcccaggattcaggtttaaacagctgctgcaggtggtacactcttccctgagatgggggagacagggaggacaggcctgggctagcagtcgagtaagaactctgcttatgtatacttcctattagaatggaagctttttaaggtcaggggccttgtgttattcttttctgtataaggtgtcattcacataacatgcttaataaaaattctgtaaacagattaagaataaaattttagtaagacacctgagtccctttgggaaaggcttttaaaatttctttgggcgtggatgttccaaatactggaatgagacatattatgcagaggaatgtggttttgtggcctaatctgtctgcctaatcccaggggatactgcaagtcc

SEQ ID NO: 100056 - DNA, 1064 bp, Homo sapiens
taaatgtacacaagttctctcccgtcaaattctgagggagattttagtaatagttacctatattatgccaattccatacgttttcttttgaaagcacttttcttttgagatttctacttttaccagtatcaataaacattcctaaagttgtgaccatatgctttgcttgatattatatctctttggagaactggtttccttttttcttccagacaatcaaaagtctaattatatgtctgttaagttttaaatctcataatatgttgtaatgcttagattcatcacttctgctggatattatggatatgaggatataatgtgtgttgtgacactcagctgtaaaaataaaggtatttccagatttgaaattgtcttaagtaagcagacttttgagactaaagctttcccttattattttataatacactggaaattacatttcaacagtagaattccatgttatggtattggcaactgaccagactgcttactgtaaattcattactgtttttgtgtgttttcaggtgctgtgattctcttgggaagaaccaatatgtttcgctttaaccatccaaaggaagccgccaagctcagggagaagaggaaggtgagggacacggcgtctctaggagggaaccactgatcgtatgtgaggatgagtgggtggtggtcactctggttccaatcttttgactttctggggtgcagaaccgtggaaaagtagttctgtgatctggattgattctagggagattgtttcccagcagatgattggctgatgaagtaagagagcaagcaagtaaattctagagcagacagggagaaactgctcctcctagatccttctcttcagccttccacccttcccaccaaggaactgggcatcattttgcattaggtggagagtgacttcctctaatcagcatctgttaggaattaacccaacattggaatcacattaatccaaaatcagccacagtaaacagatttttcattgaggtgggaagcgagagcaggggtgggtttaggacaactgggaaagactttggtttggttggaagggg

SEQ ID NO: 100057 - DNA, 1021 bp, Homo sapiens
caaaaccaaactcatgatttttccccaccccatcttggtccttttccagtgttctcagtctgtgcagaagactccccattcaactagtgatgcattccagaacccagaagccatcttcctcacccccgtctcctctttgtgtctagcccatcatcaaatcatattgattttatctcctacatatcttccagttttgttttacttctctgctttggtaaccctttcccccagtccagagccatcatcacttacctggaccactgtagtagccacctggcttgcttagccatattcactcttgccctgtttggcctttcttcagtcaccattgcaagaatgatctttggtgaaactgaaatctaatcatgttatgctgctgcacagagcccttcagtgtcttcctcttacaactagataaaacacaagatcctttacatcctgaaacatttgagttgattcactttctccctccttctcaagccttatgttggtgcagtgctcactcttgttccctttgccatagccacatggttgtcttccagtcactcattcttggtggcatcttcctcctcattattatcatcaatcatcatcatgatcattattgcttttatgcaagacactctcccaacttgttctcagagcttgttttagacaccacctcccttgaagatatccttctctagtttcccctataataaacccttatcattgttgctctttgagcccaggacacagttcttctccttcagctgcagctttgcatttatttgtggaatcatttcattatttgattatttatctctctctctgacattttttaaagctccataaaggcaaagcgtatgtctgaattgctcaactctgtatcccccatgtttatcacagtgactggcatacagtaagtgttcattaaatatttgctgaatgaacagtggcatcatgtaaaaatgaagcaaatttttaaattcacgagatttgttgagtacaggtgcttagaagaagaaagggaaggaaacca

SEQ ID NO: 100058 - DNA, 1050 bp, Homo sapiens
tgtccctctacataaatgtaggattcatctgttgatatgttttggctctgtgtccccacccaaatctcatgttgaattgtaattcccaatattggaggagggacctggtgggaggtgattggatcatgtgggtggatttcccccttgctgttctcgtgatagtgagtgagttcttgtgagagctgatgatttaaaagtgtgtggcatttccctcctgccccctctcctgtctccatgagaagacatgccttgcttcctctttgccttctgccgtgactgtaagtttcctgaggcctctcagtcatgctgcctggtaagcctgtggaagtgggagtcaattaaacctcttttctccataaattacatagtctcaggtattctttatagaagtgtgagagttgactatgttcccttatgattagactaatatgcatttttggcaagaatatcagagaaatgatgctgtttttctcatatctcattacacgatttccatttgtcccgtgactgatgatgttcactttgatcatccaactaaggtgcagctgccaggcctccccactggggagttactcttttcttctttgttattagtaagtatgtgggaaagtactatgagattgaaggtactttgatattgtaaattttccattccattatggaatattaccactttcacccactggttttaggaatccattcttttttctttttggctgaattaattattattatgatggttgccaaatggtgattaaaaaagaatgcatcattatttctacacttattaattggattttcattgtaagaactttctcttcttgtcatttatctatttaaagggtcacacagcttgcgattttatttactaggttttggtctgttttttatcattatttatttcaatatcaaattgtcctatattttggccactgtgagtttcttcaagctggctttcgtgtcctgtcctcactgttctgtaaacacttcgttactttctgacacaagatattccagactcatcttgtgctttcctcaaactaaccaatt

SEQ ID NO: 100059 - DNA, 1825 bp, Homo sapiens
ttacttttgcaccaacctaatatttactatttattgtgagactgagagagataaaaaccattttctagaagtccccagattcacctatgtttgggtagaagtaggcatcaggcctcttcttctaattgttaaattatgtgtttgatctttggggtagctataaatgatggtaagaacacacgttttctgtgatcagagatcagtagtgcaattttgtagagacagtggaaactagttggcttgtactcccaagacgctagccaagaactgtgcctaaaatcatgtaggcttatttgacaggtgttcatatctgtgtttgaccattcttcaaacaagaatctaggagagttatacatgaatagataaactttagcagctgcatgccctgagaggtctcagaattgacacaggctcaggcaacaggcatctcagtatggcttctgaaggcctcttgggcttttcaagattcatgtcatgccaagttcaccttgggtttctgctcctggagtgcagtgtctgtcagtgcagaggtctcagtaagtcctcgacccatggagcacttttgcttttattctctgtggcctctgggtggctgatggaggaaatttattcagtatcaaacagggcaactccatggtattcagttaaaacaagttactcgactgttttctccccaaagatgaaatgagttaacatcccagaactgattttcttacacaggtaatgtccagatcccttgaagaacattctaaggatcttccagtcctatcattgaacgtcatgagctcctgaagttcggttttctcactaaacataaatgttcacttcatgatacttatgtggaaaaggaagagtattcaaaaggaaaataaataaatttatagataaatagctgggaatcattgcagtagaaaagggggaaaaattctttctactttgtttttccactttagttcttcatggccttgacttggagagtgagcattgcatctttgaaaatatcggggggacagtgactctgatacccctgagtgggtcccagtgctctgtgaatggtgttcagatcgtggaggccacacatctaaatcaaggtatctggttttaattttcacaggtctttgtatatattgtttgagaaaacaagttggctaggcaatgggggaacatgtgcatcttagaattaattattgattaggtataaaaagggtgagactgtttgcttcaataggctgtttctcttctgtttggctggagggcttattttataatacccattgtcttgtttaattaaatatgaacatatatagaattatcttaaaagttgttgttatggagatgagatgttaaaggaattttttaatttaaaaagtacccctcaaatgcaaaaccttaacacaatggtttcttttaataattttatttctattatttatattcatcttaatagatataattgtaacatacatagaggatttggtatcatgtctattttttgttttgaaataacttcaatatcatagacaagttgcaagaatagtaccaagaacttttaaatttcaaaattattggaaagtaaatagtgccctgccgtccttgaatacttcattgtgtatttcctttaaacactgacatctacattaggacactaacactgatacatttctaccatcggatcctcagacctcgttcaagtcttgccatttgtcccagcagtgttctttgtgggtcccatatttagttctatttcctgtatggcatttggttgttacctctctctcttctttttcagactggaacttttccttggcctttcctagacttttat

SEQ ID NO: 100060 - DNA, 1452 bp, Homo sapiens
tggataggagaagttgatggcacaggaggcagaggaccaggttcctctggtgcaaggtaagtaatgcacaggaaggcttcttctcaggaccatgcacagttcaaccatggtaagtagagagaaaagccatcaactaaggcaacatcttgatattaaatggcataaaggctctgaagagtgagaaagtttactttgtagtttggatgttcctagaacctttctgaaggaagatttgctttgaagaggttatgtatcaggcaatgagtttaattcgttttatatttcgctttttataagttccaagttcactttgcttattacctgccaggatttcaacacgaagtttaaggtccatttttcttgcagttttttagatgagaaataaaatattgcccattctgacaatctgaagaacacctaatttgaagttctcttttcccaaagtaaccttttctttttcttttcctcttaatttcaggaacaaactctagccctcaggaaagaagggattggagttgttttggattctgaactgcctcatttgattggcatcgatgatgaccttttgagtactggaatcatcttatatcatttaaaggtagaaactgattaagtggaacattctaattttgtttccagtttctccattagacactaactaggtttattataatattctatggtcatgaacacaactaaattaaattaaagaatatacaacaaatccttgagccctttgggaattttcagaagctcattgggattctttggtatttaaagttcccttgttatctaaagttaaatgatgagccattgatttgccctctattctgtaggattagtaagagggaggtaaggaacaaaaaggcacacagactgaaggagaaaagttgtaaacagctggggggattttgttgtatgtacagtttcctggtccctggtggcaattataaaattgtgcttctcacctgcattattgggcttggttccaagcagacagttcatcttgggagtacagaattccacatcagtattaatggatgcccctgtaaccttgactttagtgccctctctctgacccataacttaacaatgagaatgctactgcatttgtgttttgcagacttacataaactatatctttagacacaaagaatctcttggccactggagaacctccccagaaaggatcaggaacatcagtgatattcctgtcatgagcaaagtatttaacgctgtcaaagcagggcctcaccattgctgtacattaaacctttccagacaactggggcttttttacagagccttggggagctctcgatgcattgaagctgtggcctgccaggatgttgttcatcccattggccactatgttgtttgggcttcaatgaaaaatgaagaaacaagctattccttctcttcttactaatacattttgcttgggttttcttc

SEQ ID NO: 100061 - DNA, 1112 bp, Homo sapiens
gtctttctaatgtaatttctctttataaaatggattatattccttattttaataaactattggggccatatgcagtcaacattcaaaattatatttgggctttggagcagtcctctcctgcataatctgagtgaatgagcccttttgatttactgggtaatttatctagctaaagatatgttaataatgtcaaagtgcagtgtatcaattacaggaatacttgtgtaaagtattgttgcccatagtagtatttatacaaccaagatacacatttatatccaggccaaattgattagaggtttggggacccctttggagctggcgttcatgtaaagtgttctgttacgatataaatggtgtgaactctcaaagggacgggatgagacaggacttgagtggcagatggttttacaaaatattaactctttgggttcatagaggacaatttattcagtcacctgtcctgtgtctgggttgtggtttccctccttttcaccaagtttactgcacagccagggaagaaactcccttctgtaccagtgttttctttgacatattgtcattactcatggcataagcagtagtttgaacagtttgatttattagacaaatttgggtttagtgattggagtgaatatttgattaatacaaggtggaagggggttatattctctcttctccataaaaagcaggttttatttctggttgagcatctctaatctggaaatctgaaatccaacatgctctagtgaacatttccattgatcatcacattggcactcaaaacatttgggatgttgtagcattttggattttggattttcagattggggttacttaacccatatcctaggagaagcaaggagcctactcattaggggatggtctttacctactcaccagcgtgccttgccatgggcagtgtacgtctttcagaagggaattgtgagaagctggaagtttgttccttttccttcttttcttcctccctctcattcttcatcaccttcttgctttttcctaaattcccttctgataatgatactggctcctcaactggctaagaaataaacaaaggctgtgcaccaagcttagggattaacctctaacat

SEQ ID NO: 100062 - DNA, 1018 bp, Homo sapiens
atgaatttcctggattcggtgtgtttcagttaacgacagacattctgctttttggatgcacaaactcacaactttgttgaggggctgttttcagcccgtgtccctatacaaacttgtaaatctctgaaagctttcttgctttctgccagaataagatgtcccatgcacatattgagtcttttctctctgagagttgagaccagctatttcttgagagagttctgattcctacttctgagaactagggtgctcattgctgctggggtactattgcttctaagatatttatttcataaatacagtgtttgtatttattcgatttcataattttatgtgttttcctttacgctgaaagccttgattcctaagtccattaacaaaagagtttattctgtttacttacttgatttgaaaggactctgatgacaaatcttccttaataacagcatttgagtaaaaagatctacaaagatattttaaactttattaagtaattttattattagttacaatgttactgatgctgtttcaaaacagctttcaaataaatcaaataagtaataaatgtaattaagactaccatggttatctacggggacaacaataaaagtaaggtttatctgtatatacctttccatgttgacttagactgtagaattgcataaaagtaatatatattatatacgcaccttaacatatatccatatatacatttttatttatatataaaacttaatatataaatatatataatttaaaattttaaatcctaaaatttaaaactggtatgctatagtaggagccattttaattattactgatatttgttttttcttatggaaaatatgaataatatgaatatgctttttgtaagcaaatatgaatatatattttaatcctccacacttgctacaaaaaagaaactatacattgttctacatcatgactgtattcacgtagcagtatgtccccaatcttcttagagattttcctttttttcacaagtgcacggtacatt

SEQ ID NO: 100063 - DNA, 1055 bp, Homo sapiens
atctcctggggcagaaatgaaaggctgagttgacatcaaaacataagtttaaattttatttgagcaaagtcaagcattgaacgttcgttattaaacagcaatgagtatggttttcggggagagatattgctaatagaagttttgcaactttacatgttttttgtccttttcagaatatgtataatttgtcatttggcagtggaccacacagatcttatttggaaataataggttactgacacagtttgctattttgttgttgttgttgttcttaaaaaaaaatgaaacacttgcattacctgtctctaaagtaaactatgaccaaaggtctcccagaacatgtaccaaaatgaagtgttgtttgtttatcaaaataaagcaagagtaagaagagttgctgagattctaacccagaactcattttgtcttaccagagctagcttgtaagtaaaagccattggagaaaaggaggagggaaaggttatcatcattgtttttgtcttgatttgatatgtgattgggatcttcaggcatcatagatctgtttccatcctgaggctttagaaatagtcagttctatgccctgaagcctataagctgtgtggggaggtcctaccacactggatgagccttgactgctgtgcagcattcataggtcactaaacatggcaagcgagttcagcttccattttcatgttcttctccaagccagatgtggcaaaaacacaggcacagaatccatggttcgggggagggagagtgggggagtaccactgagtagtagagcatagcgttgtaatgtcatggtctctgaggtcagactacttaaggtccaatctgggtacactatttaccacttatgtaatttgggtaaattacttatattttagcctttatgatgttagcgatctcttttagtgcctatttgtttccctctttggggctcagagggtcccaccttccatcaggtatcttgttggttaagagagcacacaaggtatgtatgttttggaataaagggtttgtgtgcacgtgtgtgtgtgtgtgtatcttaa

SEQ ID NO: 100064 - DNA, 1039 bp, Homo sapiens
ttttttgatccactctgaaaatgtatgtcttttcattggtttatttagaccattgatgtgtaaagtgattactaatatagttggattaatatttatcgtatttgttactgttttctacttgttatcttgttctttgtttctgtttttgtcttccacactttttctgccttttatggttttaattgagcattttatatgattccattttctctcctttcctagcatatcaactgttaactattagatcaattaagaataaagaaaataaactttaaaattttatcttcacttattccttttccagtgttgtctctttattttcattttctgaaggacagttccacagggtacaggattttaggttggccgggttttttttttcccccctattaaaactttaaatgtttcactctatgctcttcttgattgcatggtttctaaggaatagttgttgtaattcttgtctttgtccctttatagataaggtgtcttcccctttgacttatttcaagattttttcatctttctgcttacatgatctgtatgttcttgcatgttgtctactttttccattaatgcccttagtgtattaatcatagtttaaaaaatttccctggttgataattccaaccttcctgacataattatggaaccctggttctgatgtttttcagtctcttcaaaactgtgttttgctttttagtttgccttgtaagtgtttgggcaaaggtggtcatgatgtactgggtaagaggagctgtggtaaacaggcctttagtgaggtggtggtgaggcgtggggggacaggaagtgttctatagtcctatgattaggtctcagtcttttggtgagcttgtgcccctgttgaacttcacagtgcttctcagtgtcctctccctgccctggccatcaccctagtgtgggacaggatggctgcagggagctgaagttgggttattttctttaccccaggtaggttgggctctgatgtaatccaagcaggttaggctctggtaaaatcttttgtcccaagggcaaa

SEQ ID NO: 100065 - DNA, 1031 bp, Homo sapiens
ggtcaggagatcgagaccatcctagccaacatggtgaaaccccatctctactaaaaatacatggtgtggtggcacgcgcctgtagtcccagctactcgggaggctgaggcaggaggatcacttgaacctgggaggcggaggttgcagtcagccgagattgagccactgcattccagcctggcgacagagcgagactctgtctcaaaaaaagtaaataaataaaaaagatattcaaacacctttgttgtcataaccggaatgatacttcactttggtgaggggaatatggctatcctgcatcttttagaatctaattttaagatgtaaaatttggagacaagatttagcccatgatatacctaaatcagaaaccattctataatgggctcatttgcatttaaattgttctcctttagagattttgcgagttgattttgaataaagggcttgtatttattattatattaagccagattgctttttgttaaatttaacaagatgtcttttaatgtctgcaaaatcctctgacattccagtctgctgttagtaagtaaagatatgtttgcatttaaaacaaaactattggagaacaaaatgatttcttcactttaacaaaacaaatgtgtcttttcaatgggttaatcttatgagatattttaaatattggagtataatacaattgacaattggcaatcccaattatgggaaaagctgtttaccttaagagctatatatatattcctgttttataatatgcatttaaatacaatagtaatgggaataaatgttgttctacagactgcgttttagtttcttaacactagatgtcactgtagataggaaaacacgctctgcctgtttgtatttgttgcagggcccttggtagtggagttgtctgaagacgtgacagataccactgtcaataccatggaattgggcctggttgctgataattactggatgcagaatctgtgtgagagataaattgtgcagaatttagtataagtaatcattcagctggaatgtcttct

SEQ ID NO: 100066 - DNA, 2003 bp, Homo sapiens
tgagctgagctattcccataaccagctctgatgttgttactgatgccaaacctaccatattttccattgcagttctcatcttgaaggggctgctcataaataaaggtattccaagtatatgctggttcttacttttgaataacatttctggagcaaaaaggctcagaaataattcatgtgcaccatgttaaatgttggtgccatgccataaattatcttgaatgcataagggattttccttctgatcttttgcggcgaggcatgtgcgctgatgggctctgactgcgtatttattgctacggtcagagaggaaaagattggtcatatggaagtgtgctttatgtacacttgtactcagcggatgctgcattgtaggaacttggtttagttggctaagaagcttaaaaaaacacaatttcatgacatagataagttgattgtttatgtcacccaggaacacatttaactcaccttggaggatttctacgtcttgtgagcttggagaggagggggtggttggtggagcaatagtgagccagggagcaaggagatggttttctccttgcctagactagtgacttttgcctgtgtgttactctggatcaataatttatgatttttctgacgttggtcaccactcactttctgtttctcagaacctcactgcaagatgccaacaatagtagttcctgttatataaggggagaaaggaaacacacagaggctgagggcagtgtccagcacatggtcagcactgtgagcattacagcatgtgttccattttctcttattaattttgtttactctgaatctatcctttttgatgtaaaactgggttaccagtaatacctatcttctcagctgggcagaaaagaaatgaaattatgtatatggaaactttttaaggtatgtagttttatacagatacaagctggtgttacttagacgtattttatcaggtagctacaattttctgtttgtttatttacattgaataacagaaaacccaattccaaactggattatatggtacaggggtttattagctcacagaagagtgatggtgggatggagtttaggcatggtttgatcagggctctggctcaccaggattctccttggttctactttttggtgtactgacttactcctcaggctgtctaccctcagaatgcaaagggagagcagcaattacagattcatatctccctaacgcattacccaaattcaaggagtgtgcattcctgagttcccaacaactttttgagctctccattgaatggtgcatttctgaaccagtctctggggccaaggagacactgtatgctgactggcttaggtctaggttatctaaaccaatcagtgtgataagggataggttaccctgattgattgagatgaatcaagggccacctctggagccctttggagtgaggtcaagctcattcaccacagcttctgtgagctggggttgggggagcaggtgaatcagggtgacaccattcacatttcctaccataaatatagaacttggacacttactatagtgtcatatatattcaaggcaaacaggagatgcacatgagttgaggcattcttttacttcttaagagaaaatatttatgactcaggaatcctgtattgaggtgaaaaattacataaaagcagctgaatatctgtactgtggtgtgaacattccattacaggagagccctctgttttctggtgttagaactgaagaatggcacacaacaaattctgtgtatttaaagtcattttccttttctcctttagattgattacatgatttaaaatgagctccaaatgcgggtgtgttctcttcagtctttcataggtagttttgaatttggctcaatttctcattgacctctttagcttgctgttttccatcccagcctacctagcaacagttactaggagcggcaggttggacttgccctccgtttgtatcacaacagccagttttcagagattactttttc

SEQ ID NO: 100067 - DNA, 1050 bp, Homo sapiens
acgtgtgagggatctaggttgtgtgctcctaatgagaatataaccaatgccttatcatctgaggtgtggaacaatttcatcccgaatctgttccccctacccctatctgtggaaaaatggccttccatgaaaccgatctctggtgctgaaaaagttggggaccgtggccctatgtggtaggtacacatgatcacgtgaggtaactgaggcacagtgaggtgaagcagtttgtccataactatgtaagtccacggctagtaagcagcagagctgggattcggccccagccacccagctcccaggtctgcattacataccaccaccctagagagacaagtgaggtcttcagacaggtcagcagattttggagttgtgtattatttcatagagggtaattttgtattccatttcctatatattagggggatttcttcaccccttccattttctttttcagatttatccaaacatttagtacagaattatggtgacgtagaagaacttatggatgcgggcaatatcaaccggaccaccgcagcgactgggatgaacgacgtcagtagcaggtctcatgccatcttcaccatcaagttcactcaggtaagggctgctgcgggaccagctggctccatccctgaggtctttacttgctgattagcaccagctgaggactgatcattgttgaaccaggagcagcagcaggtaaaggtgactgactgtcattttcttgttaattagagttgaacatgtgctgtgcgctgagtttctctgtggttacaatcacagtaatttgaaatatcctgatgtgtacccttaagaaatacttagaaggcttccaccctgttctagacataaaacaacttgctctgtgcttaattaagcaaaagttttcattgttgcaaactctgtgggatataatggattgcgagtcagaccagctggaagccaaggtgagtaactcagtgcagttcattaccgctccatggcactcatcttgccgtgttgatgatgattattagaatgatattaaagggcagcgaatatttataa

SEQ ID NO: 100068 - DNA, 1039 bp, Homo sapiens
ccagccctgggtctctgcgcctccagacctggattttctagacccgtttgcagtcatgtctcctggccccaaaccccctgagcccctgaaccggaaaaccgcctgggttaactttctgggcaatgaagtaatagcaaagtggtaggcatagattttaaccctagggaataattttattctgaaaacctttgggtttggtttaaatgtgatattttccatgactttggtttagccccaggccaaactatgagaaacagtccttctttattctttgaaaagtttttagaagacttttttccttactagtgaattcataaaaaatggtatttgccttttgtgttttgtttaatctgagagaattggggaaatatttaatttttactcatattccatatacagtggtgaaaatgagcctccaactggtggtctggagtcctgagtgcccctggggttcctgacttttgcttcttaagagaagttcagggaggggcccttccaggtaggattggggcctggttgttgctttcgagggtgtgggaagaggacacatcacagtgataactaagtcctgcatgcagtcccagctctggcactccctggtgtgttcccagttacctgacttctccccattcagcttcctcatcaatgggtcttgtaacactactctccctgtagcgttttgatgagaattatacatgaacacacgaaagtgcttagaaagaccggagtaagtgtgagttgccattatggttgagacttgagtaagtcatcagaatttgagagcaagattgaaaactgtcagctcttaaagctaaaatggttaagaattaactcagaatgagtgagactggcaatttgtggaaatgacccaatggaaataacagtttgttgaaatcttttactgatgaggctgaggaaacaaagtctgtagaagtcagtgggaagatggatctgaagacagctgagttccagttggctgtattttcatcttgtccttggatgacaggctgtgttatcagcagggatggttgaggtgcag

SEQ ID NO: 100069 - DNA, 1357 bp, Homo sapiens
actgtgagttcagtgccttgccagtgtaggcctggagcccaggtacatggagggatggcaggaaataagtccagaggccatgggctttggggaggcagattcgcgtgatgttatttatattctcagtagagaactctggtggtgtcaagattgaggtaagaggcaggtgattagcagtttgagccagagatgaaattggaaggcaggatagttacaggaagaccactcactggcagaattggcaggatttggcagctcactggatgggaagaagggggaagaatgcgagtgtagagtcattaactgaggtttgatgctgaaggaggtgaacaggtttgaggaaggtggacaatgaagttggtatgttctctcttggatgtggagagttacatgagatgtattaagtgtcaagtacaagcacagagcaagtgtttcacgcatgttgaccttgttcattatctgaagtgtgggaaggacatccatccctctgctagagatgttcagcagaaagctgaaaatgtgggtttaggtctcaggtgatttgaggatcgacatttggaaatcttttgcacataaaccacaatttaaggatgttacgtgagaagaaaagggagccagggattggacattgggatatgcccctctttaggatttcagggagaagattggcttgcagtccgtaaaggagaaccagcacagcaaatggtcatggcaggaaagggagaagagcatcctgaaggaggtggtgggggttagtgtcaaatattgccaggatgatgagaataagatggtgtccttggtcttgaagacaaggctagttgataaccttcccaacagtacttttaaggagagtcaatgattcagaagttggcagtgagtagaaagagatatataaattggcaactgaatatacttgacctaatttataaggaaagacatgcatactataatagtgataaaatgccatttttttaccagtgagattgataaatattaactgagcaccaattgctggtacaggagtgatgaaacagacgcctctgcattgatcacggaagcataagggatcaaaacatctgaaactttcatattgggaaatttgacagtagctgtcaagattagaaatctgtatacttaagcagaaaatgcttcccttaaaaaattggaaatctataaactttttgatttgaccatttcatttctactttttctaatttctaatttttattatatggattatattgctgcctacaaagatatatgtgtaaagatgatgatttttgcatcatcattgataacaaaaaatcataagtgaccttaatatacaaaattgggaaatttgttaagttatagcgta

SEQ ID NO: 100070 - DNA, 1050 bp, Homo sapiens
actactaaaatgtgtttatttactactgtcttaaaaattgtactgcctcaaaacctcttacctcatcatcttagtgcctgaaataatggtttatcccatttcctatagggatttgaaggcttttaaaaaacaaaaataggtaggaactgacagtgtgtacagtctgtttctactcatagatataatggtttcatataacttttaaaattacatatagccaatgggaatagtatatgtttttataaatattaaaatatataactgtataaataagtgaatggtggggggggcaactcaatgcagtatcattttatgaagacttttgtcattactttattaccaataacttgtttcttttctaatttggacagaattgaagagatccctatatgccctgttttctcagtttggtcatgtggtggacattgtggctttaaagaccatgaagatgagggggcaggcctttgtcatatttaaggaactgggctcatccacaaatgccttgagacagctacaaggatttccattttatggtaaaccaatggtaagccaattccattatttcactttaatcaagaaattaatgatattgatgggacagtagatttgtaaatatgcttgaaactgtggctattgctttctgcttttaattatgtgtgtttgggtttatgtatttttatagaaaaacagtagtggtagagtttaatttatgacagttcagatgggcaaaaacaaaatacattgagatgtagaatattttaaaaaataatggcagtctaggcaatagtcttatctcaaaaagttagaaattaataatatcctggaagacttgaaaagaaacctgtttgtaaacttgtaaaacattacgaaacaaaagtcatgagtcaaagaggaaattcagtctgaagttttagaatatgtcgtagtgaaatactatgtgtcagaagctgcacagtctagatgaaacagtgatctaaggaaaaatgataggtttaaactcataggttttaggaataacaatggaaatgaaatggttatgaatggagagtt

SEQ ID NO: 100071 - DNA, 1115 bp, Homo sapiens
taattattttttatacttgctcttttctcttttatgacagtagcaggaagacagagctcttttcttatatagaagaccctttctttagttccccataacctctgggtgggatatcaaatgagtaatatctaataaactaagtgtttgttactgcttgtttgtatgtaactagatgctgtgtatatctcatttatttgccaaaaataagtaaattaaaagtccctaagcagtggttctcggtggtaatctttctagttccaatttttttttttttttttagtatgctgggaagtagtaacagtacagaggaattgagtatctgagtgatactgagtgtggtaaccagctacggaggggtgacattgctggccatctctaattttattaagatctttgattatgttatccaggtgacaaaattctccaatcacgactcacctccagaagcttaaaacataattgtttcatatactgttaaacacttaagagatttgtaattttccagactttcagtgtctttacttgaatgtctgccttgcttagttactgtaaggttttgatttatttctccagtgtcattgtttttcagctttattgtttgatatagtaagatttcacatgcctagcttacgatgctgtttaaacttacaagctaactttgcctttttactttttaataggtccctgattaccctccaaactatattttattccttaataacttaccagaagagactaatgagatgatgttatccatgctgtttaatcagtaagttttttcataaataagtctgtttctgagagcttcctcacaggacaagtagtacttccgtgggttgaatccatttatcacacagcagtaattccttacaggttcattgatttggtttgggatgaatcatgaattggagccaatttgccgatttagcaaatacaaagctaaatttcctctaatgtttgaattcttaactctgattgatgtaataacaaagctttgatataatataaaatagaattagtttattcttgcagttcttccatggtattaattacacatgaggctcttccgtctactcagtattcttggttagagtatggttatttttcttggacta

SEQ ID NO: 100072 - DNA, 1124 bp, Homo sapiens
attttccaggctcccttcctgctggctcattacatactaacttcattcctgtcccaaatgctgtagctcccatcagggagccctctccagattccattaaccttgccattcccttgtctctttaggcctagcaggataatgactccaatctgttgctagtcccatggacttcactatgcttcatttgctttattcttccatacatttgtaagtagtccctcaacagactctcctcaattactccatctgtgtaaaccaactctttcatactgacatcctgactgacatatcacctatgtaaaatatgacacatgctatacaagggatacatttacattcaaattatgacatatttaagtatagcatttgtaatgaatataacaaaaacagccttctgagaggctggctgggtgaacacagtagccaacattaacaaaacaaaacaaaacagaagaacacaacttagaagaacaaaaatgtgacatatatttgggcaaaagaaataatacaaaggaaagtcatattaagaggcaaggaaaaaattgcaaaatccattagcaattttgggaaaagtcctcagggccaaacaactagaattcaaattgtgaacaaccaggaaatcctaatatctaagggctaggaaattacaaaaaaggaaaaggtggaagaggaggaggaggagaacaaggaggaggaggaagaggagaaggacttactgaaggagaaaaatatgaaggcttaggaaggcaggatagaagttataggacccttctccatggcagcactcagaaccaccatctggtacagtagtatggaggatctgtccatggttttggccaattcacagagatgaaccttcctgcctctgcagaccaggtgggctgaaagaattcttagtgcctaactgatgtgttttcagacttcccaggatattactttgtagtaaagacatctttcagaagagcaaattgtacctggctaaaagaagaaggagaggtagatctcatttgtctcccagctattacgtgtttgtacatgattgatactaacattactaccaccagcaattgatctgagaatattgctatgctaaaaacaatttaccatgaagacaggcacaaatg

SEQ ID NO: 100073 - DNA, 1051 bp, Homo sapiens
cagaacagttggggatcagttcttttttgtcacatttcacattagctgggaacataaacttggtcttgttcaaaggttcaaactacttcttcctgaaagagaaccgatctacttaactttttttttccccagctattataaacactgagatatttacaaagtgccttgtacttctttctgtttatctcccaaggtcacgacactctatttgcatcttctcttagcaatgttatcctaaaaagaatcatcaaagcaaagattaactgttacaagaaaaaacaaataagcgagaagattacttacaaatttcgggggttggtttattatggatgcaaaaatgagtagaaactcaagtccctgagtccacctttcatgacggtagtcctgattttgctatcatttaatacaacttaggtcttaatgttctcactcagtgctgagtgtgctgggataagcaaggtgttcacagtcttgtacatttttttctttactttttatcataaaaatgagctgcagatgtcatgcagtgcagagagaagagaatgctttctgagtcagaaggtcacattttttgtactcaaccacttctagctggaaaaccttgagcaaattacataatctcatggagactcagttttcttacctgtagaatgggggttataatatttaattctcaaaactgctgtggggctcacacaaaattaatttgtgctgaattacacatatttgtaatttatacataaaacttatatgtatatgtataatagcaacagacccctgatacagtatttattattcatatacctgtccttttgacagaaggaaaaaacatcatctaagatgtgttttagacaaagtttccaatcaatgatatttggacacaacagccccttcgatgaggtgactcagctatcagtgaactcatctttgctatttttagagctgaaaaaggagaagcaggtgatactgaagttgtgtaatcagtctcagggggagggctataaactagtgtctctgtctctctcaggacatctggactcaaaggtagtgg

SEQ ID NO: 100074 - DNA, 1054 bp, Homo sapiens
acctcagtgataataataaaaattactatctccattttactaatgcatcaaggaggacagagagaaattaagaagtatccttactgaccaatccacttgccaaggtggggcagttggaagggaagtgggtgcagttgactaacgctgtggtttctgtgtagggaaccccatacacaaatccctccaagtggcaaaatccacctcactcagcggaaaatcaagtccttagattgtcccacaggtagaatgaataaacgaattgtgttatagtcatacactggaacactcttcagcaatgagaaaagctgtaagtacacattaaacatgactggatctcacaaacataactccaagcgaaataatctagttgtaaaacaggacatagtgtatgattctagtaagtatggaacaggcaagttaagctatggagttagaagtaagaatatggctacgctggcatggggatgttaatggcagtggtcacggcagggggcctttgggggtgttagtcatgttctccttattgagctgggtgatgtttatagtggttgatttgtgcccttagaaataatggcatacatcactgaaacagttaaggctcacaaccaaaagcaggggttctgtgttctatgtaaatggtgcctcctggatttatgcaaacctgcagctctgcttggaaactggttgtccctgagtcaaatccaggccgaggattgtggctcacacctgtaatcccagtactttgggaggccagggcagaaggatcacttgaacccaggagtttgagaccagcttggacaacatagtgaggctttgtctctacaaaaaataaaaaaaattagcagggtgtggtggcgcatgcctgtggccctagctacttggaagtctgaggcaggaggattattgagaccagaagttcaaggctgcagtgagctgtgatcacgccactgcactccagcctgggtgacaaagtgaggccctgtctcaaaaaaacaaacaaacaaacaaaaaatacagttgacccaaacatgaagagggaatgtgatattatgcc

SEQ ID NO: 100075 - DNA, 1053 bp, Homo sapiens
tgggaggccacggtgggtggatcacctgaggtcaggagttcaagaccagcctgaccaacatggtgagaccccgtttctaccaaaaatagaaaaattagctgggcgtggtggtgtgcacctgtagtcccagctacttgggaggctgaggcaggaggaaacgcaaaaggaaatgattttgtttgtttgtttgttttgttttgtttgttagttcatgtcttttattaactcatacagttccttgtcttctggtttgttgaagcagtaagtcagacaacatttgccacaataatgtctgtcatagtggcttgccataaacactccagcaccacattcatcagaagggcactctcgatgaaggtgactaattttgccattctcgtctaccttatagtatttcaggacagccagcttaatcttcttcctcttgtgcttattcttcttgggagtggtgtaagacttcttccttttcttagcaccaccacgaagtctcaacacaagatgaagagtagactccttttgaatgttgtagtcagacaaagcacatccatcctccagttgcttgctagcaaagatcagtctttactgatcaggaggaattctttccttatcctgggtcttggcctttatattttctatcgtatctgagggttcaaccttgagggtgatggtcttccctgtgagggttttcacaaaaatctgcattttggtggcagctccactgcaggtggctaatggaaaaggaaggaaatgttttaagatacattcctaagggttgcacattgactaatttgatcttgtacaactctcaagttctgtaagataaaatcttcagttctcttgggtagataaaagagcttcagaagtttgagttgggtgagggttggccactcccttaccatcttgctaatgctttagaccaaattcacacagaaagagatttgttaaatattaacatttattgtgatgcaggcccccaaggtccatacaaccttctctgtaggctccatgaagtctcagctctggtgtcttaggtgctaagagaacactttgcat

SEQ ID NO: 100076 - DNA, 1020 bp, Homo sapiens
cctgggaggcagaggttgccgtgagccaagactgtgccactgcactccagcctgggtgacagaaggacactgtgtctcaaaagaaaaaaaaaagaaagagagaaaggaaaggaaaggaaaggaggaaggaagaaagggaagggaaggaaggaaagaaaatgacctcgttcataggaaactggtttggggatgaggcatgatgtccaacttactctcaatggttcaaaaaataaataatagatatgcatttatgttgatataaacatatataaataaatacataaaataataaagcaaatgattggtggatttaggtaagaggtatagaagttccttttactcctcctgcaacttttccataagtttgaaattgtaacaaaagaaaaagttacctctcaaaatcccaacacctccaggaaaattgtgctgagaacaggtgtttcttaatgatagcaagaaaacgcaaaaatcttcctttgattcaccagatggtatcatgatctcagcaaccaggatttcattgacaaccacggtaggagttttacacctaccgaaatgatggtacggattttcagagacatctggacttgccttctctgcacagtctcagaatgtccttgagacattgtcgtaccaactcatcgtcattctggttatgcatgaaaagcagcccttcccatgacctcagaaatgcagaaatgagtcattgtcccagcaggtgccatcctcaggactgcgtttggagaagtgtcttttacagttataatttctgtggctataaatctagccatggtattcatatttctgccctatatttctctctaagatatcattaaacaaacctaccaccactttcaagttgggtcagcctacatctgaaccacagcccgtttccttctgggaatacactgtcaagtggtttgatatattaccaagccacagttgtccaactggcatgcccactctgtcctaaaaagaaggatgttccagccctgctttgtatcagttaggagatagatc

SEQ ID NO: 100077 - DNA, 1050 bp, Homo sapiens
gattacaggcatgcgccaccacacccggctaattttgtatttttagtagagataaggtttctccgtgttggtcaggctggtcttgaactcccgacctcaggtgatctggccaccttggcctcccaaagtgctgagattacaggccttagacaccgagcgcccggccacctctcaaatcttaataaagatccaaatcacctgagatccttgttaaactgcagattccggggttgaggggtggagtcttagatggccccaggagatgcagatgctatactttgagttaggaggtttcatggttttttccctacaattactgtagctctgtaattatttatgtgcattttccattactaccagatagctgggagttccttgaggtcatggggtatttaagatgcgtatgtatgaactggcatagcccctgatacatagtaggtgtttaataagtattgaataagtgaaccagtatctgaagatgttttacaatttatcaaacttatatatcagtttatcataacttaagatgagcccccattttttttaggtcccactgaacttcagcctctgcatttaacacccagcttttctagacattgacattcctcctctccacacggagggaaagagttttcatacaatgctatagactaataaagatttatgccctccggaagctgaaaggtaatccccaatgtgatggtatttgaagttggggcctttggacagcgattaggccatgagagcagagccccctttaataggattagtgcccttataaaagaggtcctaggccgggcaccgtggctcacacctgtaatcccagcactttagggggctgaggcaggtggatcacgaggtcaggagttcaagaccaggctggccaagatggtgaaaccccgtctctactaaaaatacaaaaatcagccaggcgtggtggcaggcacctgtaatctcagctattcaggaggctgaggcagggaattgcttgaacccaggaggcaggggctgcagtgagctgagatcgtgccactgcactccatcctgggc

SEQ ID NO: 100078 - DNA, 1020 bp, Homo sapiens
ttaaattttaactaccgatgggtttgttctaaattagcagaatcacttccttgtactcaccaagtcttttagaagcacctgaaataaagcagtttgaaaccagctgggcgcttcaggatgagattagatgttttcagatgtctcctccaacaaaaaacaaacaacgtctgcctccacgtgaaccacaattacagaccccaaacaaaacgtgtgtgtgtgtgtactgggtgtgccagcctccttatacagagattgtttagtagcccatcatcaagttactaaggttatttgctcagtagttctactggatatggattgagacatcacacctagacttgcctagctcctcttgtaaccagagtatcttttatgcttcttggaaagtaagagtgtagtcttgcccctgaagtagagttaaaaggtttgcacgataatctaacccttaaccttatcctaatctggactgtggtctcacagactgaactaattggcgcagtattcaagtattctaatacttggtgattagcaaaaacactacaacccagtgaaataggttgggcatgtattcacatgcctatttaacatatgagaaaacagattgtaaaggattaattgacttgagacaaatcaccttttccaactccaagttttaaaataataattttgaaacattttaagcagaaaagtacacagaataacagatccttttgtacaggaaaaacagggctatcttattgccatatttcaggtttttatgttatcattacagctaaatatgcatcatcttcctcatcccactcccttccctccctagagttataaccattcctgtgtcaaagacataatatcctggctggttaaggagatgattttattcaggctattgcaattaggagagcattcctgattgccttatttgaaaatatgcaacaggccagttctttgcagttacctgtttcccagaacacaaaacggtggggtggattaaccatcactgctttctgagaacacagagctcag

SEQ ID NO: 100079 - DNA, 1092 bp, Homo sapiens
ctttgtgggggtggttttttttttcccaggggagggcagcttttggatttatttgtagctttggttcttcaactgctgaattgtgttcttttgtatgattgtgcaagtttatccattcccctgttgatagacattcagccatttcctaattttttgcctttttttggtctatttaaagtttttataataggcaatttccatgtcatatattgctatatattacttctctagccccagtgtgtatctctccatggtgtatatctagaagcggaagccctggattggagcatacatattttctactctactactggttcgttctggttgtatctcatcattaacagcttgtttctacattgcctttcaccacttaataagagacttgaaacctttgccagtctgatggttgtgaaatggtttctcattattttattttgcatttctttgattactagtgagctgactcttttcatatgtttattgcatcttaggtttttacacgcatgctgcatcctgcaaacctggccattctgtaaatacttaccatcttcacctaagcttatttgcagagccataaagtaaatgtagcagtaaaaaaaaaaaaaaaaaaatcagctggatacagtggcctatacctgtcatcccagcacgttgggaggttgaggcaggaggattgcttgaagccaggagttggagaccagcctggacaatatagtgagaccttgtctgaacaaaaaaattaaataaaaattaactgggcatgctggcatgtgcctatactcctagctatttgggggactgaggtgggagtattgcttgagcctgggtgttagaggcttctgtgagctatgattgtactactgcactccagcctggccacagcgggagaccctgtctcaaaaaacaagaacatgattatcaataccagaacctcatactgaggagtaatatttctcttttctggcacataaatttctttccaggccccttagccagctaattaccagaagttcaatactctctgttaattctatccacctgccatttttaggcccctggtagtggtagaatgtagagtgacttaggacagag

SEQ ID NO: 100080 - DNA, 1706 bp, Homo sapiens
ctcctgagtagctgggactatatataggcaggcacaaccactcccagctaagctttgtattttaaaagctttacatatataaagatgggatttataaatataaatttatatataaagacggggtttataaagatggggtttcaccatgtttgcacaggctggtcttgaactcctgggctcaagtgatccacccactttggcctctcaaagtgctgggattacaggcatgagccactgcgcccagccgtgaaagtatcttgagtttacttctcttgtggcataacatttctgtctagattgtccatgaaagtcatacacaaagatttacacctaacacttcagcaatattgtaaccacaacttttcttctgttcatgcctcctttcattgatgttggaagtgagaagttttcacttggaattgtgcttctgaattacctcctgctcatttttcttgaaattttacaattgggagaggcatagacttagacaaataaacatcggttttattcatctcagtaatactttgggccaaaatgttatattcatcattgaatctgctgtactaagacccccattgagttgaatatttagagtgattcttagctccaagattagtcttctagaagctgatactgtaatacttacatgctgccaacactattccatgttttgctttgttatgttttacgtagattttttgtttggaggttctagcaggggagcgcagctgctcatataaccttgaccaaagaccggttctcctctatcaggaatggtcatcctctttgaccgagtgcatagctttgagagggatgcacatggagtggtgagggaggaaggggacacctgcctagccagccagatcagccgaatcaaccctggtgatcaatggggtgacagatgttgcagccagatcgccctcacatcatacgtagattttttaaaagcaattgatttcagtaaaaaatgcaattaaagttttaaaattaacaaagtaatctctaattgaaggtgtgaaaagactgagaacgtctgttgcagcacggcatagatgagtgcttgaaagatagaaacttaagttcattctacacctggaaggtcatttgtcattgtgtttgtgcttttggatcacatcaaaggaagattgtttactcctttgaacatttttacattacttcataggttgttatttctgtttgccttctcacaggaaagcaaggatgaatttcctacccttgtttctatcttggcttgctttcagaaaatagcttgtaaatgtaattagtgtttattttaaaatggtttcacaacttttctgttgctattttcatgtacaggtggagcatccctaatctaaaaatccaaaattctctaaaatcccaaactttttgaacaccaacatatggaaaattctacatctcacctcatgcgacaagtcaaaatgcagacaaaactttcacacatagaattatttaaaatatcatataaaataattttcaggctatgggtataaagtgtatatgaaacacaaatgaattttgtgtttggacttgggtcctattcccaagctatctcattatgtatatgcaaatattccaaaatttgaaaatatctgaaatcaaatgcttggtaccggaaggtacttaacctgtagtaatagaactaacactaaagcacagcacaggcaaatacaggtaaggcttct

SEQ ID NO: 100081 - DNA, 1331 bp, Homo sapiens
aagtcagttgttgaagctcaggagttttgaggaattctcaaatcattgtaagaatctgcagcctgaccaacatggagaaaccccatctctactaaaaatacaaaattagccaggcatggtggcaggtgcatgtagtcccagctacttgagaggttgaggcgggagaattgcttgaacctgggaggcggaggttgtggtgaaccgagatcacgccactgcactccagcctgggcaacaaagcaagaccctgtctcaaaaaaaaaaaatctttagaggaatactctagttataagaatatttcatctttaggccagtgttgtcaaatggaaagaaaatacaagctatgtatatacttttaacttttctagtaatattttaatatacttttaacttttctagtaatatttttaaaaattgagaaattttacatataaattgtttgaaatccagtatatattttacactgaaagcacgtgtcaattcaggtgctaaattttcattggaaatacttgatctgtatttagatatgataaaatttacatttgaaaaagtagattcatatactcaagttgctccagacctacttacaagttttccagtaatggataagaataaatttttagaatttaagttaattaaaattaaatgaaaatacagttcctcagtcacactagccacatttaaaggactcgttaagtcacatgtggctagtggccactttattggaccaacctaagactttgtgagttggcctacttaatttgtaatgggaagttggtgtgtgtaccaactaaattctctgcatttctgcacatgtccaagaaacgatgctgagatagcatatgaatttctttataggacttaagatgttttatgaaactagactattgagctcttttaagatggggatcgtacattccagtagcaagataccactctcatagtaggcccacatagatgttactgaatgaacatgaatgagtgaatgggagagggtattcttaattatgacaaaggacaggttcccatggaggtggagtcctttaatttttataccttctattcccacataccttttttaatgtaatggaaattgggttttaagtattgaattaattgaatagtacctcccctttgtatactgcatgataatttactttgagtcttacaagtaaaaatccttcaagatagttaaggcagttattagagtaatacctttaaagtgattgtggcatattgaaagtcctcaataaatgccagtttcctttctttccttaaaaatgaaaccgtggaatttcatgctcattgaggcatcctgaaccatagaaaag

SEQ ID NO: 100082 - DNA, 2015 bp, Homo sapiens
tacaacctttatatgcacagggaaaccaaaaaatttgtgtgacttgctttattgctatggtctagaattgaacttgcagcgtctccaaggtatgcctgtatatactaggaaaagggacatattttaggacaaaaccaatggcttgcctcataggacccagtttcatcattgcagattttgatttatagctgcaggtgatggttgtgcctaggagaatggtaggaggtattgtaattgaatcttactgtgttgagagaactattcccttctctttgctgttgatatggctttgctgtttaaccacttaatagtcatgtggagaaagaagagatgcacattaaattcttaggtttgtttttaattcgtagttttgattatcagagaacaaatggaaattactgtttcaaatcagtcttaagctgtttggtttctttatccataacattctgttacccaaagatttcaataaaaattggctgcattgttaactagaaagagtcgaagaagctctaactagattttctggttaatgtaagagtctttgcttagtgcatggaaggccttatgtgtgttgttttaatcagtccttttgagttagcagtatgataattcacattttacagatgatgaagctgaggattaaagaagttagctgacttgcccaagttacaggattttagtaagtctgattcaaccctgtggtacactttctcctctggttaaaaaggtcttcaaaggttaaatgttccaaattctgtttttgagaataacacagccagtttaaaaatatatatatattcagtatttgacttgctcaattttcccagttaattgtaaaatcagaaatagccctgtgtgtagtattgttacatacaatgaagttatctttattgctgttacataaaccttatattttaaatccattatttcacttcttccccaataactaggcttttgtttctcaaggaataaaaaaaaaaaaaaaaaattcttgttatggcatctgtaagaattaaggtctttgcttaaagtcaagtccttattatttttttgagacagggtcttgctctgttgcccaggctggagtgcagtggtgtgatcttggctcactgcattctccacctcctgggcccaagtgatcctccctcatcacctgagtagctgggactacaggcatgtgccaccacacctggttaagtcaggccctcttgtatgaaactttatgatgatccttcattttggttgttttgactctttccaaattaacactcggaataggtactttaaaaaaaaagagtttatctgaatttctcccaagatttcttccttgccctcagaaatagttaaccatagttaattgtagtaaactagaattgaagtctttacccttggaggcattattcttttttttttctttttttctctttgagtgactttgatattagaggcattagtctgtcattgtgtacatgataactgagtttcctgatgacagcaggcatcaatcaagctaaataatatattgttttctgaggcagaaaactatgaaatatggtcaataaatttgtttactccagacatactactttggtattaacagagttaattttatgtgttactttatatcaaactatttaaaatttaaaatttcttcagctttattagccacacatcaagtattcagtagccacacttggtagtgattaccatattagacagtgcagaaaagggacatcttcaccttatgtaaaatgctgatttactgagcacgagaccagtacataatgtactgttccctacttgctttttttctcttgcacagtgtatgaccataccctccttctttcccctccaggcacgtttcccctttaaatattgaagacctcaaaatcatctttgcagaaaggcataggccacagactgtttccgtgcttctgggttcttttcttctaggcatgtcctaaaccttggcaaaataaatttctaacttgattgagacctcaggtacttttggt

SEQ ID NO: 100083 - DNA, 1055 bp, Homo sapiens
aaaatacccagtgttccatattctttgtaacatttacttccctctgtgagtgagtagtaacatttttaaagaagcttacacagtgattcttaagtatgcatgcagggcctcagatgtattgatttaatctctgaaacattatttcacaaaagctgtgccagaggagactcagacaggtttgagaacaagttaaaaactggtagtcaagcgagataaaatgcagtgaagtatatttttaacagctattttttgacatgggggtggagctctaagagcaactgttctccagtggtcactggtacatggagaaactgaagttgtggataacatatctttttaaggtaatcacaaagctcttgttatgatagcagtctatttttgctctcaagattttccttcccatttgtgcagcaaacttggtgctatgttcagagtatcctttaatggtctttattgttaaaactgtgtacttgaatatcagtaactcttagaaaattttttaagtaaaaacaatttgattttgcttttttaaaaataaagtttaggtttcttgacaaatgagcaattaaatctaataacctaacattttagagaaatactagggctgggcatggtggctcacacctgtaatcccagcactttgggaagctgaggcaggaggatcacttgaggccaggagttcgagaccagcctgggcaacataacaagaccctgtttctacaaaaaagttaaaaaattagccaggtgtggtggtgtttgcctgtagtcccagctactctggatgctgaggtaagaggatcgcttgagcccgggagattgaggctgcagtgagccatgattgtgcctctgcactccagctagggcaacagagcaagaccctgtcccccttcccccccagaaaaaccacggaaatactgaaagaatgggactgatgggaaaggctcttttaggtaaaaagataataaatatctgtaaaacagataattctgtatattggtgttacagccacttttgttttaatattcaccatgatgttgttttgtgataacaaatca

SEQ ID NO: 100084 - DNA, 1037 bp, Homo sapiens
ttttaatattcaccatatctcaaggatgtggtaagtaaaccatggtataataaatttaagtatattcattaaatctaacatatactataccttgtgggttttttattatttttgcaggcaaaatttagtatatagtgttactagtcatgaagagccatactactagttactagtcatgaagagccatactactctaatatcaaagccaccacagtggggaaattaaggaaagtgagcatttggcattattaattagcctcctgatcaccatacagactccttcctttccacctcccctctcccagtccagtgattgtcaactacaattgattgcacctatgcagttcccatcacttcctccttagtaatgctgccactaccctagtgaaggccttttgcacctcttgccttggttgctgaattagccttttagctggagtgcctactataattttcttcctcttcttgttctcttacgcatggcttcatgtattttcccaaagcacaactctgttcctcttactctttttaaaaatatccagtctccaaacccctgaaccttctgttggaggccttttccatctcaacctggtgcgagtctccagtttccttctcccttatcctcatctcctgttgtatttgctgggttctctttgtcaggagcagtcttttcatcctttcagtccccttgttttagagtgcttttaagtcagcatgaaactacctgatgaactgtctttctgtttaagctactttctttaaattcccttccactggagtttatcaaggaataatgtatattctaccaagtattgaagctttgtatgtgctgtccttatcttctccataagtcaaactaatgattcatctgactgatctttgatttttttttcagggtaacacaataatgaataagacagacaccgtttatcttaaggaacttacagtctttaagaacttgtggccttaaggagatgatattaagtaattttaaagatagagcattgaagtggtaggaggtggtgtgtggtggagat

SEQ ID NO: 100085 - DNA, 1187 bp, Homo sapiens
ataacatacattctacccattaattaattcctcatcctcccctggctctccattgtcttttatttcacactgtgtccaggtgtacacattatttagttcctaagtgcgaacacatggtatttgttgtaataactttattgaggtataattcacataccacaaagtacagttcaattcagtggtttttcagtatattcacagttgtgtatgcatcactcctgtcaacttccagaacattttcattacttcagaaaggaacccatactcattagcagtcactccccattccccttttttctcaacctctggaaaccactaatctacctactgtctgttgattttacccaatttgaacattgcatataaatagaatcatgcaataggtgcccttttctgtctggcttctttcacttagcacagtgtttgtcaaggttcatccttgtagcatgtatcagtacctcatttttttaatggccaagaaatattccattgtgtggatatactacatcttaaaaatctattcatcactaaatggactttaggattgttttcacttttggtctattttgaataatgttactatgaacatttgtgtacaggtgttggtatggacacattttcatttctcttgagtatatatacctaagagtggaattcctaggtcaggtgttaactttatgtttaactttttgaggaactgccaaactgtttgccaaagcagctgtacccttttacagttctacagtagcatatcagggttccaagttctccatggccccacaaacatttgttattgtccatcttttttattttagccctcctagtgggtgactcattatggttttgaagtgaagaggtatctcattatggttttgatttgcttttccctaatcactattgatgttgagcattttttccacgtccttattaaccatttatacatctttggagaactgtctatttaaatcctttaaaactgttttttaattgaagtatttgcctttttttataattgagttgtaagggttctttattctgacaagttccttgtaggatttttggatgttttctctcattctgttggttatcttcatcttatatgcatttttatttcttaaatgatttgacatttgggtatcattaatatttttccattgtttagtatttaaattctattgcttatgatt

SEQ ID NO: 100086 - DNA, 1042 bp, Homo sapiens
caggtcccttttggtgcctaccagcataacagatacattgaggcaatgatgggagacctctgggtaccacttatgcctcacattggcctaagaggatgagttgccaatggaaaaacaaatgacagagatattggtcttggggataggagaacagtcgcagttggtcatattcctcctcttggccagtggtgtcccacaggttcaggctgatgatttggccatccacagatgtctgggtgctgtagttgtcaaagacattgggcatatactccttaggaaaggcatttgttgtataactgatggggaggcaggctttgtctacagccacatctcctgcaatcacacatttgattgtctacattcttcccttagtctgatcatcctccagtgctgttcaaccatgactggcagagcctcctgggcatctcttgttgggctttataattcttgctttagaaaagctaacatgcaaaacaaagtagttaatgaggcattaacaattatggatataataaagttaatgtaaatagcacattcctcaagatgaaaaaattaaaaactggtttaagatcttgtgctatcaagattttgtttaactgtccttcagcccagaatagcaagtataacatagcgaaaggtaatttttctggtcagtataatccctaattaagctaccctctttattatagcagtagacattttcttatttattctaatcttagtttaaaatttggaatttttaagtgaaattttaatggcaagtgtgactaatactgaatattgatcacataattttgaaatgtgagtagagcaaagacctcttaataaatctttttttttattagagaaagagatgctgtagggatggaaatttcccagtctagcagctatgaccagctactgtgtattacaaaaggaattttaggtatcatgaatatacacactgggaagatgatctgcctgtagtcaaggctctaagcaacctgtataagaagaaaataacccagcaccttaggaaacacttcttttaaggttctagggt

SEQ ID NO: 100087 - DNA, 1050 bp, Homo sapiens
gaaggctggttcctggcatggctcgttggaaaagtagggttttggcttataagtaagaaagttaaaagtagtaggaaattttagcctataaaagcagtacattcagaggatgcctcctgtcctttccccattgaaaaaaaaaacaaaaacggagagtcacataacaagtagatagaaaatagtcaaaatttagtttgggtcccataaacatcagccctggtaacattatgaaacctgtaaataaaaattaaatgacaacaactgcaaatagtttgaataaaaattactttggtgctggaactggtcttcccgagtgctaacaaaatgagttttacagaggctcaatatttctaacatgcttaccacaaaaaaaacatcaactcttcttttctggattcttttgtttcaaagcttgcatcatacaaagcatagcgacaatctttttcaggaagcattcccacaaaatgcttgaaaggatcagttatggttacaccaacatctccaaccaagatctctttgccttcttctacaatgatgcactttttgtctgcactgagacaaaaaatgacagccttctttcttttcttgatttcttctggtgtggagcatttacgaactttcatgtcataaaaaatgcgacatacttcatcagctacttgcactcctgaggcctatgatgagaaaatacatgagaaaaagacttacaatttttattgtgccaaacataaaataataaattctgcttatagattggcatatatttaacattttaaaggtatatcatctaattaaaaaactagaaatttgagctgtaatcactactaattttagacatcaaactttttaaaagatcacaaatatatgccattcctcactactgcacaggggtaaggaaacattcaactatagcagcctctcctaccctagaaccttaaaagaagtgtttcctaaggtgctgggttattttcttcttatacaggttgcttagagccttgactacaggcagatcatcttcccagtgtgtatattcatgatacctaaaattccttt

SEQ ID NO: 100088 - DNA, 2659 bp, Homo sapiens
ggtcacacgtacttacggattattctctgtacttttatgtattttaaaacttttttccaactagaaaaactgtcaaaaaccttgtgtaaatattagcctgaatccaatcccttattaataataatgaaaaatattctgaagaaaaagaattgggttatacagtgaagtactcagtgttggttctttcattatggcgactgtaatctgatttttaattggtgattgtcttttgccaccagtggttctcttcttttttcccaccctggtcaacctgagtgattctgcatatgcctatctgtagcatttcctctctgagctgctggggaggtagaaaaaatgtgcagttaagaaaaaatatctcaggagagtctgaggattctcagcaaatgtttacacaagcaaatgtttaacaagttgcaagttatactttctctaaaccacttttttcatttttggcatctttctatctagggcaccagaactagcacctctgaaaagtaaaatgatctatgcaagctccaaggatgcaattaaaaagaaatttcaaggtatgttctagatgacctctgaatatgtagaggtatggtgaacactcagaatggggcagcaccttttctgagaagcaccttatttttttgcagagcttcgggcacaagggagaagtgttacttgttttgagaaaagcagaagactgaatttgactttccatgtatcttctgctttgtgctggttgctctgggtctgcccagcctgtgtttaataactatacccttgacattgtctatatatatcgtttattcaggctggttttaaactagtttgaggtgctaccagttttctcatgtaggaggtggagactgattgtttaacattggacataatagtaaatttgctcttgcctttgaatgtagttgttataataaagttgcaaaaaggaaatgtacctaaatgagaaaggatgctcttttctccagctttactgttgaatggcatgattttaggtaattaattcatctgtgtcccaaggaaagtgcacccactcctgagctggtcagttgtatttgacttgccactgggtgattgggatcctgatgagatggcctggccagacttcagccaggagaaaatgttggtatgatggaaagaacgtgcatggggcaagtgcccaaaggcctgcactgagggcgaagcctgtctaactgctgtgtggccttggccagaactgcttaacctccatgggccttgattctctcagctgtagaaggggagacttggtctcatgtgtgagttttagtttaagagtttgccctgccaccttcctgccatggctgtttccaaacagctgagtgagccaaggtcacaagggcttggcctgatgttgattttgttttgtttgttttactgtcactggtttttatattttcatggtagaacaggtttgccctagcctgttttacttagttcggaaaaaaaaattcttgcttcctttcccgagccttgctgctgcatagtttattgctgggtcaggttcttcgtgcatttggtttgatgtttggcaacccccagaagtgtgtcactgggttgctaactgacacttttaaatcctttagcttcaacactttcccagcccaaccaaaaggttcacagtggattccttattatctttattctgcattgcctttcagtaaagggaattgctttgcacacttgatttggtgatactaaaagatagtggccggctgggtgtggtggctcatgcctgtaatcccagcactttgggaggctaagacaggtggatcacctgaggtcaggagttcgagaccagcctgaccaacatggtgaaaccctgtctctactaaaaatacaaaaaaaaaattagccgggcgtggtggcacatgcctgtaatcccagctacttgggaggctgaagcaggaagaatgcttgaacccaagaggcagaggttgcagtgagctgagatcgcaccattgcactccagccagggcaataagagcaaaactctgtctcaaaaaaaaaaaaaagatagtgaccatgctgccttttttctaatgaaagcatccactgtctttctcagatcagtcctgagtagttcaaaagctgacctgctgtgctttcagcagcttgagaaataatggtctttaaatgatgggaataaccatgcagctatttaaaagacagtggccatttacagagaagctactgtatgtaatccataattgagctcgtttttgcattgtggtagtgtaattgttctaagaaagcaatcagtaacatatttcacatagttttcattgtgatcgatttcataaatgtgtagtgtaataccattgaagagccagctgtttacttttcaatacagttgacaaaatcaactgtgcaatcaaaaatcatttgtatttttatgttttaaaaaccaagaaaattttcttactagacctgccttttagctttttagcaaagtacaacatatctttagaaaagtgtatgtcacaaattattgtagaatgtgttgaatttttcagagtgaacataatggttatttcttaatctaatgaccagcaccccagaagcctccctggtgctgttcccttcaattcatagcacttctgcctgccccttcctcctcaaagtagccagcacc

SEQ ID NO: 100089 - DNA, 1037 bp, Homo sapiens
cacatcaataaaactttagactttagatttatttagggctgtttgcatatgtttatagaatagtttactctaaaagatgacaagacagctccccctcagtgagaccctggcctaaatatatttgctttatttatatagcaagaggataacattaaacatggaagctttcaatttgtggcactgaataatctacacagggcatccttcaaaggctacaattaaggatccacctaacttttcagcaatacaagcccgattgagatcttctggtccatttgcttgacattcatgttttatgcctagagagaaaaaacaacacttctatttacaattatggcagcagtttacctctttctctaagataaccaaacttttaaaagaccagttctaatctggataaactggggtatatacaaacacggaatactacacagtaacgagaaaaaataattgtaactacatgcatcaagatagatgggcctcacaaacagcattcactgaaagaatccagatttaaaatgcatatattctattatatatataggtatagcatacaaaatcagcccacgctaacttacgctgttagaagccagggtgctggctactttgaggaggaaggggcaggcagaagtgctatgaattgaagggaacagcaccagggaggcttctggggtgctggtcattagattaagaaataaccattatgttcactctgaaaaattcaacacattctacaataatttgtgacatacacttttctaaagatatgttgtactttgctaaaaagctaaaaggcaggtctagtaagaaaattttcttggtttttaaaacataaaaatacaaatgatttttgattgcacagttgattttgtcaactgtattgaaaagtaaacagctggctcttcaatggtattacactacacatttatgaaatcgatcacaatgaaaactatgtgaaatatgttactgattgctttcttagaacaattacactaccacaatgcaaaaacgagctcaattatggattacatacagta

SEQ ID NO: 100090 - DNA, 1032 bp, Homo sapiens
cctgcacctgccagtgagctcgccattcactgattggaagagtgacctggcatcttggaaatcattgtgtgtcttcaggagaatgtgcagtgtcttgtaacaactaattataatgcaaattagggctacattgtaatctgctttgttaatgaaaatgataaaacagaatattgacaagctaggacacctgtggtatctttaattgtatctccttcagaagtttgcttcttatggtataataaagtatggaagaatattgagtatatgtttactctgggcctgggagaacttaactttctagagcagtttgttgacttgtgtgcaatggggagaggtaccatgatgacactcacagggagccactgttcactgacacttggaagcggtcattgttaatatcacgggcgtaacactttgaacgatatagagatgcacaaacagttgaacttagaagtagcagtattggctttatgtaataaaggaagcatttttgacttacctctcgtgtaattttcatgtgtgaattgggaatacaggattttgccttccatatggggtaaggcattgaggtttgggtatttccaataattaagagttaaggttggctgagtgtggtggctcactcctgtaatcccagcattttgggaggccgaggcaagaggatagtttgaggccaggagtttgacaatcagcgtgggcaacatagtgggatctcatctactaaaaataaacaaaattagccgggtgtggtggtgcacgtcagtagtcccagctactttggatgctgaggtgggaggatcacttgagcccaggaggtgagctgagatcgtgccactgtactccagcctggatgacagagcaagaccttgtctcaaaaaaaaaaaaaaaagtcacaactccctctggtgaataagaaagttggtgtaaaagttgggaacgttttcaatgtttattacactataagtgtaataaatattatacaaaattataaattcacatttaaaatttagaaaatagagaaaagggaaatta

SEQ ID NO: 100091 - DNA, 1456 bp, Homo sapiens
actgagactttctcaaaagttcccctagagactaactactagcattttattcaatttctggagtgagttctggatgcttacatcacatccctttgtactgtttgaaatccttcccacagaagacacctcacacacgcacaacagtgccacacttaagccaacaccacaggaaaaatctccttctaaaactccttgaccaaatatcttgctttacctacatggctgacttttgagtacggcagtcttgggcttatggcacttccctggaggcctgttaatcacaatcactagcaggacacagtggctcacacctgtaatcacagcactttaggaggccaaggcaggaggcttgctggagcccaagagttcaaggatgcagtgagttatgattgcaccactgcactctagcctgggggaaagagtgagaccctgtctcaaaaaacaaaacccacactaaaagcattgctacaaagtaaagaaacaagcaattcaggatgaatgacaagcagccagcactattttctagacaattccaaaatattttgattaaagcataatcttgtctcacaaacacctggcatgtggatcaacattaaaatgttccccaccctagactgcacttaaacctagtggcatagcctactacacacctaggctgtatggtagagcctattactcctagaccacaaacctggacagcacgttactatactgaatactgtcggcaactgtaacacaatggtatttgtgtatctaattacagtagaaaatacattataattgtatgggaccaccatagtatatgcagtctttgacatgtaataatgcacagctgtgtatcaaaatgctaaccatgtgatggcatgtggtaggacaatgtataatttcccttttctctattttctaaattttaaatgtgaatttataattttgtataatatttattacacttatagtgtaataaacattgaaaacgttcccaacttttacaccaactttcttattcaccagagggagttgtgacttttttttttttttttgagacaaggtcttgctctgtcatccaggctggagtacagtggcacgatctcagctcacctcctgggctcaagtgatcctcccacctcagcatccaaagtagctgggactactgacgtgcaccaccacacccggctaattttgtttatttttagtagatgagatcccactatgttgcccacgctgattgtcaaactcctggcctcaaactatcctcttgcctcggcctcccaaaatgctgggattacaggagtgagccaccacactcagccaaccttaactcttaattattggaaatacccaaacctcaatgccttaccccatatggaaggcaaaatcctgtattcccaattcacacatgaaaattacacgagaggtaagtcaaaaatgcttcctttattacataaagccaatactg

SEQ ID NO: 100092 - DNA, 1334 bp, Homo sapiens
tgattacaggtgtgagccactgtgtcctgctagtgattgtgattaacaggcctccagggaagtgccataagcccaagactgccgtactcaaaagtcagccatgtaggtaaagcaagatatttggtcaaggagttttagaaggagatttttcctgtggtgttggcttaagtgtggcactgttgtgcgtgtgtgaggtgtcttctgtgggaaggatttcaaacagtacaaagggatgtgatgtaagcatccagaactcactccagaaattgaataaaatgctagtagttagtctctaggggaacttttgagaaagtctcagtggattcctgaggcccaagaattgtgctaacaagcactcaaggcgattctggtacataattagggttcagacctcagctgattggtctactgttggtcaggaacaaaactgcaagtatactctgtttccagaaaatacgtttacctcttcacaaatgctaacacactgcaaaaatatgtttgtggaaagctgacttagtctcatctagcggttactctcttgccctgacaaagcagcaaataaagccattgctaacaattcaatcagagcttgactgtgaagttatctcagataatattactctgcaaaaacagtggacacagtgacttggataataggtttggtttggtggtttcctttctgcagagtaccggctgccgcaggcacagcaagtgcaacttgtttcttgactataattgcccttcggaccaccagagactgaatatgcccaacacgcatcacttcttcgtgatttggggcatttctgaaattgagaacgggctctagactgggttccagctggactgcagctggaagggacagtaatggcattatggctggtgaggggagtattccaggagccagggtttcagtggaaggcaggcttgagtaccgttttgttactgagggctctctgggttctgcacagtcccaaaagggcactggggaagggacttatggagcctctggccagtaccctcagtaaccagcccagaggtgaattaacttgcctaaggttaatcgactcacaagtggcagaactgggacaaaaactcagatctcttggtttctgttcctgagctatttccaccacctcaggagaattcacttcattcctcttattataattggatcatctttccacatttctaacatctgaaattcaaaggttagaccttgttcagtgctggggtgagatttgaaagggccaagaaggaaagcatttcttttgcactctgagctctcatcagacccagccctgaaggaagtgtagtgatggcatctgtggagggcg

SEQ ID NO: 100093 - DNA, 1034 bp, Homo sapiens
tgatttggggtctgcacctacagggctcaggagcagctctgggcagggtctgcagccatcgaaggggactgtctcccactgcaaccccggctgggacatcgctagcaggatattcgctctccagagttttgagcccggcaatagccaccaagagtcctcaccaagaggcagggcctgtccctggggtggccatggtgtggctgttaagggggttgtcatggggccagggctcggaggcatcgttcttgtcctgtgagtctcgttaaaggcccctgaggttgcagaggccccatcagctgctcctgagccacaccgaagtctgtaccaggggctgaggtgccctctccccaacgaggggagcgttggggcagggaaaggggaagctagaagcagctagagagcggtgcctgtgctggatccctgggcccctggagggttcctcaccgggctgccgggttatgtttgcggtgtttgcacagctgaagacgcagctggagtggacagaagccatcctggaggatgagcagacacagcggcagaagctcacggccgagtttgaggaggtcaggccctgcctggtggctctcagcccccatcagcccctgggccctgagtctccagggaatgagtgggtcagccctgccccgctcggctgtgcccagcagcacctgggctgggcctgggccttctgggcagcagtgggtggggcccgggcaggtggagcacaggctggaggcaccttgggagccctgtgggtggtctgcatccctgaggagccttgagggcctggggctgggtcagaacttgtgggtctggcccactcattccagctacaggatggagctgttgctccatcaggctgggggggccccctggtccccaggcgtgctcggtagggtcttgacagcacagccgtttataagacgtctcacccagacctcacttccctctccggcaaggctcagacctcggcatgtcggttacaagaagaattggagaagctccgcacagccggccccctagagtcttcagaa

SEQ ID NO: 100094 - DNA, 1062 bp, Homo sapiens
tggcctcgagcaatccacctcagcctttcaaagtgctgggattacaggcatgagccgctgtgcctggcccaaaagtttgagattaaaccagaattgggatactgggcttgtgcttctgcttctgaagagcagaaaaagtgtcagatctaaatccactccccaccagatatgacatcagcaagccaggcagagaatccccttgcggagggataacctagaacgtcaaacgcctccctcggggcagggctgcctggctctgcccctgtcctggctgggaggctgcctttttgaaacctgccctgagagacacctcaggcctgacagcccaacgaggggcctgtgaggcttcgggcaaacgcctgaggactcggacttcaaggcttatgtcaccgagagctgctcccacagggctgaggagaagcagctcagggaggaccgcagatctgctgggcaggggctgcactccttggggggcagactcacccctgccacctccttggcgtagttctggcactcggcgctggcggccgccatgtgcttttccagctctgcctccaaatgcgacgtgtgctccctcacctggacagatgcacagacacgcacacgcatgcgccagcagcctctgctcaaagggcactcacctcagggagcaggctggccctgggataggtgaggcctctcgggagatccctgaggcccaccagctaccaagcaaacgagaaactagtccgcggcaagagaaccccttacggaaagtggcaggctgcacccgggcactcctggggactgacatgctcttagatttacttgcaaaagcaggtaccaagggtaccttctccagggctccctgtggcgtctgaagggggcagtggggccaccttgactgtgaaggccgtggcagaagccctgttcaccagggctgggcaggtctgcacagggcccgtggctgggtctcagggtcctctgaggtagtcaatgtctctcattaaggaaaaacaggatggacaagatcccttggcttgagagagaatgcctctcttaaggcacacggtccatgaggaa

SEQ ID NO: 100095 - DNA, 1695 bp, Homo sapiens
cgggagggagagggccctgcctcacctcggtttccccccaggagggcatgctcagagacctgcagaagagcgtggaggaggaggagcaggtgtggagggccaaggtgggcgccgcagaggaggagctccagaaggtatatgcagccctgcctgcctcccggcgccgtggagcacatgaagcccaggggagagttgacaggattgtctctgtcacctgtgagactcgtgtgtctcggtggggcttttccacgacaccctatgaagcacagttgcgggatgacagctcagtccgtcctccaggaggcccccgcctaggaagacactgccagatggcgccagggtgaccgtcccagctgggcggagtgggcacccccggggcttcctaagttgggtcagtcccgctcgggtcctagcatggcctcggaaggagacacccccaggtgctcgtgtctgacggagccttccccttgctttgtagtcccgggtcacagtgaagcatctcgaagagattgtagagaagctaaaaggagaacttgaaagttcggaccaggtatgtgctctgctcagagaactctttctcttgtcccgggagcctctttgaaagtgacgttaatgcagaggacacttcactgatttcttcctcatggaccgtgtgccttaagagaggcattctctctcaagccaagggatcttgtccatcctgtttttccttaatgagagacattgactacctcagaggaccctgagacccagccacgggccctgtgcagacctgcccagccctggtgaacagggcttctgccacggccttcacagtcaaggtggccccactgcccccttcagacgccacagggagccctggagaaggtacccttggtacctgcttttgcaagtaaatctaagagcatgtcagtccccaggagtgcccgggtgcagcctgccactttccgtaaggggttctcttgccgcggactagtttctcgtttgcttggtagctggtgggcctcagggatctcccgagaggcctcacctatcccagggccagcctgctccctgaggtgagtgccctttgagcagaggctgctggcgcatgcgtgtgcgtgtctgtgcatctgtccaggtgagggagcacacgtcgcatttggaggcagagctggaaaagcacatggcggccgccagcgccgagtgccagaactacgccaaggaggtggcaggggtgagtctgccccccaaggagtgcagcccctgcccagcagatctgcggtcctccctgagctgcttctcctcagccctgtgggagcagctctcggtgacataagccttgaagtccgagtcctcaggcgtttgcccgaagcctcacaggcccctcgttgggctgtcaggcctgaggtgtctctcagggcaggtttcaaaaaggcagcctcccagccaggacaggggcagagccaggcagccctgccccgagggaggcgtttgacgttctaggttatccctccgcaaggggattctctgcctggcttgctgatgtcatatctggtggggagtggatttagatctgacactttttctgctcttcagaagcagaagcacaagcccagtatcccaattctggtttaatctcaaacttttgggccaggcacagcggctcatgcctgtaatcccagcactttgaaaggctgaggtggattgctcgag

SEQ ID NO: 100096 - DNA, 1022 bp, Homo sapiens
tcagtaaagacctggggaggtgccccacacctccacagctgaacaccttccgctcttccccacccaccccccaggaggaatcggagaagcagctctgtctgattgaggcgcagaccatggaggccctgctggctctgctcccagaactctctgtcttggcacaacaggtaggaggggagggtggttcccggggacctcacagttctcagggaatgtccccgggtctcaccgaatgtgtttcattgcagaattacaccgagtggctgcaggatctcaaagagaaaggccccacgctgctgaagcacccgccagctcccgcggagccctcctcggtaagtgtggctgcctggcaaggctcctctgttgggctcccctgtccccaggaagaggggctgccccaagtcatttcaacgggaagccaagagaagaacctttgtgtgtggctaactaaacacctgttcttccctctctcaggacctggcctccaagttgagggaggccgaggagacgcagagcacactgcaggccgagtgtgaccagtaccgcagcatcctggcggagacggtgagcattgggaacctgtcagctgggcatccctgggaggctgcagggaaggagagcttcggggcctatggggcaggaggtggcctggtgttttggaaaagcccactggccttgtgactctgggccccgttcttcggctgcatggtaaatggatggcaccctctgaggtcgtcattgtttctaagctgaagagaaggccaagttgaaggttcggggccggtctctaagctggggaaggggaaggacggggtaagcagctggtgactgccaggttgaaccccgtttgtgactaagagcaatgccaggtctagccctgccactctctggccagcccatcctgtgctcctcgtcctgggccattgacacacttggtgctggtggcaaaccccggcagtaacaagcatcctagtggtcctgtgcaggtcacagacctcatttccttgcctggcactgcagcc

SEQ ID NO: 100097 - DNA, 1123 bp, Homo sapiens
cctgtgtcccctccaggacctccgggagaagaactggaaggccatggaggcactggccacggccgagcaggcctgcaaggagaagctgctctccctgacccaggccaaggtcagagcccgaccacactcacacccccaccatggaaagtgcactaggatgcacaaatgcactaagacgtacagatgcactaggacaccagatgctctaggacgcacagatgcactaggacagacatacagaggcactaggaacgcatagaagcactaggacacacagatgcactagtacgcacagacgcactaggacacacagaggcactaggacagacacagaggcactaggacgtacagacgcactaggacacacagacgcacaggtgcactaggacgcacacagtgcactaagtgcgcacagagtggccttggcctcagagctcctgagtccacgccagaccccggctctacatccacctccccctcccacctccttccctgccgtccttcccttcttcacttgctcctttccaagagagggatgggggtgcccccttgatgggcttctccgtgctggtctctctggctgagggtacagagctgctggggtgggactggaggcagtgagcccgaggctgcactctttatgagcttttttggtgttatttctgttgtgtgtccttttgtcgggtaatcctgctgcttgggcctctgaagtcatggcccagggggctctgtgaggagactttttttttttttgagacggtgtcttgctctgtcgcccaggctggagtgcagtggcgtgatctcaggtcactccaacccctgcctcccgggttcaagcaattctcctgcctcaccctctcaagtagctgggattacaggcgtgcaccaccacgcccggctaagttttgcatgttttgtacagatggggttttgccatgttggcttggttggtctccaactcctgacctcaagtgatctgcctgccttggcctcccaaagtgttgggattacaggggtgaaccaccacgcccagtcccatgaggagtctttaagtcacagaggggaggacattgtttgcagcgagcactcggggaacagaggccgcgttggccctgcgctccat

SEQ ID NO: 100098 - DNA, 1034 bp, Homo sapiens
ccccaagccgcagagcccaaatgccagggaacatgggctgtggcctggggagctgcctctgctgagaggcacacagggaggtgcttctttggtgacgagggtcaggacaagggaactttgtgaactgatggcctaggacacatctgaccgtgtgcgagggaatgcaggacaccctccatgcctcccccacctactgctgcatggacccctagccacggcggccaggacctgcctccccagactgtgggcatgtgctacaggaggcgagccccagaagtgatggtcacaaggactccggcccctgactcgagccaccccacccaggtgttggccggccttagcaacagcaaataaacactccccgaacatggcctggcgctggtgctgctgacacggagggaaaacaaggtctggccagcagtgaagtcacctcacagatggaggaaaacaacgctgagacgctgccagctctgccccgacgcctcaaacctgtgctccagcagcaagcctgggttcgccattctgggttgtgcaaccatttttcctgttagagttcctgacctcagcccctaaaatcccttgcttgtacacacagaacctctgaccagtcagtcccttcccacagagagatggacaggtggatggacggacggcaggtggcagggggtgctcccaccctggctgaggccactctggaacgatgtgatcacgaagctctctgcaaggccgccttctttcccgcccaggcctgtcccgtcctctaaatcaccggaggatgggggagggaagggagcctctgaaaggggctcttctgcagaggacctgagcaccctcctgaaaaccctggccccccaagggtctttggtcccccgggctgaggctcaagtgagcaggcaggctgcttccccagcttaccgagtctgctgctggtcagcctccgcctggctggcctggaatgagagacaaaagctccttggtctccaggagactcatctcacgcagcggggctagtccacccacctgctagatggagt

SEQ ID NO: 100099 - DNA, 1030 bp, Homo sapiens
gggcatggctttagattgcgtggtcctggagactctctgaggcaggaggggatgcatggcagaggccagcacagggcccggaggtgggaatgaactgacttggcctatgtgagaaatgggctaacaagtgtggctggaaggagaaggctggtggcggggcagggccaggtcaccctccctctgaggagcttgggcaccgtggaaggtgtgacagaagtgcttggggcaggagatgaagtcgtctcatgtgcgcttctggacactgacaccaggtggagagcagaccagaggggcacgagtggcccatggagaccagggatgaggccttgcagttgctgaggcccaaggcaacagggcagggcccaggtggccgcagaggtgctagtgaagagggcaacttgacagatggcgggtgtgggctcgtaggcttcggcagtgggcgagggaggaagatgaggagtcctgggaggtcgggatgttgggtttgcgttgtctaactagagcttcatttagaagaggcagatggcagagcctggggttggggagagtgcagcctcagaggcacgaagatgacacttagacccatgggactgtctgaggtgacctgaggaggaggacacctcaaggggagaaaggggcccagggcagaagagtcaccccctggcctttctcgactgtgaagaggtcttgggggttgagggggacccagccagggaggtgggggaggtgtggcagtggggtccacctagccactttctaaggaacttctggtctcagtaagaaaaagagtcttctagaagatgaatctttaaaagcctcagctggagtccgtttccactctctatcattttctcatgagtgtcctgagagcattgcattctaccctgacggttctcagaagtgatgccagagtggcactttcttcaaccgctaacaagaggccccagtggtcagtagtatgtcttaagagccccagacacacagaggaggcaggaggaagccctcggtgccccacatgtgctaagagggc

SEQ ID NO: 100100 - DNA, 1088 bp, Homo sapiens
atagtaggagctgtcctgcagggtgactgtgggagttaaccatgctattacacccagagtgcctaggactagatcagtgcttttcagaaaaagagctcaatgtgaactctacaaaattttattcaagatatctccaagtcagactggcggttgaggttgtagaaaatgtctcttttttgctgaggtgaaaatggggctctttccatattgtgactgtcctgccttcacctgaggccccttcactgccagccagctctgcaggaatgagggcgggggtggcctgtgctgaccttcggtcctggagcactggcatcagggaggtgccctgcccctcattgcctgtctctccccggacggcctcttggggcctgcttggaagaaagtacccattgaaggtgctgatgacatccttctagaagaactgaatcttagaaatccaggagggccttatgaaagtccccagctgggcccacccagccacgggacccgcttctgaaattgttcagtgtgattggctgtgctaacaacattctcttcaaggcaaagacagttgtcacctgaggtcttaagatggaggcccgtggtttccatcaaagattttaagtttggggttcctgaaggtgggtgggtttttgtttgcttgttgctggaatcagagttctaatcaatgttagtaacaaacggaagaacatgtgtggtcagtctccctgcagtctgagctggagtcccttttcttaaagaaaaaaagcagcagcagctggtgtgttttcttccagtcgtgtaatgaccctgccctatgtatcctggtcgaggcagaggtgtgagggtgttggagccggtgggtgcaaggcaggctcctgcccgggacacctggcagaggagaagcaggtgtgctttctgggagcagcttgcagtcactcctttctttcatttcctccctaggagttggaactgagtaatcccctgctacgttctaatgcagaaagcactgcccatcctaaagctgcccccagttttcactgcacagtacacgtgaaccacggcctagtggccacctccttggtgatggcttcactggctccagccac

SEQ ID NO: 100101 - DNA, 2042 bp, Homo sapiens
tcccaggggccctggatgttggtgactgagtcaagctggggtgttgtcatcacagcagggccgagccagtgccctggagagccagggacagcaccgtgtgtctctgctgttcctgccgcatctgccacctccactgtggccaaggcctgacattgagcccacaaccggccagggccagcagggtttccagggatcccttgttgtctgtcgtcgttcccactgcagctggcttgagtctagctgagaacccggccagcaggaggggtctgtgctctgctctccagcctcccagctcgggtgatgctcttgctcccttctgataggctcctgccctgcaaggcttaccagcccctctctctgctactttccccccaggagatggcagcagaaaaggccaaagcagcagccggggaggccaaagtgaaaaagcagctggtggcccgggagcaggagatcacggctgtgcaggcacgcatgcaggccagctaccgggagcacgtgaaggaggtgcagcagctgcagggcaaggtgggtgtagtggctggcgggggcatgggaagggacaggacccagtccaggtccaggacggagggagccagagaggcccaaagggtgaggcatgaggagggggttgaggatgcccacaggggtctgtaaggtctggtcaggtttaggagtccaggggctgttgcatttggctggacagggtctggcagcccaagtgtgtgtataatgttaaaagccagggaggtatgaaatacattttaaagaacacttttcaaaagagcctagtctcagatggccagccctgtttccctgcctcctgggtgtctgtgaagttctcacccttcatgtgaacctagagaaacgcaggctctatcttctttccacatggtggggaggatcccataataccaaggcctgaaaatcacacagctccagcggccagcactgggcggctgcccagactggccctgtagtcaaagtctgaagcctgcaccctgctcatagtgggctgcgacctcctccctgctgcatgtctcaggacgtgctggaggtcagagggcaggaatcgaggcttcctcaggggggttagaggcggtgcatgtgctttgtcttagaacagtcaaccatgtgaccttggaggcagatgttcatggggtgtgtcagagaccctgggctgagtgttcagccttgggcaggccatgagcagtgaggagggagagaggtgtcgctgggtgtgggagtcatgcttggccgcttaagcttcgcaattttcaggcctcttgttttatgggatcctcttaacttccacgtggaaaaggtggaggcttttgggggttttcttttgtgggctgtgtcttcactaaccactgctcagaagtcagttctgtgtgtgaggccgagctgcctctgatgcccttgcccgtgactttccagatccggactcttcaggagcagctggagaatggccccaacacgcagctggcccgcctgcagcaggagaactccatcctgcgggatgccttgaaccaggccacgagccaggtggagagcaagtaagctgagctttcctgcctcagcacctccccaagggccctggagcgaggaaggcttcacgaggctgcggccagggcagctggcacaagagccaggcatgggccctacatgtgtgcggagccgtcctgaccttccatctcccgtctgggttctgggcccctgagtcttctaacaggtggcccagcgtccctgtggtggctggtggtgggcctcgactgtgccctggagcacagcctcctgctctgcaacacccttgcttcagatgcactggtactagggagggtttccagcacccacctgcctagcggggttctcatctcagtgttgtctctgagttgctgaagcaccgcagcccacagcaagtgggccggagggtgcacttcccctccggagttgagtacagccgcacttctgcttccctgatttaagcattacaccctcagtggcagccctcgagaaacccactgcagtgtctttagttg

SEQ ID NO: 100102 - DNA, 1478 bp, Homo sapiens
ctgaggccagtggggtcactcccttcctggccatacacatcctgcacagtctcagtggcaccgagagcttgtcagtcgtcactgggggctctactgggtatgagtggccataggagattcagatgaccagggagaggcctggctctcctcaggtcactgtcctcagagtacccggcccccatactgcagccagaggcctacgggctgcacgcccggctcgggtaggctccaggccagaaatggtggccagctgcccctcagaggagctggcaacaccacactcctaaatgccactccagggattcaaagcctttggccttgacagtcccaacacacgctgggtcaggggtcccggcaggctgatggctgaggcggggccgcctttccccacaagtatctggagtcccagtggaacccttgactcgaagcccctgctccacttcatcaagccctcaggcctctgctcttgtccggggtcaggggatgagccaagtcccatttgtcccctctgttaacgcatctctgggtatttctaggccactcagaagggtgaccctgtggcgattctgaaacgccagctggaagagaaggaaaaactgctggccacagaacaggaagatgcggctgtcgccaagagcaaactgagggagctcaacaaggtacagcctgagtgggctcggagatggtttgtcctctcccgtcctcagaggacccccgccccatccacggtggatcccgggctccgagatgctggggcctgcctggaacgtagctggctgtcaggctgctgagtagggactgctgcttatctgctgcctaaagagccaagggccggcagctcacccttggcagtgctcgtggctctacggcgtggtggcttccttcgtggctgtaagaacgcagggaagtgaagcaagggtttggaagttaagcagcatcagtttgtgatggggatggaccagacctggctttcactagacaggtcctgcagtcacaggccagctttctaggggctgtgcctggaaaggagggtggccacagtagattcaaggttgttttcttgaggattatgcaaaaccttgtggggaggggactggaggggctgctcttctccctttttctgatgtcagaggagggatgtgcagggaaaccctggctccccgtatcagcggatggcgtggcacgtagcatttgcactctgaacagcaaacggtggtgggttggtgctgccataggacggggctgatggcacgttgagattgtgttgggatccatggcataggggctgttcttcccactgcagaattcaccggggtctttccccacctctctgctgctgagggtgggccctggtgccccagccttcctggaggaagggcagggtgaggggccccctggccctctgggactggtcaggccctgttgaaagccgtctttgccccatgcagcaccgcaggcttgctcttgccctctccctg

SEQ ID NO: 100103 - DNA, 1050 bp, Homo sapiens
aaccatggtgagccatgcaggttgagaacaggaccagtgcatttgcgagaaaaaaaaggaagggagaaaagcctatggaaaaagtacgccttgcttaattttgttgcaggccatcttgatggtggaaaaaaaaaaagaggagctctacttccaccccaggctgggacttcctatgggcgagttaggacggtgcagggacctatcgttgagtcagtttcttggtgtcctgaaagagcaggagacactggagcagactcgccatgctcagcctgctgaccccaagcagtcagagagctcttcgtggctgtgaccagaaccttcttggtgtgatgggcattgtggccacgtgtgttgtggcttatgggcctaagtctcagctctttccctcttgctgcacagggcccccagatgccgacggccctctctacctcccctacaagacgctggtctccacggttgggagcatggtgttcaacgagggcgaggcccagcggctcatcgagatcctgtctgagaaggctggcatcattcaggacacctggcacaaggtgggcccaccctcctgctggccatgctcagaggccactgcagctggctagggtggttttgcccttccctctgccacagagaggacattcataggacagcctccacttctctttcctggcagaattctgccaccccgagggatcgctcgcaggtgctttggcttctgtcaagccacccatggcctggctcctgagatggttagggctggggcagggctctgtattggcagggtatgggatctagggagctggggcctagccagtttgtggccacagctcagggtgcagaaagaaaggtatagggacacagtgtggggccctgtgaggttccccagcccaggagcgcccctggtttccgtcgtgctgccgggggcaggttcagaggctaagagttctgagctatctcgtgcctctggccaagagctgtgcccaagaagtgctgcgtggcacattccttcactggagtcagagttcagggtaactgtgctggaggatttagtgg

SEQ ID NO: 100104 - DNA, 1173 bp, Homo sapiens
gcactctgtggactgagcctgcggcgggtgagcatgtggccatgctgcccctgtgcaggaagcggcgtcctagagcgcgtgccctccagctgccttatccagatgtttccccacccagcagtgcagtaggggccgtggggcctggaagggtggtctttaaggagagagttcaagagaggccagagctcttgggtcactctggaacctctgtaggaccaggggctgccaggaattcagcagggggcactttgggggtccctggttctggaaaggaataggccagccagtccaggagaaacagaatgtgagccacacacgtgtgagccatggatgtgatgtaaatgtcctcagccacatttaaaaaggccagcaagaaacaaatggactgaatgttaacgatacattttgtttgacccagtttatccaaaatgttatttcaacatacaatccatatataaaattattacagatacttcacattctttttttttcataccaaatcttctaaattccacgtgtactttccactcatagcacatctcgagtcaggccagccacgttgcaggtgcccagtagccacacatggctggtgcccagcacatcggacggcgcaggacgcttttctgagtcaggagggggaaatgtccttgcagccagcagctagacgccggctgaagcagctgccctgcccagtctgtaactacagaggtgtctttgaaacaagtgacctctgtctcctggaaagtgctggcagtagacacgcacctgcaggctgagggggaagacaggaaggctgggaaccgaaatgtgaactaacacgggggtttctcccgagagtgagccatgcatgtttttattttcttttggcttttgggttagaattttctcttgtgtgtgcattaaaattactttatgtacatacacgtatttcagtgaaaagaaggttgaaggggcatgcttttgccaggacctgttttcgtggcacccatgacctcttaggcctttggtgtcaacatggttatttttaaactcccgagcctcaccagggtaagaagttataaaataaaggtgctcatagcaaccagctcgcccacatcccacgttcccctcattaaggtatcgtgccaaatgctttgacttgtaatgaaaatattatgactagtaagtgaaaat

SEQ ID NO: 100105 - DNA, 1048 bp, Homo sapiens
gtgcctgagcctcccagtgtggtcgcagaagggagagtcattttgaaatttggggtgtgaggtgcgttatctgagctgctgtgagctgcttgaaggccggccatgctgatttattttgctgtgcgttaccctgcgccaggcatggttccaagcacgttgcaacttactcttttcagccacgctgtgaggggaacaatgatcatccccgttttgtaggcaaggaaacagaagcaaaggaaggttaagccacttgtccaaggacaaaggtgggaaggagctgagctgggattcgactccaggccacctggtcccagaggccttgctctgaccttggtgccccactgcccaaggacagaggtgacctgcagactggacgtggcccacggatgtgtttgttcatctgtacagtggtttcattcatttatttgttttttattgagttagctgtcagcagtaaagatgagaagatagcacttaaaaatctcgtttccaggctcttgggcaggcctgtggctttgagggttctggctcagattcccccattgcagctatcacctggaggtgaagtgccgtgcccaggaccacccagctcaggagaggccacccccctgagcccaggcctgtgtggttatttgtcacagtacctgtcccattcctgcagggcctggcccctggggtgttgctgtgtcccctgccagacagaggtctggattatccatcaaagtgagacactggcctgcgtctctactcttgggtctcctgctccctggtcactccccaggcctcctggcctgtcccttcctggtatttcatacccaccaagatgggcaaagcgttagccgcaggagcaagccctcagggagctgagcttttccagcattcactgcaccctgggccttttgaagtctgtgatttcacagactaggtgttgagtctgagagacttagtttagtgcgttaagatttcacaattcggaagattactggtatcttcgagtatttgctggagccctaagtgatgtgctgggcacgccttaggctcccgttag

SEQ ID NO: 100106 - DNA, 1056 bp, Homo sapiens
gagctcctccctagagagcgtcttgcgtcccacctcggggtgggaccctgaagggagccggctcctcaggttgagagagacagagatgcccttggctttgggtcagcaggaatggggagcttgtcctcagcctctgaatcttggtctgcagaggctgatgactgcttgcgtggtgctgggcttccaggaggcatgtgggagccctttcctggggccccagggtcttcaccttcttacagcagacctgagtttgggtcgggtgactggggactacagggcgtggaaggcacgccaagattgcgatctggcttgggcagccatgctgggtgccttggtctgcactgtctggagtcaccccgtgcaggcccggaggcagcagctattcagactacatgtgtgtgtctgagggaggcaccctcagaactgatctggacaatctcttaggaaatgagagtttttgccactggagttcttccccaagccctcaagtccatgctgtttcaggttccattgccagagtccctgggttgacacctgggcctctctcccaccagctcagcttcctgaatactcgggcccagatcctggtcctgggctcttaggacccagcggggataggctcttaggaccagggtccaggccagctggtctgcctgcttccagccgcatccccctgggcatcctgaaatctttttctcaaattcaaacgctccttcctaggcatcgcttgttgcctacagaataaaatccagattcccagggcctatgaagacttggacctagtccaacctcgggtgcaagtctgacacgctagggcccaaagcccctcaccgtgtccttacccagctatgcttggcccaatgccttaaagcctttctcggcattgctgccacaattgttctccaggtcccccttgtgtcactcttctgccttatggccctgtgtcctctgcctctgttggccacagcccaacctataacttaactttccaggcccagcaatttacgaactgctgggtatgcaggtggtacatactttgtgtctagagaccacctg

SEQ ID NO: 100107 - DNA, 1079 bp, Homo sapiens
ggcccccgccctgcccggcaggtgcccctgtgcccttctcgccggcagttgcacagagaggtgtacacggagatcaagtcagatactttttcttttgaacctaactcagtttctcagggtctgaagctctgaagaaaactctctggggcttatgaccctttattcactttctgtggaagttcttcaaacccaactttttcttttcttcttctttttttaaagaagaacaaaaacatcccctagggaagcgagccaagtatcagtgtgagaagctgctagatgacactcttccagaaatctcttttcagccacttgaaaacgtgttgaggctgggactccggtcactgcccccagacggctgtggtcagacagcctgggattaaaaatcccctgccgttttctgcaggcattaggtagagtcctaattgctgtttaaactgtattctccttgggccagcctgtgtgccttgggaagggccttgcccagaggtcctccaggaattgtcgttcttttaaaaatattgtgatgtgggttttttttaactccaggtataaaattggttttgttgaaatttggaggaaaaaacaaaactttaaagaggaaaacagttcttcaatctataggatattttaaattccattagataccattaaatataccagtccccaagtttgtagccgattacgtttttctccaactaaaggaaaaggactgattgaaaggccctgaattgggttgttcttgacattatttgtactgagctccattgcccttaaagctgcggatgtgaccgttcgtggcatttggggtcaagtgcagctgcgcctccttggcctgcttcctgtcaggagcgctgagcagcgcttgggcaaggccgggctctgtggcctgagctgggcctggagtccactgtttgtgcactgcccagggcctgcctcagctgtgggcagatgagcaatgagtgagagcaggagtcgcagtttgcctccaggagcatttggtagatcttcatttcctccagggtctcataaagctcacttcccccacaggctcaggaggagccttcacggccacagtc

SEQ ID NO: 100108 - DNA, 1097 bp, Homo sapiens
tcattgtgctcttcacatgggcacccacaaacgggagctgcagtgcacactgctgtctgcttaacagtgtgttggtgacatctttccgtattgcacctgcgaaactgccacattcagctgcataatattccctagcatgactgtattgtaatttatttaaatgacatttaagtagtgtgcagctattttgcagctaaaattaatgctgcaatgatgtacatacactgttgtgtgtctctacaaaataaagtcctagataagtaattgtcaagtcaaaaggtgggtacgtttttaatttaggaagacagtgctgcattgctttccagaaacgtttcacaatttacgatgagaggcccacaagatttgttttctgactcagcactcctcacacggtgctgctgtgctactctgggaatgattctaacttcaggaagtttggggagcagggagcattataaacccagacgtgggataaggagaaagcctctttctttggaaatgaaaggcacaaattctttactaaatatttggagaggaggaaattgatgggatcctcgagaagtggaaattccccagaatggaagcttccccgtgttccgggtactgtcagctgacgcacgtgtccaggctttagctggtttgttctccgatagttaactgagcacctatgcacagtgtctattaggaaagtcaagtttctaacacaagacgtgtgtgtatgcagtggtgttggtttttaaaaaaatctatttttatcctcagattgagtctttgtttgcaggattatgctggtttgcctcccacctgggctgccctgatcttgtactaatcaccatctgggtgttacactggcaggagagctgtcccacccagcacctggaatcaagtctggatcctacagtgtgggcgtagactgaggaagtacatatgtacattctgaagaccccacagttagcatgagctccagaacagtgtacttttaactggagcttgcttcactcattgttgctgctggttggaaacaggtgtttcctcattacctctgctagcacgtcactcaggggatgcggggatgcagggtacttgttgcactcttg

SEQ ID NO: 100109 - DNA, 1245 bp, Homo sapiens
ttggtttcacccttgctacgtcttatatgtggagttttcatgttccagaattatttggatttccacttaacattggcggctgtgaccatgttgcctggtgagcaagcccggatgagacacgttagaccgtgggttcctccctttgttggaaaggctgcggcggcccccactggctgccttgtgcctcgttgcccctctgctggggctgagcttcctgtcagtctggggcctgcccactccagcttctctgggggtcatgtgtgcccaacctgaggcaactgtaggcagaactccgggtgggctgactggccctgggcatctagaaacacagggacctgtgggtgtgagtgtgttgggtgggaggggtgaggtggcatgagggctgtgctgcggggatctgggaggtgcttggcagtgggttctagatcaccggtgtggagcaggccaggacgggaactcctcccatgagtccaggaggccttgacttgggcaggggaggtgtagggcctagggctgtgctgtcccatatgggaggcactggtcacatgggagcatttaaattatcacctaaatcagtcagaagtaaataaaattaaagattccattcctcagtcacactagccacattccaagtgcctactagtcacatgtggctagtggctccctttacacagtgcagagacagatcatctcagtcagagcagaaagttttgcacagcagtgctctaaacaggaccttctgaaaggaggtggcctcttggatcactagccggtctgtgcagacctgtgttggtgttgcacagaggctgtggctggcccatagcacaggacagattagcagcaaaaccagtactggagctgggctccaccagagacttgaagtgcttcttcagtcttcctagccctacctgttacctggctggtccagcagggccccctgctgacaggtgccccagagggagacctggcaggagtggtaggcccaggacatgcttttgcagacccaggctggagctcttccagaacttctgctctgattttcctccaagagcagatgggggccctgcagcgggtttttaccacttgtccatggctgtatttgacagagaacacctgccttcctaatccttgccttttacaatttattattacataaatatgtgtttccagcaaacaaaattcacagtatggaggcatggaaggtgaaaatagaaagtctttttgctccatcccaatcaccatccg

SEQ ID NO: 100110 - DNA, 2753 bp, Homo sapiens
aggcctccactctgctctgactctgctgttgctttgtatggggactgctcatgccttgggtacgaatcgctcactcctaaagaggagcaggtgagaatgtgggacatcagagagtgcctgggtttgtttcttctctgaatttattagcctgaagaaagaattagtgaaacctgaagtttggtggtagggtggggatagaaactgttgaaggccttgatttctataaatagtaacctccatgtatgtttgacaggtgaaaggaaagcaagccaggatggatatttacgacactcaaaccttgggggttgtggtctttggaggattcatggttgtttctgccattggcatcttcctggtgtcgactttctccatgaaggaaacgtcatatgaagaagccctagccaaccagcgcaaggagatggcgaaaactcaccaccagaaagtcgagaagaaaaagaaggagaaaacagtggagaagaaaggaaagaccaagaaaaaggaagagaaacctaatgggaagatacctgatcatgatccagcccccaatgtgactgtcctccttcgagaaccagtgcgggctcctgctgtggctgtggctccaaccccagtgcagccccccattatcgttgctcctgtcgccacagttccagccatgccccaggagaagctggcctcctcccccaaggacaaaaagaagaaggagaaaaaagtggcaaaagtggaaccagctgtcagctctgtagtgaattccatccaggttctcacttcgaaggctgccatcttggaaactgctcccaaggaggtgccgatggtggtggtgcccccagtgggtgccaagggcaacacaccagccactggcactactcagggcaaaaaggcggaggggactcagaatcaaagcaaaaaggctgaaggagccccaaaccagggcagaaaggcagagggaaccccaaaccagggcaaaaagacagagggaaccccaaaccaagggaaaaaggcagagggaaccccaaaccaaggcaaaaaggcagaaggaaccccaaaccaaggcaaaaaggcggagggggcccagaaccagggtaaaaaggtagatacaaccccaaaccaggggaaaaaggtggagggggccccaacccagggcagaaaggccgagggggctcagaaccaggccaaaaaggtagaaggggcccagaaccagggcaaaaaggcagagggggcccagaatcagggcaaaaagggagagggggcccagaaccagggcaagaaggccgagggggcccagaatcagggcaagaaggccgagggggcccagaatcagggcaagaaggccgagggggcccagaatcagggcaagaaggccgagggggcccagaatcagggcaagaaggctgagggggctcagaaccagggcaaaaagtccgagggggctcagaaccagggcaaaaaagtagaaggggcccagaaccagggcaagaaggctgagggtgcccagaaccagggcaaaaaggccgagggggcccagaatcagggcaaaaaggccgagggggcccagaaccagggcaagaaggccgagggggcccagaaccagggcaagaaggccgagggggcccagaaccagggcaagaaggccgagggggcccagaaccagggcaagaaggccgagggtgctcagaaccagggcaaaaaagtagaaggggcccagaaccagggcaagaaggctgagggggcccagaaccagggcaagaaggccgagggggctcagaaccagggcaaaaaggccgagggagcccagaaccagggccaaaaaggagagggagcccagaatcagggtaaaaagacagaaggggctcagggcaaaaaggcagaaaggagtcccaaccaaggcaaaaaaggagagggagctcccatccagggcaaaaaggcagattcggttgctaatcagggcacaaaggtagagggtattacaaaccaggggaaaaaagcagaagggtcccccagtgaaggcaaaaaggcagaagggtcccccaaccaaggcaaaaaggcagacgcagctgccaatcagggtaaaaagacagagtcagcttctgtccagggcagaaatacagatgtggcccagagcccagaggcaccaaagcaagaggctcctgccaagaagaagtctggttcaaagaaaaaaggtgagcctggtaagtaactgatttctttatgaacttagaaggaaaggctgtctttaaatgacttatggattctctcggggagtgccacctgtatcagtcagctattgtcataataaggctgcgtaacaaacattcaaaaaaaaattcagtggccttcaacagcagtcatttattgttgctcatgcttctggaggttggcagatgtgagctttctcggttggtggctctgcctcaatctggttttaactgggttggtgactctttgctacaggttgagctcaggtcagttccatgtgtggtccttctggcgccctccagggcagaggcccttcatagttacaacagaggcacaaaagggcatttcaagtcagcatttcattgaccagatcaagtgatgtgtctgagcctgagtcaaggggcagggagtccactgtgtccagggagaagggactgcaaggtgatgtgagaaaggagaggtgaggagtgagcaacaggtccgtgtcttggcatgtcttaaacatatgggagcacaaggagaggtgaggaattaggagcaataattctgtccaccacaca

SEQ ID NO: 100111 - DNA, 1076 bp, Homo sapiens
cccctggtttgtaataccctctacctttgtgccctgattagcaaccgaatctgcctttttgccctggatgggagctccctctccttttttgccttggttgggactcctttctgcctttttgccctgagccccttctgtctttttaccctgattctgggctccctctcctttttggccctggttctgggctccctcggcctttttgccctggttctgagccccctcggccttcttgccctggttctgggccccctcagccttcttgccctggttctgggccccttctacttttttgccctggttctgagcaccctcggccttcttgccctggttctgggccccctcggccttcttgccctggttctgggccccctcggccttcttgccctggttctgggccccctcggccttcttgccctggttctgggccccctcggcctttttgccctgattctgggccccctcggcctttttgccctggttctgggcaccctcagccttcttgccctggttctgggccccttctacttttttgccctggttctgagccccctcggactttttgccctggttctgagccccctcagccttcttgccctgattctgggccccctcggccttcttgccctgattctgggccccctcggccttcttgccctgattctgggccccctcggccttcttgccctgattctgggccccctcggccttcttgccctggttctgggccccctctccctttttgccctgattctgggccccctctgcctttttgccctggttctgggccccttctacctttttggcctggttctgagccccctcggcctttctgccctgggttggggccccctccacctttttcccctggtttggggttgtatctacctttttaccctggttctgggccccctccgcctttttgccttggtttggggttccttctgcctttttgccttggtttggggttccctctgcctttttcccttggtttggggttccctctgtctttttgccctggtttggggttccctctgcctttctgccctggtttggggctccttcagcctttttgc

SEQ ID NO: 100112 - DNA, 1036 bp, Homo sapiens
aaaaaaaaaagaatcctacactactcattttgatgccagccaaccttgttacaaaacttgacaagaatggtaggaggaaagaaaaccatcagtcagatctcatacctgaaaagataaacaaagtccagcagtatgtatgactaaatcgttttatcctaggaattcaaacttggtttaacgtttaaaaataagtttatattcaccttccacacctacgggttataggagtagaatagtatgattatcttaatagatacagataaagtatttgataaaattcaacatctatttatgtaaactaggaataagaaagcaacctctttatcctgataaaggatgtctgcaaaaaggctttagtaaatctcacactaaagagagacacctaaatctttccctttgatatgagaaaaacagaatacttgctgtcattccttctctttagcactgtgttgaaggtcctgccctgtgcaaaaattcaagaagaattaagcagacgataggaaattgggaagaaagaaacaaaactgtgattcatatgcttatatatgtagaatttttttctttttaatcgacagatgtgttactagaattaggcaagttgctgtgggggaaaaatcaccctgctggaatcagttacgtttccgtataccagcaacaagcagaaaacgaaacttcagagctaccatttgtaagagtgtgaaaactatgaaaaactaagaagtaactctgaaaacgtgtaagactccatggtgtgtattatttcccatctggaaacttgggttgttctgtttagatttgatccttataatggtatacattagcacatacgatgctgatatgatattgagtagacgattgattcatcacttaccatatttgatgtggtgaggtttgatttgatacagtatagatgacactgacccctgcttttgggagacaaatgtttacggcagtaagaactcccttgtgggctagcacatcttaactgttcatgtccattttgagacatcagttcttgattcctaccgcataggca

SEQ ID NO: 100113 - DNA, 1171 bp, Homo sapiens
tgctggatggcctggacaagaggtaaatgacattaaaaataccttctgacaagcctagaatggaatacactgaagcaggtggtgaaaggagtgacccaagaggataaggacaaccccgggggcctttggcaaaataggcaaactcttaagttctgatagcatctccaggcgcagggggcagagattaatgctggcagcatgataggacacaggctccctgagttggaaccacaaggggccatgacaccttcatggagaaggggagtcagaggtaagcccattctcaccctacaggcagggtagggaggggcacattctgagaagtggatatcacaagttgtccctcatgtggatcccatgacttgagtagtgggaaactccaagctgatttgaagattctttatttgagagtggacctgcacacctagtgttcctgggtcagtccaggggcgagcagatcattgaaggactgcacctttatcctaggctcaccaaatccccagttgtaattatcaaacgaaagagaatagtccatagttaggaacaactaaatgcaaaggatgaaatagcactgaatgaggaccagcaggaagagatctcagaaaacataagataatggacttgttgacatagattttaaaggccttactcaaactaaataggcaagattgaaaatacctatgaggaagaggaaactatacaatgacctagcaaatttgaaaaaggaaccaggaacaacttgtagacatgaaaagttcatgtctttataataaaaatctaacagatggatttactagcagattacataaaactgaagagagtgaatgacctggaaagtagagaagaagaaatataatttagagaaccacatagatgaataatttgtaagaccaattaagattcaggaagagtagatgcagaagtgtgtctaattggggttccaggagaggagcgaggacagagccagtacttgaaaagctaatgactgagaattttgcggaatgcgtaagacacccaaccaaaacccaagccgggtaaataaaaataaatccacatatagacatttagtgatacagcaactcaagggaaaaattcaacagtgagagtgaaaagattgttttaagacaaaaacccaagatagctactgacagatctttgctaaaggaacttc

SEQ ID NO: 100114 - DNA, 1923 bp, Homo sapiens
tgaaaaaagtcttattggtaatgtgtcaaaggactcttaaaaggtcaactttagccactgctctgaagctaagttagtcttttccatcttaagtcatatccctcttaagttggaagatctggagacttattctgtacagtttgattttaaaaagactgcaggtgggccgggcatggtggctcagcctgtagtcccagcactttgggaggctaaggcgggcagatcacctgaggtcaggaggtcgagaccagcctggccaacatggtgaaaccctgtctctactaaaaatacaaaaactagctggacatggtggcacatgcctgtaatcgcagctacttgggaggctgaggcaggagaatcaattgaacccgggaggcggaggttgcagtgagccgggatcgtaccactgcactccagcctgggcgacaaagtgagactccatcacaaaaaaaagaaaaaagaaagacttcaggacagcaaggtggcatggccacaggactataaagggctgtgggtcccactgagtcactgccctgtcaggtcaggaggtgactgcctgccttgaccctggcctcagttacttcctgtctgtgaagggagcgatcctgtgtgggtgtgagcactgggaagtggcagtagtaacagggctccataacagattcttcaggccttaaagatgctcctcctccaggatctgtggggcgcgttttccaaggaaatatgacacacattttaaactctttattaaagtaaaatatatacagaaaaatgcactatcacgagtctacgcaataagtatccacaagctaaacatgcctgtttaaccagcagatcaagaaatagattattcctgacctccccaacctccttctgtgcccctcttccagctgctgcccatcgtgggcagggaatacctgctctcttcttaataataccagtgattgattttgcttgtgtttgaacttgatgtaaatggactcaaacggcatatgctcttttgtgtctttcactcaacgttacgtgtaagacttgtcaggttgttggggtaattgtagtttgttcattctcactattccagcatgtgaatatatgagtttattcacattactgtaggtgggtacttggagagtttccagtttggggctattaatgccgcagacttttggtgaatgtctatacacatttccattgggtctgtatacctaggagtagaattgcaggaccagaaggaggtaggtgctcggctttaaaagaaagtgccagactttttgtctgaagtgcttgttctaatttatactcccaccaacagtatatgaatgagaccttggaatatattataaagtggctgattctaaaagggaaccaaaatgaattttgagttaccgttgataataaataagaaatgactcactcaggctgaagttctccgctgtcacagagagaggatgttaggctggcagaattcgttaatcaaaggtgggccttgggaaaagggcttgtgagggtcagattttattgctgatgagcaggtgatatttcctaatataaacctgagtggaaatgcagctcttctccaaggagttaatggaagggaattcaacgaagctcatatcttgagattgaattcttcatcagaactcttcccctacagagtgaatttcctaaaaacgaaccaatagttgggtatcagacctcatttagctctggcccatgtgtttctaattagaagctctgcccacctctaggggttggcagtgtcgggatattcctgcaggagcccttcctccctggcccacctagtaatgaaggatggtatatccaggtccagagttggtagtagtctccctggcacagccagcctcctggcacatggcagccacgtgctcccttttctttgaagagcatggttggctggaatttggt

SEQ ID NO: 100115 - DNA, 1034 bp, Homo sapiens
agtattttttggtgatggaagagttttaaataaatcttaaatcaagtcacatttgagcaattatgctctttaatgaaatgagccctaactcaacaggctgcaataattacatagcagcaaactcagtttaaatggttgaatgccagtgattgaattggagtattgatttattatgtagcagggacaccttttaaaagtgtcgggaccccagactcttcttgtctttttagccctgggaattttaactaatagatgaatgacacatagaggatcaacagttctgttgagacagcaagtttttctttgctaaaatcttgtttcaggagaaacaaaaataatggtcaagtcagaatgatgaaggcagggactgtgctgtccgtctgtgcatgctgggcctgcagtggttaaggcctggcctataacatcataaatattggttataccaggcggacagcgcccccatacctgttaaactattcccagctgtctcattggataaatgaagcttagcccaacttggtttttaaggttcactttttagaatcagattccacaactgtggtttacatttaggccttaaaataaccctgttctagggggtgggaatggttgtcacccattcagtggatgagaatgtggaggtccagctggtcagaaggttgtcaggccagttcctgttgcccagttgctaggcgatgtgggcccggccttccaaatgttccctcctggctatatacctccaccttcctggggcaataattacccaagggaggacacagaacgtgaagatcaaaattaagagcttcagtggcaggaaggtggggaggcattttgaaaatctggcagtgctgaaggtatttttcatttcatttttttcaccgagggtctcctgtgtggtgggccttcaaacaccgcaagtgagacctagttcttgcctgaaaaagctactgtctagaactgtgttgtccaatacagtagccacaagtagcaatttaagtttaaaacaattcaaattaagtaaaattaaaaattca

SEQ ID NO: 100116 - DNA, 1137 bp, Homo sapiens
gctgtttccagccaagggacagagcaggtgtggccacttcactctgccctggaccctcctccctcgctgcccctcactccctgtgctgccaaagagtgctgctccctctctgagacttcgcttcctcttctgttacttggctctaatgagccctctgcctaaaatcactagggaaggtggtgaaaatgcacattcctgagcttcgacctgcagtgtcctggaggggtaggtgtgggctcaggaatgtgcctcttacccagcgcccaggggcctctattgagagccctgcacccacactttgagaagctcactgaagaacgccagcaggccctttggtttgggggatccactgaacgcgctgttgaagtgggacaggtgtttggccagggccttccagccgtggcaccgtcagaggctacgggtggcccctctgggacacacctttggcaaacaccagcaactgatcccgtggataggctcctcatcctgacagcctgagtccaagccctcaaggtgccgaagcacctgccgagacgggggaaggacctccgtagaggcagcctcgccaagggcccctggggagggtggctcggggctgaggcttcctcgcagtcatcccaggagaccctatctaggccatgttccttctggggcctcggccacctggccttcctgccgctccgcacctttgtcaatatttatttcttctctggactcgaacagcctggtatttgtttaaagggcaggagcagacgtggctgttcctgcctccttgccttgcgccctgcttcctggcacctccccagggtgcctcttgcctgcaggtgggctcaccaggcaggcccacctctgtccctggccctcccactggggccaaaggcctcacaagagctttctcacttcaccattgactccaatttccctcgagacaccttgacctgggcctctggcccaacgcacatcatatgtggcctacaggcctagaactgagatgctcagagcattagcaatgttccgaaaatactcctggcttctgatccaatagaacaagccacaaagaggttgtggcaaaaggtcatgtggtttgaaacagatttgcacatcattttcggagaaatcagagcctgtcctgggctg

SEQ ID NO: 100117 - DNA, 3878 bp, Homo sapiens
ccactgaaacttgctgcaaggaaatggagcaggagactggccagctgcttgggtttcaggaactgtttatgaacggccttactttttaactgttacattgcagatcctttccagttgttctgatggggtttggagagggaatggaggtcatgtgtttgttgtttaccccatcctctctacattgcaaaaagacagggaggggatgacccatgctctggacggtcaacctaagacagggcaaagtcaaggaacagttaataagaacggtgctgtgcggtgttaggctgtgtatcagttacccctaaatcaggccggatacccatagcaattcttgacatagcttcccattgctctgccctgctgaagttaggaggtttctgcgaagcagttggcacacttcgcatgagggtggaaacccgtagctagagccagccttcaagattccagctggatgcagctgcagctcccggggcctctcagctccttggatttgttgattgtatcatgatcccgtgattcagtcctgttgggaggcaggtggctggacatttatctgggggcagaaaaagtgtcagaagtaggagaaagaatacacaaaaaagaccctaaggggaggagaggaaaggagccagagagagcctgcagacagcaatgtaggaagccccattcctgccttcctatgaagctgatcttggcctgctcagcgaatgcctcagaagacaggaaatcccaagcctgcagtctcgagaaaaacattggaaacgcctgctgcgaatcccaacagggctcgcgctatgtgtttttctaaagtctggttcatgtctgcagtgcttttgaccccttttgcactgtctgttaaagcacttgtcgccataggagggggcgggggagtgaaactgaccagatgtgactcgcctcagaattgggggcaagaggtgaagctggtgtgaggggaggggctacttgcaagggtccttgttgcagggaagagggaaatagggtccagaagctgggatcgtcatgccaactccaccaccaagtactaggctggggtctgatttcagtttagtttagggctaggtacaacctaaggaaactcccagactctgccttcaccccctacgttttattcacttgcaacagccaaaggaatcttcttcgcacatgagtcagattgtgaccctactctgcaaatacccttcatgactccctgtttgactcaaagccccagtccttccaacaactacaaagccctacgtgatttgatgtccccaactccaacgttgtattttccaacaatatttccagtcccgtatactcttctgtaatgtgatcttgcagctttcccatcagaaggaatcggatccccctcctcttgaacctgggttggctggaatggcacatgtgtaacccaccagaacaggacagaagtgacgctggcgggtaacctccaggtacagagcggaggaagccttgctcttgggccactctcttggaatgtggttgccatccgtgaggacccacgccagatacagaggtcccacattccagtgaagccccgtcttcacgtcctcccagcccaggaagcagacaggtgagtgaagacctctccagagcagcagtgttcataaggactttctgtgtgacgggaatgttcggtatctgtgccgtccagcctagtggtcgttagccacatgttagctgggatttagataaaacatggaacactgccaaatttgaattccatacaacaaataatatagtgtaatacataccatgcaatatttggaacatagttattctaaaaaaaaatttgttgattatttaaaattcggatttcactgggtgtcctgtatttttatctgccaagtatggcaattctctcttttgtaaaaattattttaattttttattttttacagagacagggtctacctgtattgcccaggctggtctcgaactcctgagctcaagggttcctctcacctcggcctcccaaagtgctgggattgcaggcgtgagccactgcgcccagccaagtctggcacttctctattaagcacctggaatgtggctggtgcaattgaggaagctaagtttttattttgcttaattttaattaatttctgtttaaatagtcacatgagcctaggggctactgtattagacagttgcccccgcaagacactcacatcttcctagctgaagccccagatgttatgtaacagagacgagtcattcccactaaggcctgtccagactctagcctcccagaagcccaagcacaataaaatggtggtggttttattgtggttgtttcctgcatgaaatgtggggtggtttgtgatctgcaagtgtagctgagctcccctgacctctgtgaacttccctcctgtgccatccctctccttcatccccatccagccacacctgttccaggacaccccaggctctcctgcgcaggccctctgttccagttgtccctgtgcttgggatgttcccacccaaccctccccaccccccaccaaagattctgatatcaatagtacagggtacagcctaagtattggaggtttaacatgtcttcacctggtggtcctgatgtacagctagggttgagaaccaaccacttgtttagttcagtcacagttacatcctgtgagccggggctgttttacagatgaggagaatgagactccaggagattcagccaggccccagagtcagagggtgagaaatggtgcatcccggtaaaatgttgggtcctccccctactgtgcaaggacaggtttgacctgaaggcagaagcctgggctgaggcccctgaactttggaggggccctcaatcccccaggaggtagccggcgacctcccctggccttcctcccccatggctgggcctctttccttagctaatcaggctgatgaaaggccctgctgcctgcccactccctctctgtaatttgctcgtccttctctctaattttatagcctcctcagcagtttcccaaagatcgggggctcagtttccactggacccccctccctggcttaatgaaaggggctgctttgcagccactgactagctaagggtggggatcattcttaaagccctaggggatgggaagatgtgttggcaaatgttttagagcaggggccaacaaccccttttgtccgccaagtgctatcctaagtccctttttagccacttcttgagaaaggcccttacaagaagaagcgggcgggaggcggcgaggccgactgctgggtgtggaatgtccggctctgggtggtagcctccttgtattattgccttatgttgcggtttaactgctcttgctcattttcctcggggtcttatttccccggctggattgcagctcccttagggtaaagactctgtgatgtgtttgaatcacccaggcctcccagggttctgcctctgtctcactccctggcaccggtgaccatggccaagctcctgaagctcatccctttccacgttggtaaaatgggaggggggttactctgagcacaaaaggagagtccagttagtgaaggggctgccacccctgcctgccccggagaggtgtttggaataccggtcctatctcaggggagagtcgtagttgccactaggaggaggggctgtgagcgctgaggtaggccatgcacagcctcagtgaatgcttaatgaacatgaccttggtgttctcttatgggcccctgcccatctcctggctgcagctatgcacacagtagactttcagtctatgctgtctgtgcctttgcatgcagagccattggtctggggactaattctaggggtttcatttctgtaaaagagctcctgtctttgggcttccatggtgtagcca

SEQ ID NO: 100118 - DNA, 2648 bp, Homo sapiens
catggtggctgtactaatttacattcccagcaacggtgtagaagagttcacttttctctgcattgttgctaacactgatctttcatctatttgagaaaatgcattctagcaggtgtgaggtaatctcattgtggttttaatttgcatttccctaatggctagtgctgctgaacgttgtttgcatgaacctggtatgtcttcttttgagaagcattttcacaagccattggtgaagtatgtggctcaccaccacccatactccagccctgttcccagtcactggtacctagagggtgagagtgaggctgctcatcaacgtgttctccaagtcataagctgctgctctcccactcacgatgcttggtgattcagtgatgttttccacttaaagacagtgatagctgtatcaccacagttaatagatgtctgatgtgtcccagtcacagagataatacaaatgtgaggaaataatgctggtgcctgaaagcattggagaccatttgtaagaatgccatttggtagttaaagtgaacatgaaaattgtttagtttttcttggtttcataaacattttttcttcctgtagaactgataaatttcaaacggaagagagtggcagcatttagaaagaatctaattgaaatgtctgaactggaaataaaacatgccagggtaagtgttttctacagatgaagccaacatcttttatggttttttccaagttatttcccagtttactaacccattgtcatcaggcagttggggtggccttgtggtattaatcgtctgtagtacttagttgatgggagccactcattgtttatttgtagtcttgtttataatgtcacccatgactaatttttagcaactttttttttttttttttaatagagatggggtttcaccattttggccaggctggacttgaacccctgacctcaggtgatccacctgccttggcctcccaaagtgctgggattacaggtgtgagctaaagctcccagccctaatttctagcaacttttattcaatctttccaaggcccttgccttcatggaacaacgcactgatagtgtcttaagaagttacagtaagcaggatcacatttaggagcaagcaggtgagggcagaggtgctggagtgaacgtcggctctttggctggtagccttacccactgagggagaggagctgaaacatgaaatggggatgcgtggtacgttgcagttcacctgggatttgatgaagagaagggccagcttgctctggctgactttaaacctcccgtgaaaagccgtgttggtgtacttgagtcattccaggtatatggcaagttttaataattcactggtctgccttgccttttttccccacagaacaatgtctcccttttgcagagctgtattgacttgttcaagaataactgatatgccttcactcagaagaaaagaaatgaatgtgaaagaaagccaagcatcacttgcacttaaatcattaccacggaagatatattagcttcaactttagtttaaaattatgtgaataaatattttgatttctacaaatcttaacatttaaccatgttggtttaaaaatattattgcttgctacttggacataactaatttttccttgtgcatttaatacctctgggcagaatccaaatactgggttctcccgtagttcgtctttagttactaagaaagggtgtaggacacattagccttctggaaacaagtagaagccatcacctggcccatgtccctacaaacccatgattgtcagggaggtgccagttacagcaggtgattcagctacttgaggtcggtaacagaccttccattcctcactgaaggtggggtttgtgtttttgttttgccctgttactccactggtagtcatctggtgtttgtactataacaacagcaagaaaatctcatttatctttatatactctttgcacctcctttttttagtcgagatataaatatttgaggggagagaaatatctacaggtatatatggaaacaaataatgtggtctgctttataagatggccagatctacattaggaaaagtataagccccctccctaatggccgctggggggtgagggcggtgtgttgtatgtctttgggtgtttgtttttttataaagcatataataaaataatcgtgctactaatgtacggcctgttttcgtggaaactacaaccagagtgtgtcccaggagtgcaggtggtgctagggtttggctgtggttacagggttttcaggttctgcccagagtcctgggggcggtcaggggaaatttgtcctagtcttgacattcttaagtactccaggccttttttagatggtctctaaatgtgggtttgtctgtttgctcctgacctgatggaggtttgcattttggccagggcctttaccatagggcagtggtccccagtctcaggtccatggcttgttaggaagaggtgagccagcattgccgcctgaggttcgcctcctgtcagattagcagcagcattagattctcataggagtgcaaacccagtattgtgaactgggcatgcaacaggtctaggttgtgcgctccttaggagaatcaaatgcctgatgatctgatgtggaatggtttcatctggaagc

SEQ ID NO: 100119 - DNA, 1115 bp, Homo sapiens
taagattgcaaagaatctttatatctgactaagtggatctccaaggtagattaccagaagcaggatttgcagggtagggttatgtttcttactacttcattgcccagttgtattttagcagcgctcaacttgacttacccagcagtgactgtatatttcaagttatctctgatacacaatatttaatttttaaagttaactttatttactgaattactggaaaacaaaagtccttctgttttcactcttgagtaatcacttgattcatataaggaattctaaaaaaagctctcaacaaagctatcagcattgctcatccctgcgaagctggagatttaaaaatactctgggagagggaaggtgtagaggtagattattgccactaacatctcaggtggtacattggcacttgggctattttttagactggtttagatacttagtatgtatacctgttaatttttttcccaggatctcttatacagacgcaccaaagccctcattgactatgagaactcaaacaaagctctggataaggcccggttaaagagcaaagacgtcaagttggctgaggcacaccagcaggagtgctgccagaaatttgaacaactttccgaatctgcaaaagaaggttgagcaggacattcttctttctgtactgtaatttgaaaataatttcaaacttagaaaagttctacaaatagtgcaaaaaacacccatgtatccttcacccagtgtcagcacttcacccctctgccttatcacttgcacatgcacagtcatcctcatggctttgcgtgcttacaaacgttacacacctggtttttctgtaccattggagattaagttgcatatgtcatgcttcttttagccctaaaaacgttgtggtttatttcctaagactgaagacattctcttgtatggttacagtatggttgtttgctgtgataaacttaactttgggtctacaatctgctctctgtattttcatgtttgtcttgatgtcctctacaagatccagtctaggattgcatctggttgtcttagctattagtctcctttactctggaatagttcttagtttttaacagtatcagtctttttagagaatctct

SEQ ID NO: 100120 - DNA, 1113 bp, Homo sapiens
acttctgactcgaaattgaaaggctaatggcagaaccatgacgaattaaatagcatatttactgctttgtgatgcccatagcatagctcattagaaaccaaccttggtttacacagcattggcatttaataagaatatttgggcgcatggcaggatgaccgaagggtcaccaagaggctgagtgtggtgctgtacatgtgtgtaattttgtgaccattttctctactatttggggtcagttgaagtgagagcactacttttaaattaatgctaaagtaccaaaggctaggactcctgagttgacccattcctgtcttgcacactggtaagatcatgttttatagatgatttaagaccttaaaccaaaattatatgtacatttccaggtacctattgaaggttgctgagctatttgaaaaactaagggtaaggatttctgtgttggtcttcataatatatattttataatctatagctttctgccttgatggtgacctttccttttctatatagaaagtagagggtcgagtttcatcagatgaagatttgaagctaacagagctcctccgatactacatgctcaacattgaagctgctaaggtaggaagagagttgctcagcttctcagagcagtgcaggaccagaagtctgtttaaaaagtttctttatacaaaggagcagaataagaatttatcagacttgtttttataaatgacatgcctttctggcattgtatccataaagcttgtgtatctgacagcactgtatgggttgtgtgaagtagacaggtaatagtttgggggattataggtcattgatgtgggacataacatgcagaaagggctgtttctggggcaaagaagatttgggagtttttattgaattgcaagtatccctgcagcctttgagccgtgaagcgttatatgtatatgtggacaaaatggtaagcagaataacctttgggaatgaaacatgctttgtctgcattgccctgaacaaatatgttttaattttatgtgaaatgtattaaatcaggcaaaataaaattagataggattgtatgccctctaaggctgaaatgtcatcagaaagtaaaagagtaaaaaaaatttt

SEQ ID NO: 100121 - DNA, 1178 bp, Homo sapiens
cattatgggatatttggcattggcatccttggccaatgcctaccagataccaggatttcctcccagtctgaaaccaatcgagaaaaaaaaacctcattcacacacagataggtatccaaggctaagtggccatgttccacctggtagaaccattgtactagcgtaaaattgctgtgtcttagggtgccagttttactggtggttgttaagtgattcttctgtagacattttctgccagcccttgatttttcccagccttggttaagaaatagtatcgtaaatttgtaattccctgatctgtagaggttaaactttactcacgtttatatgccatgttctaagcaatatatttttatattgataaatgtaaaaggctgcagggatagtatatttcatgaaatgtctggttctttttttcttccttctaggaggtagatgacttctttgagcaagagaagaacttccttattaactattacaataggatcaaagattcttgtgtgaaagctgacaaaatgaccagatctcataaaagtaaatatcatttaccgctagtcagagctttgctgatgagcctggctgtgtttggataaaaagacttgtccttgtttctgcagatgttgccgatgactatatccacaccgcagcctgcttacatagcctggctttagaagagcccacagtcatcaaaaagtaagtttttttggaaaagcatttcccctaacccaattgaagagtgccgagtggtgtaattaaaagcataaatgagtagtgactacatggtcctgctctggagttacaagctcagtaagacaagtctctagcactcatcttacatgttctctggacataagacacttgtaagacaattgtaggggacttgggctcttctatatgtaaacaaatacagtaaatgttgtcaaagcagtagtttctgtcacacttaaaagcctgttttctttagttttggagtttgtaagagtttatcttgcatcttcccctggcaattggtgcttgcaattttgcctggtaatgccctagaccttctttttttttggcctgtgatgcagcctcaggagatcctgagaacatgtgcccctgccctggaccttgaagagatttggttatagtggtcatgagaataatttaatgaccccagtctaacacacagctgtttt

SEQ ID NO: 100122 - DNA, 2193 bp, Homo sapiens
tgaggcactgaacacaacagatccaagtttctaccgttaggaattttaaggtgacttttaatgtctaggttgagataaagctgctttgtaatttttgttaacttttagcttcattagactcatgctgtatacttaggctgcagttaaagggttctcattgctttaaagaaacaaatgttctgtggctactaagtaacagtaattgcatgtagatttaggagctcatggacttgacccatcaaatccagttacaacattgctttcctccatagtcttattccacagattcaaaaatggcaactgccttagtatctaactagacaccagtttatactgaaatactgtttggtccagttgcagtgttttatgtggtggcatgagcagggccatagaattaatcaggagtggtattggtcaggtagttgagctgtgtcaactgaatgccatgtgcacatctcttttcagtgagtatctcgctgtgtttaagaagactgtgtcctcccatgaagtctttcttcagcggctttcttctcaccctgttctcagtaaagatcgcaactttcatgttttcctggaatatgatcaggatgtaaggcatttttattccattttgataatccacttcaaatgtttatactttcaaaatgtacttgatagtttctactgctttaaagttttgaatttcttacacaatggaaacctttttagatgctgcttttccttcattgtaagtcattttttgtaaaactctgcttaaagaaaattttgacttctttccccttccaaaacctaggtttctttttaagaaattaacagtcccaaacatcccttagttaatttcttaacaattccaaacttaactaagttcattttaaggaaattaaaatttgtgtaatttattttcttcccacctacgctttttgttgaattatgacttttttcttttcttttttgaggcagaatctcgctctgtcatccaggctggagtgcagtggcgcgatctcggcttactgcaagctccaccttctgggttcacgccattctcctgcctcagcctcccgagtagctaggattacaggtgcccaccaccacacccggcttattttttgtatttttagtagagatggggtttcaccgcgttagccaagatggtctcgatctcctgacctcgtgatccgcccgccttggcctcccaaagtgctgggattacaggcgtgagccactgcgcccggccgcgaattatgacttttatgctatttttctttttaacatgttttggtttttgctacttaatatggatagaagagaacagtaattttcccaaggatttcagagccactaagacttagcttctagtcagtctttcaaaatctgtcaagccttttagaatgagatgacctacctatgtttgggtttagccattaggtgttttaagcttggaggttaaggcagaattaaagatactttatgcatttgcctgtactgataaagaggattacttaaaatgttactcagaacttctttaagagaatctagaaaaatccataccatataaactctttggaattttcttcttttagctaagtgttaggcggaaaaatactaaagagatgtttggtggcttcttcaaaagtgtggtgaaaagtgctgatgaagtcctttttactggagttaaggtaagtgacctttggctgttggagaaaattttttacttcatcgggaataggtgaccttttgtttctttgaaagagatacttgtgaaacaaatggttaacttttaagacatgtaagtgttcttcagattttggtaattttcatctacttattcaattttcacttatttcccagagcaccttgttctgtcccaggagaagcaacttgaacctttccacacttggcttcattttctccttttctgtaaggagggagattactcagttaatttctaaaataaagtacaagatcagtattttatcccactctcagaactacactgtccagtttggtcaccaactacaggtgatagagaagcacttgacatgcaacctagctggcacaactaaggaaccaaactttagattttatttacatactggatttcaaggcgttagcacaaagacaagaatacaaaataacgtttccgttaccgttagaggtatgatttactttactacttctcgggccttctcattc

SEQ ID NO: 100123 - DNA, 2581 bp, Homo sapiens
gttgggtggctcacacctgtaatcctagcacttcgggaggacaagatgggcagatcgtttgagcctgggcaacatggcaaaaacctgtctcttccaaaaatataaaaattagccggatgtggtagcacacacctgtagttccagctactcaggaggctgaggtgggaggatggcttaagagcctggaaggcagaggttgcagtgagccaagaagccaagatcattccactgcactccagcctgggtgacagccagaccctgtcccaaaaatgtatataaacaaaaaaaagtacacagaaacaaaaaaatagaattagggttgtggcttatttcttagaactgaacttctaccagtagattctgatgggatattcattacaagcttcagaaaggtggagtttggggagaaatcgttagagttcaggttgaatcttagctatgactttcatgacaggagatcatgtataactgctttgttctttactggatcatattatgatgtattatgcagaattttcccactgtgtagcctaggaaacccagatcacttatctaaaagtcgtggttaccagttaacttctttctttctttacagaccacactgcccacgtttcagagcccagagttttctgttacaaggcaacatgaagactttgtgtggctacatgacactcttattgaaacaacagactatgctgggcttattgtgagtcttttagaaaatcaaataagctagttctttctgccttgctatgcattagtttaaaagagacttatatccactttttttaatggattgtgaaaagttagatttcatctacctactggagtatttgctgactgtcaagtggaaagtatgtgaaggaatagtgttacagctttgaggtggtgcatacaggcttacattatttacattgtaaaggggtgtgaacagtgtaatgactttagtcttacctacctttaggtttggtttttctctggtatgttttttcctatgtcagtagaattgatttctaggaaacactgctattggtaatagtttgtgataagatttctcaaaagttgctgaaggaggccatgcctttaatcctagcactttgggaggccaaggtgggtggatcacctgagctcagaattttaagacgtgcctgggcaacatgatgagaccctgtctctactaaaaatacaaaaaatttgctgggcgtggtggtgcgtacctgtagtcccagccactggggaggctgaggcatgagaatcgcttgaacttgagaggcagaggttgcagtaagccgaggccgtgccacgtcactccagcctgggtgacagagcgagactctttctcccaaaaacaaaaaaagtgctcaaggaggcagttttcagcccttgattgttatttcttggcggcaggaacagacttaactgattttaaaggagatttccacgcgttttgtcctgccaggcagactgaagaagctctccaaatgatgattgcttaatcattaaacaaaattaataccgaagcttatatttagatatgtctttcattcaaaattagagtccttgattatcctttgggattaggaaaaaattcctttggaatactgaacactttataatcttgatggctcatctttggtgcttagcattcgttgtactagttttaggcgaacactgaagcagtatagacactgttgtgctctgaacaattgtctataatggataaactgaacaaatgattgccatcaaagtgaatatgcaactctcaggaagacacctcattttaaatgtccagaagagttaaggaaggttaagaaaaaacaggagttgacttttaaatagccccacaggagtggagtggttgtctcctgtggaccagcaagagtagaatgaggcaccaactagaaaacatcgctgctgggacaagaggctcatgagttcctgcctctgctgcagattccacctgctcctacgaagcccgactttgatggtcctcgagagaagatgcagaaactgggagaaggtgaagggtctatgaccaaagaagaatttgccaagatgaaacaagaactggaagcgtaagtggattttcctggtgggctctgtcttttgagaagtagaaaagtggtgctgtgtacaaaaataagtagaagaacctgacttaattttgttttaagtgcagctgtttaattaggtccctagcgtcgttttctaaaactagtaatacatcttgcatagtgtgggacatggtctttgtacttcacacattgattcattggaggccattgacactaatacccgatagagtagttgtcttttcccatatgtagggcatacttattaaggatgctggtctggcacagtgaggaaataaacttttgtgcctttataaattgctcataatgtacaaagcttttctttcggaagcttggttactagacgttgagaagaaactagagagttgggggtttcgtcatgtgttgccccggctggtctcgaactcctgagttcaagtgatcagcttgcttttgcctcccatagtgctgagattatagtgagctgcccctgggccaggccaaatagt

SEQ ID NO: 100124 - DNA, 1038 bp, Homo sapiens
tgatctcagctcactgcaagctccgcctccagtgttcaggccattctcctgcctcagcctcccaagtagctgggactacaggtgcccgccaccacgcttagctaattttttgtatttttagtagagacggggtttcaccatgttagccaggatggtctccatctcctgaccctgtgaaccacccgccttggcctcccaaagtgctgggattacaggggtgagccgccgcgcccagctcaactgacatttctaaatgatctatgtataaactgctttttagtaactactcatttttggaataattttttagggccaaatgagtttgaaactaatacgcaaaaaatgtatttcagctgagatctgtatctgtggacctgaatgttgatccctcgcttcagattgacatacctgatgcgctcagtgagagagacaaagtcaaatttacagtgcacacaaaggtaagtaacatgcagtggtaatacatacagtgctaggttgcagccttgttattcacagtggatgtgagaagagattccctgagcttgaaacagttgctattcgtagggtagcactattaagtgagaacctccctaatctatctcacagtaagcatcaggtgagtgccattgtggcggcagcagcattctgctgtggcagagccctgggctgtgggcattgtttttttgtttttttttttttttttttttttttttttttggagacagtctcattgtgttgcccaggctggaatgaagtggcaccatcttggctcactgcagcccctgcctcccgggttcaagcaattctcctgcctcagccaccagagtagctgggattacaggcctgagccaccacactcggctcaaactcctgacctcaggtgatgcacgtgcctcagcttcccaaagtgctgggattcaaggcgtgagccagagccaccacaccgggccccagctttgtttttaatttgcatccaagggaagtttgtctctgtagcttgctttttttcagcatttactaaattgggaaagacctttc

SEQ ID NO: 100125 - DNA, 1056 bp, Homo sapiens
agagacggggtttcaccatgttggtcaggctggtctcgatctcctgacctcaagtgatctgcctaccttggcatcccaaattgctgggattgcaggcgtgagccaccacacccagccagaagtcagttttaaaacttaaattatttgagagtaggtatattttcaatttgattcttacaagtgacctaagggatctggaaaagaggtaaaactttgcatggtaaaggtccggcatgcccaaggctggacttggttctaaagcctgctttgttaactgttgtaaacggccactgtaagcattgtaacatctgtggcctaagtcagagactcaagtgttggccagcagggctaaggagtactctgagcccttcaagcttaaggggggatggaggcagaggcaagtgagaggggaagagtggagcctggcaattatttagcaagttctgtagcactgtggagtgggtttgttgactaagcagaaggaatgctgaacttttggtcacacttgatgcttcccgagtgagagtacaaatgctgacttagaagctctagtcatttcacaagtttctacccatgtttgtctcatctggagggttatatgctataatatgagaaagttcatttaacttgcgcctgggggacattgagttaatgatggcctggatgctgaggggttttgccaatactctcttttagacagttctttaaggcccaaatacaacattgcattatttgcttatttggtggttaggactgtcatgtcaagtgattggagttttgcttgaatcccttcctagggcgaaatgtctgggcaaaatggctgctagtgaacctcggatgtttgatatgctgtggttgcagtcactcataacctagtggttttcttctttttgtcttcatcacattctgaaacaaaaaatatgtttctatactaaccagaaaggaagacaggtatagtcgggggtattacctctacatggggaaagggacgaaaagagaagataattattcagaggaacgaaaagcagctaaagcagctggtagcatccattgcag

SEQ ID NO: 100126 - DNA, 2249 bp, Homo sapiens
tgctcccaggctcgagttcagtggtctgatcgtagttcactgcagactcaaaatcctgagctcaagtgatcttcccacctcagcctcccagagtgttaggagtaaaggcataggccaccgagcctaggtgattttttttaaggctttgctgtgttgcccaggcttgtctcaaactcctggccgcgggcgatcctcctgcctcagcctcccaaagtgctgggattacagacaagaacctctctgcctggctgggtttcttttattcatttgttggacctgctttcttggtagcagtggtgtattgattcccagtaggatttatctgccaggagatccttacagatcattagttcagctgttttgctttgtgaattcatttgaaagtattataatttcggtacttagtaattagatggatttcttgacatgcattagatatttaaggcagtaatttaactctggttccatgttgattccattagtacatgggcttgcagccttgtgaaatgatgattcagtttatccattcgctgagtgcgctgcactgaccttcttccaagcctcagttcctgttctaggaacttgaggctatgtagcctgaaaatgccctgcagtctgcagtgttctactgtgaactgcttgtgtgttggcaggctaccggtaagaatggttggtgtcagcagggacggggccctctgagacccatctcacaaagatgagtggtgaaaatctgatcacttgctgcagccctttagttttttattaagccgatgcctgagtagctttaatagctattagctatgttagtagactgagatcttctgttagaagtctttagttctgttttccttgggggactaagaaattatattgcaggcctgaattacaggaaggggagaaccaatggctagggaatgagagccaatacctgtaaaagcagagttgggctgggcgcggtggctcacgcctataatcccaggactttgggaggctgaggcgggcagatcacgaggtcaggagttagagaccagcctgaccaacatggtgaaaccctgtctctactaaaaatacaaaaattagctgggtggggtggtgggcgcctgtaatcccagctactcaggaggctgaggcaggagtatctgggagaattgaaccccgggggtggaggtcgcggtgagctgagactgtgccactgcactccagcctgggcaacagagtgagactccgtctcaaaaaaaaaaaaaaaaaagcagagttaatatattgcttatagttagttgaaccagttgtttctcacacaccagtgccataatctaaagctgagattgaacacagataggtacgtattagttatcttcaggatggcagagaatagtaacaattcggagcaccaatgggaacattgtttcctgagagttcaaacagtaacaaagtagcatgtgtttcctaaatatgtatcatgtgaatctttaatatttgtggacattaatacaaatctagagtgtgacagaacatctttgaattttatattctcacttaacaaatattggactaggcaaggtgtggatatctttccagctgaaaatctgatcaaggaggcaggcttcttggctccatgctaagaatcatcgatgatttgtcatattggccctcttgctggcaaaatcttagtttcttaggcagtggaatgaaacataacaaaacaaaatccctagaggctaggaacagatagtttgaaagagaagacactgtagcatgtgctgcttaagtacatatcttctgcttttggaatggaaactaggaagtcatttaaatagatatgtgtcttttttatcctatctgtagtaatttatgtgggatattcaaataggaaaatacaggctagcactgcatattgtatccatgtcttacattgtatacaaatgactattagatttaaatgactgttcaactagccccaatctaacagatcagagattgtggagtttcacttctttggactgtgtctttttcattttggcactgagtctgcagtcaccataaccacttagaaaaaactgtattttttctgttctcctggtgggttctgagttttagaatcttgccttttgtgttgttcagtcatccaggtgccctttgccctctgtaagccattaaaccttttgaagaggcagctttgctggtagagtcgtaagtgaaatttggaccaaaagtgagtttatgaagactggtgggcaggagctcaacag

SEQ ID NO: 100127 - DNA, 4215 bp, Homo sapiens
tcgggcagggaggccggcggaggcggggccgtggccgcccccgagaggcgcccaggcggcggcggcggcggcccagcttcttctttcctcgcacagccaggcggcccctgctcgagtcccgcgtcgccatggccgcggttcccgagttgctgcagcagcaggaggaggaccgcagcaaggtgaggtcctcccagcctcagactcctgggcgggcggccctgcgagctccggggtcgctgcattctttcccttgcgcgtccataggccgtggctgctcgccgccatccccagcgcgggaagcacccgtgagacccgggcggcccctctccctggtcttcactgaaggctgccccggggaatccctgtggatgtcccggattctattaggacagaaccagagacgcgggaccttagccccagctcaggcgccggtgccgagcggacttggagagatgatctctggagaccccggaatgttctttttaaaactttcctcggcttcgtggtgaccagtaggtgaacgtgaaattgacttaacatgcgacagaccagtttggtttgttgcccccaaaataccctccttccccccaccttttactgagaagacttttttggggggggggcccaaacaacttgggaaattgcatcaagcgtccgaacatgctgcttacaactttagaaacgcaaaatgcgttgttgtgggagttgtgtaatttttagtaggtgctcaaatacttgctgaacttggtgtctatttttaagtcttgcccattgatgtaaactgtccctaggtcacgtgtatcttgaggtctaaaagattatttatgcaataaattgaaattcccatagccaattaaagattcagacgagcctccactctttttcattggttctttaaatttgcctcggtagctttgcgatgcatggtttgcgagcaacctttcttgcagaatcgtcaacgtaagtttttctgaccgatgaaaaagaacctctaaaaatacaaggctctcttaaaatgtaatttggagccgtcttaacttacacatttcttgagaagttaaaggcacctccatagagaaacttgttcatctagtaagtaaataccagagtttcaaagcggctggattgttccaacaagggtatcattgcattaattattaaaatagagctttctatacaggagggtgttgtttagagtggttttttttttgaaagttctttattactaaaacaaagtggaaacttgagaccacgattctttgtaaaacattataaaggtacttttctccataaagggtagataatggattgggattttggtagcattttattttttctttctttctggtacattcttttagctgtcttgattcggagtcagctaggtaaaaggactcaattgcttcaccccactctctggtagtacagtatattgcagctggtttttaaaatgacttccaccaccctgatcctccagcaaaattggagaatggttatgaaggccatttcctgcctgttttagaggctacagaaactgtccgtatctgtagcgaagagagttacatgacattgttttcctttttacattacaggaataaagagacaataaaaataaataattaccctgacgcgtggctttatttttgttttctgatctctgctgatgctgataacctgctgtggtctggcctagatggtgttatggttaactgaaagggagtttggggcaagtatgaaataatgggaaactaagtcttgggcaactttttgccataatacaatttcggtagtcaactgaaatgttttgtgtgttacctgaaatgtgtgttacttaaattgtttaaatgccctcctgataatttactttggtttggaattctccctaaggatggagttaattaagactcactaaggtagggggacatacttgattcttcaggattttgaattctagcccaatactcattttggccaattcagcaaaactgaaagggaatactgtgtcagtcgtgtctggtagccagacactggcattttgttacattctttagccgagggtgttggggtttgccttcttcctcagaaaatagttcaggggaagagatgcatggttaatttggttcctaactggtcctctatttactggtttttgattttttttttttttttgagacggagtctcgctctgtcgtccaggctggagcgcaatggctcgatctcagctcactgcaacttccgctttctgggttcaagcgattctcctgcctcagcctctcaagtagctgggattacagtcgctcaccgccatgcccggctaatttttgtatttttgtggagaccgggtttcaccatgttggccaggctggtatttgaactcgaccttcgcagcctagtgctatttttaactagggggttctccttccttgacagtaacaacttggccttaacttactgcttggttacagggactttggtgaatgatatctgtcctcttacctactcaggagtgtttgtagactaagtactgctgctctggtttcgtgtttaactggtgtggaagctgcctctaggggtatttttgttctccattagctagaatggagtgcagttggttagtataggaacaatcctgaactttgaccaataccatagcaagtccaaacttacaaactttgtggactgaagctttatgctacccttgcaactattttctaagttgaggaagtatgacgtatcaagcttcccacgccttagttctagttcagtaacttgtactcggtgtcttaagatccccatttgtgaatactctaaaaggtcattatctgttcacattattttggccataggtagaaatggccaagaggcttttttttttttttttttgagacagggtctggctctgtcacccaggcgggagtgcagtgtcacgatcacaactcactgcagcctcgacctggggagctcaggtgatcacccccacctcagcctcctgagtagctggggctacaggcacacaccagcatgcccacctaatttttgtattttttggtagagatggggtttcaccatccagttcaacatgccgggattacaggcatgagccattgtgcttggccaaggctgttaagttttctagatttgtttctgagctgtaaactcctcattcggtgagacctagtggtcatctaaactagaggttgagtttaaaattcagtttctcaacctggggagcactgttgacattttagcctgatcacttttgttgaggagtgccctctgggttgtaggatgtgaagcaactgtttttggcctctgctaggacgcggcctcctcccctcccatggtgataagaagtcaaaattgcctgtttgagaatcactggtttaaacggacttccttctaaaatggtgtgatatgggtggggtcaggttgtgttacagaagctagtctttgtgtgcttgttgcgaatttttcaggttttctattaatcttgcctaaggaaataacatgccatgtaaaaattagcattgttggatatctttgtgagaataaagcttttccactaatactgaggaaccttaacaaaaggtggtgaaagatggttttcttcagcaggttctgggtacttgagggttgcaaagggagggcttcgtgtttgtgtttgtgagtgtaggctttggacactggaaacttacctgagtttcttgtgctgcagaggggaacttggtttaaaattctgctgtttcagcatttttctgtctttattatcagggtcttgatgctcgagcaaattaggtgagaacagatctataggttagtaccctgaatgtcttaaatagcccgtggtcacaacagtgtgtagtgaagttaaatagtatttaaggaaacagtctaacttttaatgatcccaatagtgagaaacggctattaaagtgtaaattaagtttctctgcatgatctaactttccaaaaagtggcttcttcacccttaatacctgttttctgattggccattgaggtactctgacaagatctcctaaaagagatcttcacaccttcacatgctgcctaaaggcaaaccatagtaccccaggaggagtaagttgcagtttgaggggcagccaacacttaagtttaaaaatgggggtccttggcttgactcttctttttacattttggcataacttttttaggcattcctatatggtctggaga

SEQ ID NO: 100128 - DNA, 1050 bp, Homo sapiens
ggaatacaaacataaaggccttcgaccgttgcaaatagactaaagtgaaaacaaatctgaatgaagatgaagttatttcagaccatttgcaggcagctcaggagttcaaagttttctgtggaatcagctgcccttgtggctttctctacttcctcttactcatgtggccggaagaaaaaagtgaacccatatgaagaagtggaccaagaaaaatactctaatttagttcagtctgtcttgtcatccagaggcgtcgcccagaccccgggatcggtggaggaagatgctttgctctgtggacccgtgagcaagcataagctgccaaaccaaggtgaggacagacgagtgccacaaaactggtttcctatcttcaatccagagagaagtgataaaccaaatgcaagtgatccttcagttcctttgaaaatccccttgcaaaggaatgtgataccaagtgtgacccgagtccttcagcagaccatgacaaaacaacaggttttcttgttggagaggtggaaacagcggatgattctggaactgggagaagatggctttaaagaatacacttcaagtaattatctcaattctgattctatatgtttgctatgttttctataatagagagcaacggtgtcaaaagaatgaggtttggttttgtttttttaacttactagcaaggaactcccttcagatagtaattaacattaaatagcactttatgtgtattaactcacttgatcctcatggtagtcctgtggagtatagatactgttatccacattttacagatgaaactaaaatagatcaaatatttgactaaataatacataaaattcacttgttttataagctaccaacaatattagaattgcttgttttccttgattattgaaaaaagtcacctggtaacagaattctagttgtttgctagataattctgtttagaatccagtaaatacccactgtcctacttattagcgtaaactgactcgtaaatttaaagaccttgaagcagaccagaacacatgacctatatttagaccttggtaa

SEQ ID NO: 100129 - DNA, 1968 bp, Homo sapiens
agcctgggcaacgtgacaaaactccatcattactaaaaatagaaaaatcagccggaagtggtgcccgcctcagcttcgagggtgcaacgagccgagattgtgccactgcactccagcctggacgatgggagtgggatcctgtctcaaaaaagaaaaaaaaagcacttttccaccctcttcttgggccttttttttttttcaatggctctgtaaggatcacagcccagtcttcaatgttttatctgtcatctttgtgttcttgtgtcctggtgcagtctttgatcaacctaccttagaaactgagttaggagatatcctgtagattattttatactgagtttgccctggagtaagaaggaaacgaacctaaactctggacctactgtagtgaaacgagaattgccctgtgtttcttcctaggttcaatgtggcttaattgtggtggcctacaaagatggatcacctgcccacccacatttcatggatgcagagctctgttcccagtactggaccaagtggcttcttcgactagaagaatatacggaaaagaaaaagaaccagaatattcagaaaccagaatattcagaatagggagcaagttgctatttgggaacattcagcaccttctcacagtttgggaacatatattgctgtttactccagtgtaaaaatgaggtgccactggatctgagtgctacacgaacacaagtagaagtattaatttgttgaaatgtgttgttaccaaaaagactgaaaagccccaaagtctagatataaagacctagacttcggcacgcgaaatcccagctatgctacctcttatttacctgaaaggaggacacgcaggatgggcagtcatgctggtgactcttgtactcccttgagggacattgggggggggggggcgtggtcccaggcaggatgcccagtctttgagctgagattggaaggcagtgaggctgagggtgccaagatttccccagggttcacccagaggggaaggggctacatgcccccagctgtgtgcagggaggacacatcagcccactaccgctgccaacaccaatgcctaaaacttgtttcatacattggggttttctatatatttcagctgggaaaagcttacatttaaccttttgaaaaaataaatacgtgattagcctcaactaaacattgctgactataaagacagtatattcaccatgtcgctggcaatatgtcattgcgtaacaccaaataaccccccagaagtagccagaggccagtttgaacatcacaattctaagtgttttagtaactatttctggcgtgagtcaacagatcatgtagatagagtcaattattgtttgtggagtttttcagctataggggaggggaactattaaaatccatttgtttctattcaataggtaataaaaattagttgtccctgggtttgggaaacttaaatgcccattacagccctggggaagggttttctgtcttatggagtgagtcttagcatttaagttatacagttgctgccttaaaatagtagcctgctacaatgacttctttgggtagccattttcataagaaataaaatacaagatatgagtaatgaagctttggttttgtttactttgtgtgtttataggataattttataaacctggaaattgtttgcactttttttataattcagaattttacaagcccaatagctttggtgagagttctgtgtaagtgcataaaagaaagcgtcctcggctgggcgcagtggctcacgcctgaaatcccagcactttgggaggccgaggcgggcggatcacaaggtcaggagatcgagaccatcctgggtaacacggtgaaaccccgtctctactaaaaatacaaaaaattagctgggcgtcgtggcgggcgcctgtagtcccaggtgctccggaggctgaggcaggagaatggcgtatacccggaaggcggagcttg

SEQ ID NO: 100130 - DNA, 1063 bp, Homo sapiens
gacttttactggcttcatagttgggtggttctggcttggccatgaccaaccgatgctgtgtctgtccctcatcctttcaggcattcgtccctacaaatgcaacgtctgcaataaagccttcacccagcgctgctctctggagtcccacctgaagaaaatccatggggtgcagcagcagtatgcctataagcagcggcgggacaagctctacgtctgcgaggattgcggctacacgggccccacccaggaggacctgtacctgcacgtgaacagtgcccatccgggcagctcgtttctcaaaaagacatctaaaaaactggcagcccttctgcagggcaagctgacatccgcacaccaggagaataccagcctgagtgaggaggaggagaggaagtgaggagaaggaaggggaggacagacgttcacactgccacgtatgtctacgtggatttttggttttcagcttcccccaccccactggctcttcttaattagaagtgaccagttcacctctgtgtccttttgaaacatcagcagtagggtccattccaagattgtcagttgccgttagtgacgtcaggccctgtaacctgtgtcctgtctggcgcagttgctcacattcaccaaagtttgttttcatgatcctgatggccaagaacaccgtgtgggatttttttttcccccaaggattttcacacacggaaggagaggtatttcttagagagatcatcattttatggtgccttgaaataaaaatacttctacttgaaatgctgtttaagcaaggcaagtgaattttgttattctgaaagagtttacagaaactattttaataaatgaaatgttcttgtgaagcttttaaaagcaaaatggaacattgacctacagctctctgttcagggcttattgtgtgatgtttaacttcaggttattgaggtggggaggttgattactttatattagttgtgtgggtttgaagaagcagatcttcctctctttttttgtttttgagacaagttctcactctgtcacccaggctggagtacagtggcatgatcatggc

SEQ ID NO: 100131 - DNA, 1038 bp, Homo sapiens
gggttttgccatgttggccaggctggtctcgaactcctgacctcaggtgatccacccacctcggcatcccaaagtgctgggattacaggcgtgagccaccgtgcccggccactttgcatatttaattagactaacataacttgcagattattttttcacttccaaaatacgtattgatggtggatactaacctggtagggtgaagtgataacttaggttgcacatatgtggttcttagcaaacaactgaccagtatttctagttgcatctgaaaaagcccatctctcactgaagacctgaaagagaatcagttggtcttgaatggactccattgatgtagccacattcttagtatattgaaatgtgggttttccgtctttaaattttaaactttgaaagatttaccaaagaaatatgtagaaatgcttgtaacacaaatagcattttgtttgtattataaaatacttacagtaaagaggtctgatctcctgattaaaaagccccttcttgccacactccctttctgtgtcctctcctcttccttggtgactcctgtgaatagcagttccatacgtaggagaaactttatcaaacatttgggaaggatagggaagtttttgcattcttttcctggagactcattcttatggcacaagtaaagatactatgatcgatctttgcttgttatttttctagtgttcttcagcatatactgagtacctgccagctctgagctaggccctgtggatacattggtccacaagatcagcctcattactgatgagcttggtctggtaacatgagagcagaaaactaaactggggttcatttttttttgtttttttttttttgagatggagtttcactcttgttgcccaggctggagtgcaatggcgcgatcttggctcactgcaacctctgcctcctgcattcaaacgattctcctgcttcagcctcccgagtagctggaactacaggcgtgcgccaccatgcctggctaatttttgtatttttagtagagacggggtttcaccatgt

SEQ ID NO: 100132 - DNA, 1046 bp, Homo sapiens
ctgtaaaattcataagccgaggccgcaggccagatgtgattctggaaaaaggcgaagtgattgacttttcctccttgagctcctctgaccgcaccccgctgacaagcccatctccttctccttctctggatttctctgcccctggtacacctgcctctcattctgccacacctagcttgctttcagaagcagatctgattccagatgtgatgcccccacaagccttgtttcatggtaagagtttgtttgctttgctcttttattttgggtatgggccatggtataaatgtacaagttttcaccccgtgggctgtgtgctctgcatttcttccttcctatgtcttgatgacactgttttgtactctgcacagatgacgatgagatggaaggcgatggagtcatagacccagggatggagtacgtcccaccccctgctgggtcagtagcttctgggccagtggttggggtcagaaagaaggtcagaggccctgaacagataaagcaggaggtagagagtgaggaggaaaaacccgacaggatggatattgacagtgaagacacagattcaaacacatctttgcaaacaagggctagagaaaagaggaagcctcagctggagaaggacacaaagccgaaagagcccaggtatactcccgtgagcatctacgaggaaaagctgctgctcaagaggctggaagcttgtcccggtgctgttgccatgactccggaagctcggagactgaaacgcaaactgattgtcagacaagcgaaaagggataggggattaccactttttgacttggatcaagttgttaatgctgctcttttgttagttgacgggatttatggagccaaagaaggaggaatttccagacttccagctggacaagccacgtacagaaccacctgtcaggacttcagaatccttgaccgataccaggtgaatgcaagcacttgctgtaaagcccttgggggcaggagtggaggtggggcaggcagcactaggcattggacatggttatgctgtgaccttttaaatcctgagt

SEQ ID NO: 100133 - DNA, 1060 bp, Homo sapiens
tttttgtttcttatcaattaagtggcctccttgttttattctcccatctcctaaaactttcagaattttctctttgttttttatctttaattagtgcatgttaagtgtcttttattttctctttttaaagctttgttttcttttttctattattttattttccagcacatccaaaacacagaaattgtgtttgttctcatttgtcttacttgacaactctgttcttttggtcagaggtattttatatgcttcttggcatttattctgcttggtgttcgctgaccttcctgaatgtgtggtttggtgtctgacattaaattggggatattctcagtcattattgcttcaaatttttcttctattcctttctgtcttctggtattcccattgtgtgtttattacaccttttgtagttttccgcagttctcggatagtctgttttgttcttttttttcatcttttttgtctttgcttttcagttttggaagtttttactgacagatcctcaagttcagagattctttactcagccgtgtccagtctacaaataagcccatcatcaaaggcaacctttatattggttacagtgttttttatctccagcatttctttttgattcattttcagagttttcatctctttaattgcccatctgttcttgcatattgtgtattttgtccattaagcccttaacatattaaacatattataggcatatcttgttttattcacattgctgtattgcacttcacagatactgcattttgtacaaatggaaggtttgtgacaatcttatgtcgagcaagtctgttggcaccatttttctagtagtgtgtgcttactttctgtctctgtgtctcacgttttggcagtttttgcattacttccaactttttcattattattatatcttttatggtggtctgtgatcagtgatctttgatgttagtattgtaattgttttggagcaccatgaaccacacccatatgagacaatgaacttaattggtaaatgtgtgttttctgactgttgcactaaccagctgttccccatgtttct

SEQ ID NO: 100134 - DNA, 1007 bp, Homo sapiens
aaaaaaaaaaaaaaaaagtgccaagcgctattctagcaggggatctgctgtgaactaagacagagtaggtccctgtccttaggcagggggcatccttgagcagggagctgacattaactagctcaccaggcaaataagattacatcatgcagagtgaacgcggggacagtgatgttacatcatgcagagtgaacgtggggaggagtagcgggcaggagcactgctctatgggggttcaggacggcctctctgaggaggcagcacttgaactaagtccacaaggaggagccagggtgatgaagggtcagtgtggaaggcccaggcgcaggccctgaagcaggagttgggttggtgtatgtggctggaacctggtgatggcagagggaacgggttggtggctaatgaggctactggggtgacaggggccagatcctgcaggatcctacaggtcataagtaaggagtttgaactgcattctgaacatatggtaggaagccatgtcagagttttgatcaagggaagtgaatttatgtttttagaagactctggcttctgtgtcgagagtggatagtatgggtgtaagagtgggagcagagagaccaatgggaggcagttgatccaggcagcattgggagtggtttacactagagtgggaagaagttagggagctgtataactttgatggagcttcccagaacttaccttgaggcattaaccagataatgagagtattctgtgcagtaagtagttcagtgcctggtgttacagttatctgttgctgcattataaaccactccaaaacttagtggcttttgatccctgtatcttttttctgattctgtggattgactgggcactgttgggttctttacttagtgggctgaaggctgggttcactcatgtgctgcattaacctgagagctagtttgggattggaatgaccaggagagcctctcttcctccagagtccatctccctgtggcctctagttattaactggtctagct

SEQ ID NO: 100135 - DNA, 1011 bp, Homo sapiens
agacctactttatgacacataaaaatatgatactaattatatatggaaattaaccaatcctcagagtaattttgtttcttttttttttttttttttttttgagacggagtctcgctctatcgcccaggctggagtgcagtggtgcaatctcggctcactgcaagctccgcctcctgggttcacgccattctcctgcctcagcctcccaagtagctgggactacaggcgcacctgccaccacggccggctaatttttgtatttttagtagagacagggttttaccgtgttagccaggatgatctcgatcttgtgaccttgtgatccgcctacctcagcttcccaaagtgttgggattaccggcatgagccactgtgcccagcctgagtaattatttctatataaccagtgtttctttctcatagacttccttgccgtccaggaagggatttcgacaccagaccaccaagtttttgtatcgcttggtaggatcagaagatatggctgtggaccagagtattgtcagcccttatacctctcggatcttgaaaccttatatcaggtatatggagaactagaggtgtgatgtcaggtgtgtcatgagggataatgattgtggtttctgtgccctgttctcctgttggagagaataaagatcacaaactgtgaacaacattggcaaggactgagttctgtgcttcacctccagttttgtcctttgcttgtttcaactctacttttttgcagagaacatggtcctttgaaagaaacttaaaaagcaaaaataaattaactgaaagattgctttgtgatgatcataatcattgttttatttattattattattttttttttgagacagactcttgccctgtcacccaggctgggctgcagtggtgcaatcttggctcactgtaacctctgcctccggggttcagggaattatcttgcctcagcctcccaagtagctgggattataggcatgcaccaccaagcccagctaatttttgtat

SEQ ID NO: 100136 - DNA, 1040 bp, Homo sapiens
tgaaggcacctagcacagtccctggtgggtacagagggctttggcctgatgaatgttcagagtgaattttagatttcatacataaaagtatagctgtaatcaagccagcttcgtgtaaaacagtgcaggttactttaaagtttcaagcagatcaaagagtttatatgagtcaaaaagctaggaataataccaggtatttttcttgacttgaatttgtttatcttctgtggtaccggaggcgtgattatgaaacaaagccacccaaactgcagctcctgtcacagattcgttcccacctgcacaggagcgaccctcactggacgccggagcccgacgcacctctcgattactgttatgtgcggccaaatcacatcccaacgatcaactccatgtgtcaggagtttttttggcctggtatgttccccctcccaaaccaggcaggtcatttttctgtacagtccattctagcaatttttaaaattagtttatgtgatatccttaagatttttatttatgatttcgtttagtttgtctctgctaacatggaaatattaaaatacaaatacctcttgctttcccaaaatctagaagaagccagcaataaacagtgtttttgtttgtttctcttccctgtttgtctctgtttccagagtaaaagattcatcctgttttgcttctgcatatgtttagataccaggtaatgtctatcaaagatacacagactggtagcttgggcgtgtttggacacttttgtttttggcttaataattctttatgttttgtttatttagctgttccttagagagtattagtacagccagaaggtgttttttaaaagccaaatgccctgatcacagactgagaataagggtaaacccaatataatttgtcattttatcagccttaacaaaattgcctctgaagaccaaagtcattaattaaaggaacacatttgcattgctaaatataaactattctttgtggatctgctttcccacgctgccttgaaacctaaaggaaataatacatgtctttcagat

SEQ ID NO: 100137 - DNA, 2306 bp, Homo sapiens
aggtgaagattttgactttttttgtttggtaggtataattccaaaaacaggccccattatggtgaattgtcataacaaattttggcttcctaccagaaacatctgcatttgcctcctgcttgcagatttatggcttaactttgtcatgcttattacacccgagaaaactgaagtctcagctttaatattttttctgtgatttcattagacttttgctctaatttaaagttcttattagtgaggaaaagaaatattcttaaataacaataatactgtaaacatgtatttagaaatcatcttcttcaatttctaacatgctttgatccaaaaccatcacagaaacccagattgtctgccaaatgtgaaaaaggcacagtttcaaactattctacttgtatttttacccccactgtctcttgaaacaggtaaccatgaaggataacattaatacctttgtttctaggattatagaattatgtcaccagttccctcatggaatcacagaccaagtaattcagaatgaaatgcctcatatagaagcccagcagcgggcagtagccatcaataggttgttgtctatggtaaggtgaatctaactattttgcataattactgatatgctgattatcactggtttttattatgtagttgtgatggttaatttcatgtcaacttgactaagatacaggattcctacatatctagttaaatattttattggagtgtctgtgtgggtgtttctgaaagaggttagcattttgaattggtgaacggagtaaagtagatatgggtccagttgggtgagcatcatccaatccattcagggcctaaatagaacaaagtggcagaggaagattgaattcactctttgaattcaatcttgagctgggctatgaatcttgtgccctcagcactcctggttctcagaccttcagacttggactggtatctacaccatcagctctctgctctcagccctttgatctgcaacaccagctttcctgggtctccagcttgcagagggcagatgatgggactcctcagcctccataatcacagagcaaatagcttctgatgaatctttcaagagggaggtgtatcctattggttctttttctctggagaaccctaatacagcagtcataaaacgagaaagtgtgttaggtttgactgataagactctaaaccaggaaacagctcaaactacctgaattgaaaaaagaagaaataattatgcgttataagacaaatgaaataaatgtattatggtataactgttgtatttattaattgccactgccatacataggtctagtctgttctcaccttctgtttgcttcctactgctggtgttgggccatttcccataaaatattccaccccccgattttcctatgagttgtcacagagcccagtcatcagggtttcattctccacattgtcactctgagcatttcaggaagcaagaatgagtccagttgaatgaagaatgttgggctttggggaggaagtgcagccttagcccccagtgacattgcaatggaatttatcagtgaagccattctccatctgtccagaaacaaacaagcaagactgtctaaaaacccaccaagtggtgccgatgctctaaatctcccttactttccctcatcaccaaaacatccttttcctaagagcatttcagtttggctttagtagcagttaggttaaagagttctacgccaaggcctcatctgaatgactgatttgttttttaagtctactagccttgttggatttccaagggctctggatgtggagatttggggtccgatgaatcttttcttaaacctttcccatcaattttctagctcaggagttggcaaactttttctataaagtgccagacagtatatgttttaggctttgtgagccatatgatttctgtcacaactacactgtcattttagcaagaagcagccatggatgatgatacataaacaaatggctacagccatgttccaacaaaactttggttataaaaacaagctgtggagcagattgctcacccctgttctagcccaaggacaaaggaatgttgctgatttctagttatttcactgtggtgaaggtcttcagctctaggaaagacagaggaagggattctgggaggttgtagcagtggaaaaagttcttttcttcctctgatcgccctctcagctctttccttctgactgaaaatcatcttcagcacctctcttttaccacctctgccaccacccacccactgcgagtcctattggctataggttgtatgcaggcagtag

SEQ ID NO: 100138 - DNA, 1409 bp, Homo sapiens
tgcatgccatcaggcccggctaattatttttgtatttttagtagggacagagtttcaccatgttggccaggctggtctcaaactcctgagctcaggtgacccacctgcctcggcctccctaagtgctgggattacaggcatgagccaccatgcccagccctttccataagttttttaaaagtttgccacactgggattccaagaaatttctagttagaaattataaatcattataataagtcttacaaagcattatacttatttattgtttagcatacttttgctactttagccagcattctttactgttagctttatactgctagctttggaatgagacacaagttagaggaataacattaaaaatccatgaaaaccagagttcaacttattttactttactttcttataggaatatggagcagagatatccgctataaaagtaatttgccattaacagaaatcaacaaaattctgaagaatctggaaagtaaaaagcttatcaaagctgttaagtctgtagcagtgagtagtcctttcctcagatacccacttacatatgttgcttcaagtttttattcttgaagttatgtcatgatttagaacagctggtcaaaaaagacttaaaaatttagctcatgttggattggtttggagatgctgcttagacttgtccctacacagttagctcttggtgtctcactcacccactcaaaaatctaaaactactttactgtcttcagtgaagaatctttggaactgtgaacatttttcctagattttgtggtgtgtaagataatttactttatcccgacatattagctttctcattcaacaaagagtgtttgctgtgtgccagacactgttttgagtgcttgggatacattaatgaacaagtcgtagaaagatccctgccttggtggagcttctcttctagtacacgtgtgtttttcctgctcctcatcctgccccacccctgctccagagctggctccctcggggacatctgcccctgacctcactgatttagacatcagaggaactgagattcccctagaataaagtttgcttcaatacacatttcataagaattacagctataattcaaattttataatttcagagctgttaggtctgtggcagtgagtagacctttcctcaaatatccgcttacatatgttgcttcaagtttttatttttgaataaaacaagaattataagaattataacatcacttataagaatttgatgcttattagtgattttatttatcagaatagcatttcccttccacattgtttaatggataatttcaaatatatacaaaggtagaaaaaatcatataataaaaccctatcatgtagcctcattttgtcagtcctccttctacatctttatgtttaataaca

SEQ ID NO: 100139 - DNA, 1136 bp, Homo sapiens
gagcatagcaaagggatacaggaaccaagtgaaaagcttccaatgcccaaagcattccaaagcttccagtgtgggaataacaatgaagtatctgaatgtaaatcaaagtataaaataaatactcatgagtccatagtgatagaaatacggtgtttgagaaactgtcacaactaaaagaagcctgagagagatgactaaatgtagtatgatgtcctggatggaatcctggagcagaaaaggaacattaggactaatgaaatctgaataaagtatggcatttagttagtaatgatttatcaatattagttcattaattgtgacaagtgtaccacactaatccaagatgttaaaaataggggaaacagcatgatgtatataggagctctgtgtactatctttgcaataattttgtacatcttaaactgttccaaaatataggtgtttttgtttttggaaattgttatcttataaacacatgaactgtgcatgttctttcctaggcctcaaaaaagaaggtgtatatgctctataacctgcagccagaccggtctgtgactggtggagcctggtacagtgaccaggattttgaatctgaatttgtagaggtgcttaaccaacagtgttttaaattcctacagtccaaggtgaggtatgattgaggaaacatcactgcaaaccctcttgtaaaaagtttttcacaaaggattttaatctatttatcatattttataggaattaaaaacctgaaattgggaatttttacttaactaaatatgttctgttgttggtttgactcagtataaagtgtattcagaaaacacaccaatattcttatttacatttcttatgtttcaatccttataggcagaaacagcacgagaaagcaaacagaacccaatgatacaaagaaatagttcatttgcctcatcacatgaagtgtggaaatatatctgcgaattgggaatcagtaaggtcagaactgaatttcatcttattttttaaaacttattctttgtcacatacaatgtattccaaacatgtatttgacccacattgttttttttttttgagatgatagctacgaacattctgcagaatccactttgggaaaatactgtcctgtatcttaggcaaag

SEQ ID NO: 100140 - DNA, 1080 bp, Homo sapiens
gctttaaattactccaccccagcataatgtttctcccatttcacagcagaattatgaccctttactgttttatttatttatttgagatggagtttggctcttgttgcccaggctggagtacagtagtgcgatctcagctcactgcaacttccgtctcccgggttcaagccattctcctgcctcagcctcccgagtaggtgggattacaagtgcctgccaccatacccagctaattgtatttttagtagagacagggttttgccatgttggccaggctggtctcgaactcctgacctcaagtgatccacctgcctcggcttcccaaagtgctgggattacaggcgtgagccactgcgcccagcaaccctttactgtttttaacaccctccaagtggatgtctccctatcctacttgtgtcctttctgatgtatcccttttttaggtagagttatccatggaagacattgaaaccatcctgaatacactcatttatgatggaaaagtggagatgacgattattgctgcaaaagaaggcacagttggcagtgtagatggacacatgaaactgtacagggcagtcaatccaatcatccctcccacaggtttggtccgggcaccctgtggactctgcccggtgagttaaagtggcttcactttacacttgactgcccacgggtgcaagtgccacattaagaaacagagcaagcacagcccagttttctcagactcttagggttgaccaagagctattcaaacctccatgaaaccttgatgaacagacctttaatgaacacatcattcctttacttttttttttttttttttttttgagacggagtctcactctatcaccgaggctggagtgcagtggcacaatcttgactcattgcaacctccaactcccgggttcaagcagctctcctgcctcagccacctgagtacctgagattataggcacccaccaccatgcccagctaattttttttatttttagtggagacggggtttcaccatgttggccaggctggtctcgaactcctgacctcaggtgatcccctcagcctcccaaagtgctgaga

SEQ ID NO: 100141 - DNA, 1025 bp, Homo sapiens
agcctctctactactcctaacttgatgatcacaaagcaggccctattatagtatgttcttcccgctcccccctcgccccccgagatggagtcttgctgtcgcccaggctggagtgcagtggcacgatcttggctcactacaacctctgcctcccaggttcaagcaattctcctgcctcagcctcccgagtagctgggattacaggtgcctgccaccacgctcagctaatttttgtattcttagtagagacggggtttcaccatgttagccaggatggtcttgaccacccacctcggcctcccaaagtgctgggattacaggtgtgagccactgcgtccggctataatatgttcttaagtacagtcctagtccctttcagtttgaaagttttgtttttaatcttgctttaaataagtggttgggtcttagatattttaaaactttaatttgaatataatttttttttcttttttaaaggtttttgatgactgccacgaaggtggtgagatttcaccatctaactgtatttacatgacagagtggctcgaattttaatagagagctatgaactttattgacattttgcaaatgaagttacttagggagcagataatttaattcatgatggaacacgaaatctccttgaaagcaaacttcacaataatggacgtagacttgctgctatgaaaacatattttttttatttatgaagactaaatttatattggtaaaatagccagtagaatatgaaagaaataaggttagtagtgaaattcattcttcaataaataaaacactttgaaactccggaggaccacatctttcaagacttctgatgggtcaaggaaaaagatgccaacatacccgtatttaccaagtactatgataatggctagagtataaaaatgttctttttaaagttatttattaagttcttcattggaagtttttttttatatctggttcactaccaccattttctgtttcctactttctcagtggtttcattgaaaagaaattagaag

SEQ ID NO: 100142 - DNA, 1111 bp, Homo sapiens
actcaaatgtattctttgttagaatttaccctagattcttatttaatgtctgcagtagactgaatgtttgtgtgcccccagaattctaatgttgaaatctcatttccaatgtgatggtatttggaggtggggcttttggtaagtgataggtcaggagagtaacagcgctcatgaatgggattagtgcccttatataaagagacccagagagctccatcaccccttctgccatgtgaaagggagaagacaaacatccacgaaccaggaagtgggtcctcaccagaaaacaaatctgtaagcaccttgatcttggacttctcagcctccagaattgtgagaaataaatttctgttgttgataaaccaccagtctatggtattctgttatagcattaactgaaactaaatatactccgtgccctccattcacactttattttgagagaggggataacattctttttctcttactctgttttagatttatttcccttccttattctgttctaaatcatggtgtgatgtgtctaagcagaaagccattataattgtcctcagttctaataacactttcagttcctatggtcagccacatagaaaacactaggttatttgatgtattgttgcacagaagttgactgtgcggctttttagaattgcagcttcatattttcactttgtagctccacttagaagtttctgtatccaagccaaaaacatgggacccatggaaaggaattcaagctccactagtactgagggttgggttctaataccagtttggagatgctctaagtggatatcagaagagttattttaagataaatggtatcagtaaaataaaattcaggccacattctgtgaattagcatttgatgacactagctctttgtaacaaaaattatttcaagtattgaatatacatacatatataagatacacagccttttggccagaacccccatcttccagtaatttgccaaaatgatgaacacaaacggaaagaggagaggcacccgatatatgttctctaggacttttagaaaacatggagttgttcctttggtcacgtatatgcgaatctataagaaaggtgatattgtagacatcaa

SEQ ID NO: 100143 - DNA, 1101 bp, Homo sapiens
cagacacttcaaggggaatagaaagccatgcagtgtctagggccagagtatcccaggtagaaggatgagagcaggctaagatgtgcatgtacttggcatgttccaggaactgcaatgaggtcagtaaacctggctgggaggagagaaggagagtctgtagagacagaatcagagctgactgatgggaagctactggggtttgcagccacttatgctttaaaaggatcactgcatctcaataagagcagattttttgttttctttcaatccactagcaaaaccaggaaggaattaggacagattatgttaccactttagaggtcagcactgtttcctctgcaacagaaatttaagatatacgcaaggtatttctcaagcaagcatgactggagcccacaaaggggatagcagtttaacaaagatcgcacctcatggccgcgatggccccagaactgtggccaatgatgatagtcttctcatcacagtgcagctctgtctccatgaagggcagccagatgctctctcgtgctgtaacttaaggttcagggtaaagaaaaagtctgtcatttgatagtggcagtctgaatccaacgctgccccacctttcaaacaggcaactattcagcagttcacaacttttaaaactgcaggaccacagcaggagaccagactgtattaacaaaaccaaagatttatgtattactacttgaaagatccaagtccacagttttggtaactagtttttcttttctcttttttttttttttttttggtttaccatgttcttgtaagaaaatactaaggaaataataaaatataactctgaaattttaatgtaaactttcaaacttgaaaaaaaaagctaatggtcaggtgcagtggttcacacctataatcccaacactttgggaggctgaggtggacagatcatttgaggtcaggagttcgagaccagcctgcccaaatgctgaaaccccgtctctgctaaaaatacaaaaaaaattagccaggcgtgatggcgcatgcctgtaatcccagctacttgggaggctgacacaggagaatcacttgaacccaggaggcagaggttgcagtgagcca

SEQ ID NO: 100144 - DNA, 1043 bp, Homo sapiens
tttttttgacatttagttcagaatttcacataccattaaggtaattaaagttttatcttcagttcccttttagactatggcgacatacctggagttcatccagcagaatgaagaacgggatggtgtgcgttttagttggaacgtgtggccttccagccggctggaggctacaagaatggttgtacccctggcttgtctccttactcctttgaaagaacgtccagacctacctcctgtacaatatgaacctgtgctttgcagcaggccaacttgtaaagctgttctcaacccactttggtatggattcttttgaaactggtaaaaatgataaatacaatatattatgaattttatgtgatgctcataaaagtcattaaatttgggcaggtcatcaaatttgtgataagtagtagatgatgagactcctaaacgattcttgtggtgagtagtaagtggtgaatatttgtagaaatctccctggcctgataattccagataaaattggaatcttacaggaatgaggtagaggtagagggagaggatttgtaattcactttttttttggctgataatcagtttgcttttggcttaactgtagactttattgattcctcttaaagtaatttcccagaagaattcgaaagcttagaccgtcttctcatgcttcccgggtacagtgatgctatatggcaaggagaagtagcaggcagaagaaattttaactgttaacaatttgttaagtgtaattttttttttttttgtgcctgagatagtgacctatttcttttaaatgtgggcattatttgaaatgatttttaaacaggtagagagtgtcataaaatttttatatgagggaacattttttacttcattctcattgcttttatttaatgtgcccatatgtgaatgcatagccactggttattaattttctaaatgtagaaaataagggaaaagtaactgaagcattatcttgaaccaatttgaggaagtgaaatgtgcttgcccaacttttcttaaaatgggctaagtcaggttaaaaa

SEQ ID NO: 100145 - DNA, 1045 bp, Homo sapiens
ccatgttggcagcctggtcttgaactcctgtgcttaagcaatcctcccatcttagcctcccaaagtgctgggattacaggcatgaacccggctcatatgctactttctaaatgaggctgccctgatttctctgtttaacagttgactctgccctctgcctctcctcctggtgtttgcagtcccccttaacctctccattccagaaagtttgctccttgaggcaggtagaagtctttgttttttctgttcactgtgtgtcccaggacctgaaacaatgtctagcatgtaggaagtattaaaaaatgttggcaaagttgttggatacaaatagtttttatctttagtttgatttaataaaatctaagtcatttaataagttagagctttgtatagatgtccttatctcctaaaactaaatatagatgaagacttacaattttcatacctaatttgccttaaaaagtgctggttaagtctatttgtatattgatcattatgctgtttttctttgcccaaagcgaggtgctcagtcccctctgatctttctctatgtggttgacacatgcctggaggaagatgaccttcaagcactcaaagagtccctgcagatgtccctgagtcttcttcctccagatgctctggtgggtctgatcacatttggaaggatggtgcaggttcatgagctaagctgtgaaggaatctccaaaagttatgtcttccgagggaccaaggatttaactgcaaagcaaatacaggtttgtaccttacttgtacaggagcagaaacaaggacttttttttaaaagagactggggtctctttaaaagagcctgtagcccaggctggagttcagtggtgtgatcattgctcaatggctcaagccattggcccacctcagcctcatgagtaggtgggactagaggcacatgccaccacacccagctgaggacatttcttaaaaattagtcattcacttttagtgtcattggaaatgaatctttttggcttttttttttttaaggatatgttgggcctgaccaagccag

SEQ ID NO: 100146 - DNA, 1015 bp, Homo sapiens
gtactaaaaatacaaaaattagctgggcatggtggcatgtgcctgtaatttcagctactcgggaggctgaggcacgagaatccgttgaacctgggaggcagaggttgcagtgagctgagatcgtgccactgcactccagcctgggtgacggagtgagactgtctcaaaaagtaaataaaaataaaaatacaaaaatttgctggggatggtggcgcacgcttttaatcccagctacttgggaggctgaggcaggatgatcacttgaacccgggaggtggagatcgcaccactgcactctagcctgggcaacagagagagactctgtcacaaaaagagaaaagaaaatgatttacatgtttttatatttgattacctccttcggtaattcaggcataccttgggaataatgtcactgtttcctaaagatagctttcctctcttcacagcactatgagatgcttgctaatcgaacagctgcaaatggtcactgcattgatatttatgcttgtgcccttgatcaaactggacttttggagatgaagtgttgtgcaaatcttactgggtatgttgacagtgaaaacctgggcagagtgacagtgttattttaaggaaagagaaattagtgatggagccataggaatgggcaaggccaactcagagaagctttcaggtagctctgggctatggtttcagtgactggggagggcctgtgggctccttggagagggaagtagtgattagtaggagggctcaagagttcactacaaataagtcgtttcagagtaacttatttcttccttagagttgttaacacttttacagagaccaggccaagaaagcaagcagcatggactatctggccttcatcagggcacttccttttgagaattggggaaaacagggtctgaatgctgaaacaactaggataaacctggctaagtggccatactttgtgactaactccaagtgcactcagcctagaggttgtactgactcaaagcctgagtcagtattg

SEQ ID NO: 100147 - DNA, 1949 bp, Homo sapiens
tcagcctgggcaacagagttgccagttggcggggcaggtcaggggccgtcattagaagatacgattggaattattacttggagaattagagataattattaaatcatctaggttagactttaaaccataatcttaaatgcttgagggttttcttttaaagatggacttttgaaatgaattcacattttaaaaatctaagtatgttggccttgtcgttatattggagttcatgaattaagtatttttaaagcaacacaaaacagtatgttctctgattaggtatatgcaaataattatggatatacatgaatgtgaatatattcatacaagggattggaaaagaatgtagtattgttagaattgttatctacatgtacagtaatttccaagtttaaaaagtaagttgtgagagttgaaaatgctcatgtttcaagtgtttctaagggtggattttattaaagttctaatcacagtggctgaggaaaagtttgtaggactaagcagttatgatccctgtggagttttctcttggcagaatagtagtgttatattttccctctaagctttcattgtggccatgatgacagcagggtggattgaagtgatctttaactttacactgtcacatatttgttatagacctctcgggaactgaagattgcaggagccattggtccatgcgtatctctgaatgtgaaaggaccgtgtgtgtcagaaaatgtaaggaaaacaactccatcaccctcacctcctgccccggatttaacccgtcagaagtgtcagagcatgatgatctcacatgtgtcacctgttggatgtgtctgcagtgacaggagaagggctaaccctcactgatgactatactcggagaggtggtgttattccatctgttcatccaaagggttagagagaaggaaactgaggcccagaaaggttcagtatcttgctcagggtcagaactgacatgaaggagttagagcccaggtgcccctgactccaccacccatggtcgttgtgccaaagccacggcatgctgttcagcacaaggcaaacattcagcacagtccttccagagtaagcctattgctcattgcccttagaggtgatacgtttgtctcactcagctaataacaagccttttacaacagagaccaccatgagttggtgtggaagtgggtgacactgctgtgtgtgcagacatctgttttctctagtaatagtttttgagaacaatttagttatcatttgagatgagcggctttgcttattgtccacttcctctgattatactttacttgctaggaggcaaaccattcggtttggcaaggcctctctaaggtggtcctgggctggggttacacagtcatgttcttccctcattgtcaccatcaatgggagggtagaccatagagccagatgtggatccaaggtgcaggtttacaccccgcacctggcccgagcaaaggacttatttgctctgtgattcagtatccttatctggcaaatggggataataacagtgcccactctacagcattgttaggaggtttaaatgagttggttcaggtgaagcagttagtgcctggcacactggaagtgtgggtcttctttcatgttgtcagcaacaaacgttcttgggtgaccacataaattaaacttttgttgagcttggcagaggcaaggtgatttgagagcacattcctgtagccttctgagtgaggcagattgctgccctaaagcccatctgatgagtcattcattacccccagagtactaaggggcttgtacccctatttcctggcaaggctttggaaggctgccttgttataaaatatttttcatggacttaaaatctgcctgctgaaggcttcttgaagtagtttaagaaggtatttttatgaattagtacaaactaattaatatttctagtagaattcagccatgaaagt

SEQ ID NO: 100148 - DNA, 1085 bp, Homo sapiens
cccaggtagctgggaccacaggcacctgccaccaaaactagctaatctttttacttttatgcagagagatggtgatctcacattgttgcccaggctggtcttgaacttctaggctcaagcagtcctgccaccttgccctcccaaagtgttgggatttcaggaatgagccactgcacctagcctgtgtttctttttctgaatggatgtctggctttctgatctctcctaaacataagcatggcactaactctggaattgtcagttgggcagatgtacagagtcagctcaggcacatagaagcagcatttgaccaggaggctgcggcagtgttgatggcacggcttggggtgttccgagcggagtcagaggaggggcccgatgtgctccggtggctggaccgacaactcatccgactggtaaattggggacagtggcattaggttcagtcttggtttctgctttactttcgagaagaaaattgtcacttaattattattatatagtgaatcagcaagaatttatcagttgcctaccttatgctgcacgctggacattctgttaaagacgtgttaaatgtgcattttcccctcagagatttacattatagttgggaagaaacaacacgcatggagcatttggagagtgatacaaatctgtgtgggttgagttgacttagatgagtcattttgtgaatgctctggtcttgtatttttcttctaaatctggaaagtggttttggaaatagggatccagcctggtaagtttagggagatgccttttatcagtctggatttaatgagatgagagaagtcacactgtaatttaaatggggaaagtcttttataaagaatacaacaagagagtagaacagtgagggactggctagaaggaagtatagagaagtgggcagccactacttgtggggctgagatagagcaccaaaggaagtgcccttctccccagggctgatccagacctagttgggagggcatggccatggcttggtgagtcttttgcagagaagttaccgtggtgctgtgccaggggaacttactagaaattcactttctagaatttgaagaaaa

SEQ ID NO: 100149 - DNA, 1027 bp, Homo sapiens
tgagcagaaataaaggcgggaagagaaaacattgtggttcagaagtctgccattgggagaaataaatttgagttttagtgtgagagaacatcaaagcgtaactataattgttagttttcatggtgttagagggttttcatatggaacaggtgcctggaagagctcacctagcttctctggttagggcagtcctcaggccagcattgcctgagagctgattagagatgcagaatcttcagctcctccctagagtctgcattttaacaagatcccctggtcatttgcctgctcactgatgcttgagaagtgctagtctaggacttatagtaagtggcagagttcagactggatgtagcttagtccaggaatatttccaggtaatgctaacttagatttttctctctctttttgtgtgtgtttgtttgttttttggtattttctttccatagtgtcaaaagtttggacagtataacaaagaagaccccacttcttttaggttatcagattccttttctctatatcctcaggtaagtaatgtatgtttctaaaataactacagagcaataaattttgatagaaattaactttattcttagggtaaagtgaagactttttaatgtgttgagactcagtctgtaggtgacagagattgttcaacccaagtcgaatatgtgtctaggcaagacagcaccctacgccctacagaagatagagatgacatgcagaggggagaaaactcatgcatacattttcatgaacaggcaaaataggatcattgatataaggccgtaaaaaatatctctcatgtgtagaagttctggggaaacagctacctcagcaacaaaccaagaaaatgagcacacatggagatgaagataacaaaacaaaaccacagttagtacaacaaatatttaataatatgtctgtggttattatgtgcatcataaccaggagtgagcaataagcagctcctgaaagtaactgcactctgcatgaaccaagcctttggaagccattggacaagaga

SEQ ID NO: 100150 - DNA, 1008 bp, Homo sapiens
acccgggtaattttggatttttagtagagacggggtttctccatgttggtcaggctggtcttgaactcccgacctcaggtgatccgcccgcctcggcctcccaaagtgctgggattacaggcgtgagccaccacgcctggccaaaggccctttaaaaaaaaaaattaatttttaatgtggtaaaacacacataacaaaatttaccatcttaaccatttttaagcataccgttgagtagtgttacgtgtattcccattattgagcaactgatgtctagaatttttcactttgcagagctgaaactctgtgctcattaagcaacaactctcagttttcctctttccctagcccctggtgcccccttatgctttctgttctgtgaaaccagagagcccttttctgggttctcctatttcagagccctgaggtagatctactctgtgggtgtctaagaaggttacaattatatgcatttctctttccgttctttgtgaatgcagtttatgttccatctgagaagatctccatttcttcaagtgtttaacaacagtcctgatgagtcgtcatattacagacatcattttgcccggcaggacctgacccagtccctcatcatgatccagcccattctctactcttactcctttcatgggccaccagaggtgaggctctacccaaatgctttcctgaggattggaatcacctaacatatattcttttttaagcaaatttacttagcagaactgtaaaaaagaagtaaaatttggagtttttatagtaatttaacattatttctattaaaaaatacctttaggaaaatgtcaaaggacatataaagctattatttgtgaaaggcaggaataaatgtaaaaaactctaggaaataacttggatgctttctttttccttgtgcttgtatacttacatccaacaattccatgtcttgtatctgaaggaaagactcctagatacagagtagactttgtgccaaaaaaaaaaatagtaaag

SEQ ID NO: 100151 - DNA, 1049 bp, Homo sapiens
tttaaagagttaactatttccagcttttttctacgtaaagtgtattattgtgtgtgtgtgtatatatatatatatttttaatttctttacaaaattggaatcttactacaaattgaggtttctattcaatttttcccataacattaataaaattataagctttttctgatatttgaaatatccatctgttcagtggagataccagttcactcgtttgtgggtacaccattatccagcttctgtggtaagcagagcacttaagaggaaaggcaggcatatgggcctccgtgagctcacagtggtggggagctagaccctgggtacttcatcaggactatggagaagagggtaaagtaaaacgcctgatgctcaaaactagcaggcggtggtggcctgatctcggcataccaggaaaggattttgtgaggaaattgtgctttagtcaaaagaagttgttcgtgaggcagaggatggggtgatgggagtactcgtagcagaggggacaacacctgtgaatgttctgagggaaggtgcttgacagctcatgaattctaatcagcttctaagatatctgccaactaatctttatcattacatttcaggaaactggagcacccatcctaactgatgatgttagcctgcaggtgttcatggaccatttgaagaagctggctgtctccagtgcctgttaagctgaggatacaaccaggaaatgcaacggtgtcagattgtgttcaaaatgtctagaaaggcttgataacattcctgttacttttctagcagattttaacaaataatcaaggacattttatatgtaactctttagattataatttatttgtattcctgtctttgtcctttttcttgcactataaaattataaggtcataaatgttttggtacttgtagatgtttatgtgctttttgtatcctaacttttagaatctaaataaaatcagaggtaatgtattttggcagcttgtttaggtgagaatcttaatgatcataaaggaaataaatctagatgcagaaagtactggctaaaatat

SEQ ID NO: 100152 - DNA, 1064 bp, Homo sapiens
aaaatcatttatgatatgaacattttccactttgtgcttcctgtatactgtgttaccatattttttgatattctgcaaaaggcaggaatctcttttctgagaattaatatagctgagctggcttctctgggggaggaaaacacagttctgtttttatagatgggcaaacttgaccatagaaaattttgggtgtcttacccaaggtaacatagatgaaatatggccctaagatcctgcttaatggttgttcactttacagctcccattcattccagagataaaatcagaatggatgggaattattatcatctcactgcatttatgtaactcttttcattttcgaatacgtactgactttaaccaaagaagttataagaagtatgtatgatgtttaaaatactcctatggttacttaaaagtgctttatgaccttgtttggttctgagttcttctctcccttttggttcctttctagttggaggagagcagattagtgccattggaaggggcatatgtgtgttgctgggtatttccctggaggatacgcagaaggaactggaacacatgtaagatgcatttctgtcattgctgtttgagtgggctatgtggtggtggtcatgctgggaacttccatagtactttgtgcctgtgaggtgagcccctgtcacttttaaccattgtcccattggatgtagtatggttatctccgtgtttcagagaagaccgaggaagaatgatttaggagacctcaacgctaagtcagcctttgagcaggagcaccgcctgtcccctgtctgtttgctactgtggcctcagagcatgcctcttgttctcttaacgcaaaaaccaagcctcttttcttatgtttggtttctcttttttaaattgggcagttatctgggcactatgtatttttagaatgtctactagctcgctgtgcacatagggatctagaactcagagaggttaaattgcttgccccagatcatgcacacacacttagcaaaaagcctgaaccccagttagagtctgggctccctgaccttgaagccagtgatcttttt

SEQ ID NO: 100153 - DNA, 1003 bp, Homo sapiens
tcaattggaagaaataaagataatttttaaaagaagatacaggcataggtagaaagaaacttctgttcagtgttgttacaatccaagtaagtaaggtgacttgggatgaaacgaaaagtctgaatcattcagcaggaggaatgggaagagttcaaaaccttattgattcagggactacgaattcagaaaaaaattatatataatatatataatattagatatataatttttaataatgtgtatatataatataatgtatatacatatacacacacatatatatttgtgaccatatatatgagggtttacttctggactcacagttctagttcattgttctatgtttctgtacttacacagtaccatactgttttgattactgtaactttgtagtaagttttgaaattgggaggtgtgagtcctctaactttattcttctaattaatgattgaataggtagtaggatgaggtagttcagacatcaaaatgatatgaaaaggtctaaactggaaaggtttgctctcattcgtgtctctgtccagcctgtttttcttgctctctagaggtaattacttttattatttttttctatccatctatccatttgcaaatgtgagcaaatatgaattttaaaaatattcccctttctatacaaaaggtatgatgtgatgtactgttttatatcttggctttaaaaaaaaattcacagtgtgtcctagagattcttttcataccagttcatagagacttctttctttttttttctcttctattctgaacaaattaaatctctctttttaaactgctgtgtactgttctgtggcaggaccatagcctggcttatttaatagatcttgtattgttggactcctggattatttctaatttatgtctcttaaaaacaacagtgacatgatgaatacatttgtacatatgccacttcatatgcagtcgggagatacctgttggagaaattctcagaaatgggatagacggtgccaga

SEQ ID NO: 100154 - DNA, 1088 bp, Homo sapiens
ctttgagccaggcgtctgctgctgtgttgtcccagtggtggttcactggcactggcccagcctctggggcactggggatgccaaggaacactcctgtctctgtagaagcagccctgtacttgaggtcagaaccaccatggatgctagcggcttccagagtcatactcccaaaggctctaggcacaatcctgcgcatccagatcaaactcctctagcaggcagtggctccagcctggccccaggcttattttgaacccctcaatgccactgatttgcttaatttcttgaggtcccagcctgtaacccactgttggggtttccatcagtaacagcctcctgcctgctcaggttctgaacagattgaaagtagaatgaagaggaagcctgtggggtgagaatgcctccttggtggcagataactgcctttaggggatgtgcttagatgggctgacctgaggcttactgtctagtgcccatgtcccatactggtccccaaaggttggctgaggtccagcccattcatggccacacagggccagctctggagagcagcgaatgtgggcttgctcccagccaggccaagaagcattggtacacgccttttgttctccccatttttctttcagagtatacttttttggcataatatttttctgtcccatccctgcaatttgcgcatatactaccatggacagtggtaggcatgacaatagtaataatagtgactatgatttcctgtacactcactgtgctgggctgtgtactaacctatgtgcacctttgtaaccatcccaggacaactgtcctgttgcaccagaacaaactggggcccggagaggtggtgtgagccttcttggctggtggctaaagtcagtgaagcattgtccagaggggcatggacaccagtttttgtagctacacagagaatctgcagggaggcactctggtttacagctgttagggccttgaaaagttctgctggagatgagttcatgggtggttagtctccagctgagagctttcctgctttaaacatgcagcataagcgtgtctaacatgtgcttaacctgcagctctgggtagaaaga

SEQ ID NO: 100155 - DNA, 1033 bp, Homo sapiens
tcaattaagcttttaattctcagtgttttatttttccattatattccaatcagtaatgaaaactgctacaattacattaaagaaaaatggttcttttggcaaatttcaacgttatagaaaaatgattcttttagcaggttcttttaaaatataaataagttctttaaactatctgaacaaatggatgatgtgtgtgtgtatatggatgtatatgtgtgcatgggtatgtgtgcatatgtgtatgtgtgtgtatgtgtgtgtgtatatgtgatgtgtgtgcccatgtgcatgtgcatgtgggtatgtgtgcatgcatttgtgtatgtatgtaagcaccaagtgtcgttttggtatttgatggtgtgctaggcactgtgaggaagagaaggaactgctgctgcccagcctgtgcagccggggatagattttgggcaacataaacctgaaaggttaatgacagtgaaagaggtggacagcataagacaacttaggaaaggttacaagaccattcagtttgtgctcctccttagaactcttcagtgccttccaagtgcattttgctgaagccttgcattccttgctgtcatttgccaaggcctaagtgaccaggcgtccgtggccctttcttgcctgctctgtggctgtctttccctccatccctatgcttcacctactgcatctgctgttgcctcctctcccttgctgagaagagggtcaagctctttcctacctcggagctcttgtctcaattccagggtctccccctccttctccaagaatctctgacccccacagttcccaggaagccccttcggctactctactctgccctgttgctctgatggtgtatttcacagacttcacaccatctgctatcatggtccacaccactcataaaactcaagctccctgagtgttgttcactgccctgtccagggaggtgtgtgtgggtgggaggggtggtgtttgtttagcagtggtgctcacagctggtgggctgtggtgtctatgaatgtcctgagttcagagaagg

SEQ ID NO: 100156 - DNA, 1018 bp, Homo sapiens
ttatcagcaagcattaatccctgagcctggaccttggaatgtcaagattgagacattcatggcttttgtaggatctgaaagaaatatgtagggtaagggggtgtgggggaaaagaattacatttggttttatttatttatacttccagtgacaggggcagccttttgattacctgctgtggaatccagaggtgaaatgaaggacacatgagcacacaggtggcttgcttctaccaggtggccccatcacaggtgcacagaggggagctctcacttgctgcatatttcagtttgggggacaaatcaaatgagaagtactctgaatataaggaagaattatgttgttgctaataactttgcatctcttcatggaagaacagttatttaaatgtactccttttcactctgtttttaggcttgaattctagattctagctccctaattgtggttggtttcagcttcagtgttcacatggcctgaaccaagctcgagttgttgacttgctgcaggagtatgttttaaagtctggttgccaagatggtagccagatcttgtcaattactccagaaatattagttcattttgtcatattaatttattgaacaaacgctgactgagggtccagctttgtttatgctgaagtatcaccaaaacagaagtgggaactcagcaaagcgtcctcattacagagttgttgctgttgtgcagtctttgtcagtgacgctgacttctgggacgtaggctgccacatggaaggcctcctaccagggctagggcgccacctggccagacctctcaccacacatggaatcacctggatttctgatcctttctgtctgagcacctgctttccatgaattatgagatcagctcagccctctggggagtgagttgggtgtagagatggtggagctcctgacctcactcagcccagcccactgctctgcacagtcagaatttatcctgagtccttgtcagtgcctgggggaatgcctgcctattgcatgaatatttggta

SEQ ID NO: 100157 - DNA, 1418 bp, Homo sapiens
ttagcacatgttaatatgggctctacaatctttaagttggtagaattattttattcaataaatggctaaactgggagttttacagggacttgttctaagttagcatctcactgagtgagaattattgttaacgataaagttgcctcaaaactatgtagctttctccaagaaggagatattttgggaaaactgtcaggtttaacaaacagaacatgtatacctcccagatgtgacctgtgaataaaataccaggtaggctcagccaacttttcttttatgcttctttcatgtctttcttaatagaatttaataaaatgaaacaggaggaggaatcatcaaaggttaggaataatagacctgaaagagttgcttggaacctgtgtagattcatttctcatcttggttcctttacttggcatcaggtgagatgagacatccattcaggaattcattccaagtctatttcagtacccaggatagatttgagataaatcagttccatactgaggtgtgacattaggcaaatcaagggaaggaggaggaaaggaatcaggtcagagctcagcttactttattcaaccgtggcgtatggggccaggcgcagtggctcacatctataatcccaagactttgggagcccaaggcaggaatatcgcatgagcccaggagtttgagacctgcctgtgcaacatagcaagactccatctctacaaataataataaaaaaaaattagcagaatgtggtggtgcacgtttgtagtcccagccagtcggaaggctgaggcgaagaatcacttgaacccagggggttgaggccacagtgagccatgatcgtgtgtctggactccagcttgggcaacaaagtgagaacttgtctgtaaatcaaccgatcaatgaatcaatcaatcaatcacctgtggtacatggagttctataaagataggtagatagatgagagatagagagagagaaattcgggacttggagaggagtgcagcatcaggagttttattgaagcatctaattttcacctgcagaaatggaaacaaggaggaactggtctcctaatttacatacccgcagggagaaatctgtgtgtaactctagattgcagtgcccggagcagaagcagaggcatgtggccagttgtgtcttcctaccagttctggaaaaatgagatagacttagataccagctcctgcaagctttggaggtgtggcctcaatatctaaaatgaagtctctgtgtgcctgttgttgggtgtttttgtttttaatgcttaattgcattcctagaattcccaggtttgcctgttaatagtggaatactatacaaaggaaccacagaggtttcttaacatttacactacattggaatcctattcctggctgaaatggtgttttgcagaaatgtggcat

SEQ ID NO: 100158 - DNA, 1052 bp, Homo sapiens
ttcagttcttgggaggctggcaggtaacacgaaggagcacatggatgctgggggagcactatgtctgcctcgctcctctggtcgtcagagtaggtgccattgtagatttgacagctcttgtccctgcagccctcacatagctaacaccacaccccattcacttgaagtcttctgtttaccagggaatcggaggtttgaaatcaagcttagactccacacgtgtctcagtaccttccttagtcgtggccgtggcagaacagcctctccaagtgcatcctggaaaaccggcatcagagcctttcagtaaatgggcttagtgtcatttaaattttaatggcaatattcttttttgttgttactttaaataaattccagtttttaaactttttaattttgaaataatttgtcatacaaaaaaagttgcaaaaataggatgcagatcacctttatacctttattcaactttccttaatggttgttttttttgtaactataatataatgatctaaaccaggaaattaacattgatacaacactaatccacagatcttctttgaattttgtcaaaggcaatactattataagtaaaggaaaagccgttctcaggttccagtttgcacatcccatcacctatgtgtggtctttctttggtcacggggaccccttactcaacaaatgagcaggatgcgctgagagtgcctactttgccgattaacaggtaacctagcactgggccttttgtagttcatgcattactatttttgcattactactctgttggcaacatgctgaaaaaaaacaaggggaaaggataatagcccttcttatttattagaaaatagacaaagaacctctagtaattttggagactttggagataaaaatggtctaaaactcagaccatcacttttctgcaatctttccatttctcttggccagagatagcacctctaaccttagctaattgggttgcccaaatgtgggcttggccaacaaaaggagcagaatgagggagtccagatcgctcagcagaaaataattctcaccactgc

SEQ ID NO: 100159 - DNA, 1050 bp, Homo sapiens
ttcacagttaattagacgtcctgtattttgttaaatctggcaaccctatttggaattcttctgtaagaaagatttgtctctttcccttgatgtttgattttgagtttgatttcactatcttcttggtatagctttcttcctactttctgtcatccttcagcagagtttgatatactttagtgattgtactttctctacttaattttttttaaagcaacatggaaaatagttttgtttgcttcaaaaaaggaatcagtttatgtgtgtgttttaatcaaaagatttttctcattatatgagccaaaaagcacattagtttccaacccctataaatgaaacccagagttgaagaaaacaagggatttgtaccgaatttctaagtgcagattgtgggaggggcagggaagaaggcgctgctcctggaagcagccccaggtgactaaagcagcagccagccaaacggttccatccagcctggcagtatgaggcacttgtgatttgcttatgacccatgacttccagcaggtgtgagagaattctaagtggatgtggaaaccaaggagggctacgtggtggggatgccaaagggatctgtgtagtttgcttttaaaaggaaacccgacctctcgtttcatgaagtgcacctagcccatcagatggcattgcatttcattaaagcagccattctgcaccacgattaccttgagtgttttgttctcagcagctggtacccatcaaattggggcctgcttttcatcagcagcaggtgttccaggaagcagccagggactgcagagttcaaagatggctcagctcatcctggagaggagaccactgttgtctaagcggccctgacgagcctttccagagctgaaagatcgctgatgggccaggcagagaggaggttttgggactcgggaaccaaatggggctgctctgctggcagttcccctcttatcagtttacttgaaagaaggatggcacatgagagggcgtgtgtcccttgaagggaaggtcccccctggcatacagcgggtgtttttttgaaca

SEQ ID NO: 100160 - DNA, 1191 bp, Homo sapiens
gtagtgcacgcctgtaatcccagctacttggaatgctgaggcaggagaattgcctgaacccaggaggcggaggttgcggtgagccaagatcacgccactgcactccaacctgggtgacagagcaaggctgtgtctcaaaaacaagcaaacaaatgtaagtcatttccatttgacttctcaagagctcatctcttgttctgcaattaaattatcaacttcttaaggcaagaaccagaacttaaaactctgccacagctcccattgcagtgcacagagtaggcagtcaacaaatatttgcttttgattagagttctaaataaagtcgtttactcagaataaagaagctttgtgtcactggaatgagaacatggtgttgctgtttctcctgctcacatccaatcttgtcgttcttcattggttcatgagaggctaagagcaaatcaagccaatgaacagagaagccatggagtgaaaccttcagaggtttctgtacatccagacagtgaaaacattgtcatcatcatcagtatcacctattaacagaaaaacgtgagtctcaagtgctagtggcattcatagtgaattattttgtgtcatttcctttagtgtttgtcccatggacccactcggcagattcttgggtgtgctggccattcttgggtgtggttgtggatgacaacctcatggaaatggaactgagagatgccttgtcaatcctcagtcagtgctcttccaaacagtccccactgtgcacatgccctggaatctgcagtctgtggctctgttgcttagtagaatcaaggcaggtggatggagaaaggctgccacttcacatgacattctcatgtaaggggcctctttctcattctctagtatttattttatcttgagaccttggtctcattacagtttaaattttgttctcttactttaatggcttatttaattgagaacatttcaatgaaaaaatgtttaaaacattgtagttgtaaagagtctggggtcatgcggaggttttaattgatccctatgatgaatgaatataactccctagtgcagggcctccttttcattatttctcaaggcctttatcccgtctccatcagcacagaacagcttgatgttttttggccaattgcagtctgagttattccacttttaaagcattgacttcataaccgagaggctgaa

SEQ ID NO: 100161 - DNA, 1023 bp, Homo sapiens
taccttttttcctgtaattacttgctaaatttctgtatttccctgtggatttatatatcctactttggtgatttttttttccaatttactaacttgatttgatattaatatacagagaaactgttgcaagtgaaacattctgagcaataataattttattgacttggaagcctggctgtcttgatttccagtgtttgcctgcagtgtttaactgacaaccctgagattattaccaaacgtttatgattttttaaaaagcaggagaagaggtagagaggggaatggaaaaaatgctgtttaaattagaaactgcttgtagcagttccatagggaggcagttaacccaagtcacttaaaatatggtcacgatattgagagttaaataattttacttggagatgacttcaagaacaaatatcaaaaggtccaaatgaacttaaaggtacatcaaagggattgcagggcagcatgcatagtttcaagagttactttgtggagggtcgtttcttctgtgggtttacccccaatttggggccacatgtgacctcgtgactccagattgattcctagtgcctctgtggacaaggccagatgctatctcctctgggggagctgatgcccctcctctgctgccccagttagtgctcaccaagcagttttggaaatcagctggcctcccgtctgtcacaggggagccctagaccatggtgatggaaatctgcccctgcctctgcccctgggaccaccctgggcagaatagtgtgggtgcctgtgcagagacctttcagcctttgcctgcagttgtgctggtggagaccccagtcccagctcctgggaagtgaattctgtgtgtgtcacattggtctttaagtcaggccgtctctgttagttgtttagtgcagcatagcaggttactcccaaactcagcagctcaacacaacaataaacattttttacacagtttctgtgggtcaggaatttggaccattgagcccaggtgtttctggccaggggtgtctcatg

SEQ ID NO: 100162 - DNA, 1034 bp, Homo sapiens
tccagaaattgttcttcatatgagcttgcatctttctaggttagcccactgcctactttaaccccacatctcactggacatgtagtatctcttgagttctgatacttgtcattttctggaaactcgtaatataatattttgaaactcgattgcaggtgagaccatattgtaactgtgatctattctaaaataaaagatctgaaaacatatcagaaatacacttttaggattataaaatggacattagctaaatgttcaatgttgaaatgaagttcaggtgagctgtttaccctctgggaaggcaacattttacctttttggttccgcatttgttttctctctctacttccccattcctcttcctcccctcgtcaccgcccttcctcttcccttcctcctgcattgccagcactacttttttttctcccctcccctgctcaccccacatctatcacattccttgatagagagttgattttcttctcagtatgtcgtaggcttagaatcagtagaccctgccggacacaggccttctcctcactcttctgggccttggctttctaggagagctcttttctccatgttgtctggtcatccattagatggcttattaggagtggaagaaaaagctagtgagaccctgggcttatgtcagcagctgttttttgacatttctatagtattcagagttaaacccggagtgagccacacccttaaccaggtccatgagtgagccagcaacttatttctggttttctcaagaccatccttttgagttgtgaaagtgtttcttgatttacattttctttgattgcatctgaaaaggcctgttggcctgacaaccgttgctatgggaataatactcgtggttagtgctgttggcagtcaccattatcaaaaggatcaggtgcctatttatttattcatggtgtggaacaaggttccctcataaagcgcatgaaccttgttctctcccaccttattatagtctgaggtttacatgacgtgcatccaaactgtagtagtgattttaa

SEQ ID NO: 100163 - DNA, 1038 bp, Homo sapiens
tgaattgcctgttcctgtcctttgctggtttttatcttttcaatggaggtgttctttttcttattgatgtgtgtgttctctgttgtccaccgtgttcttccttgtagcagaccatggctatggccctactcaaagaccaggttagagcagaaagtcttggggaagagattttatgagaagttgcaccaccacaatgcagactcactcaggccttccacaaatatttatttagcactgactttgtgccaggcactgtctagacacttgggatttagcagtgaacatagaaagatacatacagagcttagattctggtctattgggggttgtatggagctatgggaaatggtgcaaaagcagacaggtgtgccaggtggtgatgaaggtgatggagaaaattcaggcagaggagaaggatggggcttcctagtgggctgcatttttagggaaccatttgagtcaagacctatgccagggggcaatcatgcagaggtctaaggaaggacatcctaggtagagggaacttccaggttgggtcccagagagggccagtgctgggtgagtttgaggaactatgacagcacacagggtgtgagggtggcagtgttggtggagggaggtgagggggtgtcaggaccagggacacagggcctcaaatctgagcagctttacaaatagcaagttaagagggattagaacttgtacaggagtgtagtttgctgaagtgccttctgataaaggagaaatctcttccacagtggtagcccaggttagacttagtgaactgtaggaagtaaaaggaggtatttatagtgtattatgtttgtaaaacataaataaagggttttctttttttttctttttctctttttttattgagataaggtttctgtcacccaggctggagtacaatggcataagcatggctcactgcagccttaatctcctgtgctcaagtaatcctcctacctcggcctctggagtagctgggactataggcatgcccaactaattttttattttttggagagacggggt

SEQ ID NO: 100164 - DNA, 1026 bp, Homo sapiens
tatgctcatgacctgggtgatgagatcatctgtaccataaacctcagcatcacacaatatacccaggtaacaaacctacacatgtaccctctgaatcaaaaataaaattaagaaaagaaaaatttaaatagccacacctggctagtggctaccatattggacagtgcagggctagacaatgtcccaccttgttgcctgcatctggggtgcatgcattactcctactccccagccttagcccctactgcttggagaatctcacacctggtcagcataaagccagttttcaggctgccacttacttaccttttggtgtctgtgccatgaaaagaggcagagaccaaagaggttgtgcctatgtaaaaggaaaaaaaaattagcaccttacttacaacttagggcacaataaagcatgtatctaagaacatacttttattgtctactgattaccaatgatgtgagagccacaccccaaactgtgttctcctccatagtttattcttcactttagtgtacacactggccaatgcaaggacttaatgatctccatctttcatgtgtaattaaatattaacatgatacctaagacaaggagtttgacgtttgctgatttgatgccttgtttgtaagtgatggaggtaatgaaatggtttctaacttcttagagaaaagtctctggaacgtagcatctccattcatatttgccacaagctctctgtatctctgcttcctttggctatttgccagggggaatgccttttatctgcaggtttggggcaggctagggggagaagaggtcattttactctgcctttatgacaaggttaactggtttcatcaggctagtacaagccaccatgaatggatccactcactgagggaagaagacaaatgcctgctagctatggcactgattgagttgttgctgaggtcagtagctcaaagggatgcactaaaggcagagccatctgggctggagtcaggaggagccccactgactgcctggaaggagagctgaggctctga

SEQ ID NO: 100165 - DNA, 1035 bp, Homo sapiens
ttctgggcaaacaacaggttcatgtcctgcgctgctttatctcgggaggagtcgggtgctgagtctccagcatgcagatattctggttgtatctggagtctgttgttggcactgactcttgtttgggcttagtttatgtcatgtttgaaacacaaattgagtgatttgaggttggacccccttactgtactgttgagtttgtgctaaggaaagaccaatcctgctgtgctcttggtttgctagaagcttcaaactgcttttcaggcatttggattcaccagcacccagcatgtttcaatggtaccttcttcatctattttagagccatgtgtgttttgcagcaaatgtaacccatgtggtttgtttcacacacttcctccaaatattggttcaggatctgaacctttgatatcccagaagcatttggattctctccttgaaaaggctgtaacatttccccacttcccagaaaggggaaataatgttttaagactgaggaaggaactcaagctccacagtgtgtctggattcaggtttgtggcacgtggggtctgactggttggggaagcagcatcatgtcacaccggcccctcctcactggggtccaactctcaccaggagacacatgccacccgcaggtggctgccgggtctcacgggaggcccatggacttgtccagggtctgcttgctaactcacagaaggagtaaatctaaactgacggaggcacttagggctttattttttctttcttgtttatcttgaaaggtttttagaagggagatgtcacagtcttttaaaaatagtaagataggccagcctgtggtgttgtaaatttcaatttaggtaaaagagtacacttgactcgaacaatgtggaggtcaggggtgccaactccccactaagtggaaaatccaagtaaaacttttgacttctcaaaaacttacctgctgctagcctactgttgatcagagaagccttactggtaacatcaatagtcaattaacacatattttgtattttgcaaaaagggtaa
